United States Patent Application Publication US 2023/0087228 A1 - sequence listing, part 8

SEQ ID NO: 954 - DNA, 169720 bp, Artificial Sequence
  Synthetic Oligonucleotide
  misc_feature (1)..(73756): n is a, c, g, or t
nnnnnnnnnnnnnnnnnnnnnnnnnnnnnnnnnnnnnnnnnnnnnnnnnnnnnnnnnnnnnnnnnnnnnnnnnnnnnnnnnnnnnnnnnnnnnnnnnnnnnnnnnnnnnnnnnnnnnnnnnnnnnnnnnnnnnnnnnnnnnnnnnnnnnnnnnnnnnnnnnnnnnnnnnnnnnnnnnnnnnnnnnnnnnnnnnnnnnnnnnnnnnnnnnnnnnnnnnnnnnnnnnnnnnnnnnnnnnnnnnnnnnnnnnnnnnnnnnnnnnnnnnnnnnnnnnnnnnnnnnnnnnnnnnnnnnnnnnnnnnnnnnnnnnnnnnnnnnnnnnnnnnnnnnnnnnnnnnnnnnnnnnnnnnnnnnnnnnnnnnnnnnnnnnnnnnnnnnnnnnnnnnnnnnnnnnnnnnnnnnnnnnnnnnnnnnnnnnnnnnnnnnnnnnnnnnnnnnnnnnnnnnnnnnnnnnnnnnnnnnnnnnnnnnnnnnnnnnnnnnnnnnnnnnnnnnnnnnnnnnnnnnnnnnnnnnnnnnnnnnnnnnnnnnnnnnnnnnnnnnnnnnnnnnnnnnnnnnnnnnnnnnnnnnnnnnnnnnnnnnnnnnnnnnnnnnnnnnnnnnnnnnnnnnnnnnnnnnnnnnnnnnnnnnnnnnnnnnnnnnnnnnnnnnnnnnnnnnnnnnnnnnnnnnnnnnnnnnnnnnnnnnnnnnnnnnnnnnnnnnnnnnnnnnnnnnnnnnnnnnnnnnnnnnnnnnnnnnnnnnnnnnnnnnnnnnnnnnnnnnnnnnnnnnnnnnnnnnnnnnnnnnnnnnnnnnnnnnnnnnnnnnnnnnnnnnnnnnnnnnnnnnnnnnnnnnnnnnnnnnnnnnnnnnnnnnnnnnnnnnnnnnnnnnnnnnnnnnnnnnnnnnnnnnnnnnnnnnnnnnnnnnnnnnnnnnnnnnnnnnnnnnnnnnnnnnnnnnnnnnnnnnnnnnnnnnnnnnnnnnnnnnnnnnnnnnnnnnnnnnnnnnnnnnnnnnnnnnnnnnnnnnnnnnnnnnnnnnnnnnnnnnnnnnnnnnnnnnnnnnnnnnnnnnnnnnnnnnnnnnnnnnnnnnnnnnnnnnnnnnnnnnnnnnnnnnnnnnnnnnnnnnnnnnnnnnnnnnnnnnnnnnnnnnnnnnnnnnnnnnnnnnnnnnnnnnnnnnnnnnnnnnnnnnnnnnnnnnnnnnnnnnnnnnnnnnnnnnnnnnnnnnnnnnnnnnnnnnnnnnnnnnnnnnnnnnnnnnnnnnnnnnnnnnnnnnnnnnnnnnnnnnnnnnnnnnnnnnnnnnnnnnnnnnnnnnnnnnnnnnnnnnnnnnnnnnnnnnnnnnnnnnnnnnnnnnnnnnnnnnnnnnnnnnnnnnnnnnnnnnnnnnnnnnnnnnnnnnnnnnnnnnnnnnnnnnnnnnnnnnnnnnnnnnnnnnnnnnnnnnnnnnnnnnnnnnnnnnnnnnnnnnnnnnnnnnnnnnnnnnnnnnnnnnnnnnnnnnnnnnnnnnnnnnnnnnnnnnnnnnnnnnnnnnnnnnnnnnnnnnnnnnnnnnnnnnnnnnnnnnnnnnnnnnnnnnnnnnnnnnnnnnnnnnnnnnnnnnnnnnnnnnnnnnnnnnnnnnnnnnnnnnnnnnnnnnnnnnnnnnnnnnnnnnnnnnnnnnnnnnnnnnnnnnnnnnnnnnnnnnnnnnnnnnnnnnnnnnnnnnnnnnnnnnnnnnnnnnnnnnnnnnnnnnnnnnnnnnnnnnnnnnnnnnnnnnnnnnnnnnnnnnnnnnnnnnnnnnnnnnnnnnnnnnnnnnnnnnnnnnnnnnnnnnnnnnnnnnnnnnnnnnnnnnnnnnnnnnnnnnnnnnnnnnnnnnnnnnnnnnnnnnnnnnnnnnnnnnnnnnnnnnnnnnnnnnnnnnnnnnnnnnnnnnnnnnnnnnnnnnnnnnnnnnnnnnnnnnnnnnnnnnnnnnnnnnnnnnnnnnnnnnnnnnnnnnnnnnnnnnnnnnnnnnnnnnnnnnnnnnnnnnnnnnnnnnnnnnnnnnnnnnnnnnnnnnnnnnnnnnnnnnnnnnnnnnnnnnnnnnnnnnnnnnnnnnnnnnnnnnnnnnnnnnnnnnnnnnnnnnnnnnnnnnnnnnnnnnnnnnnnnnnnnnnnnnnnnnnnnnnnnnnnnnnnnnnnnnnnnnnnnnnnnnnnnnnnnnnnnnnnnnnnnnnnnnnnnnnnnnnnnnnnnnnnnnnnnnnnnnnnnnnnnnnnnnnnnnnnnnnnnnnnnnnnnnnnnnnnnnnnnnnnnnnnnnnnnnnnnnnnnnnnnnnnnnnnnnnnnnnnnnnnnnnnnnnnnnnnnnnnnnnnnnnnnnnnnnnnnnnnnnnnnnnnnnnnnnnnnnnnnnnnnnnnnnnnnnnnnnnnnnnnnnnnnnnnnnnnnnnnnnnnnnnnnnnnnnnnnnnnnnnnnnnnnnnnnnnnnnnnnnnnnnnnnnnnnnnnnnnnnnnnnnnnnnnnnnnnnnnnnnnnnnnnnnnnnnnnnnnnnnnnnnnnnnnnnnnnnnnnnnnnnnnnnnnnnnnnnnnnnnnnnnnnnnnnnnnnnnnnnnnnnnnnnnnnnnnnnnnnnnnnnnnnnnnnnnnnnnnnnnnnnnnnnnnnnnnnnnnnnnnnnnnnnnnnnnnnnnnnnnnnnnnnnnnnnnnnnnnnnnnnnnnnnnnnnnnnnnnnnnnnnnnnnnnnnnnnnnnnnnnnnnnnnnnnnnnnnnnnnnnnnnnnnnnnnnnnnnnnnnnnnnnnnnnnnnnnnnnnnnnnnnnnnnnnnnnnnnnnnnnnnnnnnnnnnnnnnnnnnnnnnnnnnnnnnnnnnnnnnnnnnnnnnnnnnnnnnnnnnnnnnnnnnnnnnnnnnnnnnnnnnnnnnnnnnnnnnnnnnnnnnnnnnnnnnnnnnnnnnnnnnnnnnnnnnnnnnnnnnnnnnnnnnnnnnnnnnnnnnnnnnnnnnnnnnnnnnnnnnnnnnnnnnnnnnnnnnnnnnnnnnnnnnnnnnnnnnnnnnnnnnnnnnnnnnnnnnnnnnnnnnnnnnnnnnnnnnnnnnnnnnnnnnnnnnnnnnnnnnnnnnnnnnnnnnnnnnnnnnnnnnnnnnnnnnnnnnnnnnnnnnnnnnnnnnnnnnnnnnnnnnnnnnnnnnnnnnnnnnnnnnnnnnnnnnnnnnnnnnnnnnnnnnnnnnnnnnnnnnnnnnnnnnnnnnnnnnnnnnnnnnnnnnnnnnnnnnnnnnnnnnnnnnnnnnnnnnnnnnnnnnnnnnnnnnnnnnnnnnnnnnnnnnnnnnnnnnnnnnnnnnnnnnnnnnnnnnnnnnnnnnnnnnnnnnnnnnnnnnnnnnnnnnnnnnnnnnnnnnnnnnnnnnnnnnnnnnnnnnnnnnnnnnnnnnnnnnnnnnnnnnnnnnnnnnnnnnnnnnnnnnnnnnnnnnnnnnnnnnnnnnnnnnnnnnnnnnnnnnnnnnnnnnnnnnnnnnnnnnnnnnnnnnnnnnnnnnnnnnnnnnnnnnnnnnnnnnnnnnnnnnnnnnnnnnnnnnnnnnnnnnnnnnnnnnnnnnnnnnnnnnnnnnnnnnnnnnnnnnnnnnnnnnnnnnnnnnnnnnnnnnnnnnnnnnnnnnnnnnnnnnnnnnnnnnnnnnnnnnnnnnnnnnnnnnnnnnnnnnnnnnnnnnnnnnnnnnnnnnnnnnnnnnnnnnnnnnnnnnnnnnnnnnnnnnnnnnnnnnnnnnnnnnnnnnnnnnnnnnnnnnnnnnnnnnnnnnnnnnnnnnnnnnnnnnnnnnnnnnnnnnnnnnnnnnnnnnnnnnnnnnnnnnnnnnnnnnnnnnnnnnnnnnnnnnnnnnnnnnnnnnnnnnnnnnnnnnnnnnnnnnnnnnnnnnnnnnnnnnnnnnnnnnnnnnnnnnnnnnnnnnnnnnnnnnnnnnnnnnnnnnnnnnnnnnnnnnnnnnnnnnnnnnnnnnnnnnnnnnnnnnnnnnnnnnnnnnnnnnnnnnnnnnnnnnnnnnnnnnnnnnnnnnnnnnnnnnnnnnnnnnnnnnnnnnnnnnnnnnnnnnnnnnnnnnnnnnnnnnnnnnnnnnnnnnnnnnnnnnnnnnnnnnnnnnnnnnnnnnnnnnnnnnnnnnnnnnnnnnnnnnnnnnnnnnnnnnnnnnnnnnnnnnnnnnnnnnnnnnnnnnnnnnnnnnnnnnnnnnnnnnnnnnnnnnnnnnnnnnnnnnnnnnnnnnnnnnnnnnnnnnnnnnnnnnnnnnnnnnnnnnnnnnnnnnnnnnnnnnnnnnnnnnnnnnnnnnnnnnnnnnnnnnnnnnnnnnnnnnnnnnnnnnnnnnnnnnnnnnnnnnnnnnnnnnnnnnnnnnnnnnnnnnnnnnnnnnnnnnnnnnnnnnnnnnnnnnnnnnnnnnnnnnnnnnnnnnnnnnnnnnnnnnnnnnnnnnnnnnnnnnnnnnnnnnnnnnnnnnnnnnnnnnnnnnnnnnnnnnnnnnnnnnnnnnnnnnnnnnnnnnnnnnnnnnnnnnnnnnnnnnnnnnnnnnnnnnnnnnnnnnnnnnnnnnnnnnnnnnnnnnnnnnnnnnnnnnnnnnnnnnnnnnnnnnnnnnnnnnnnnnnnnnnnnnnnnnnnnnnnnnnnnnnnnnnnnnnnnnnnnnnnnnnnnnnnnnnnnnnnnnnnnnnnnnnnnnnnnnnnnnnnnnnnnnnnnnnnnnnnnnnnnnnnnnnnnnnnnnnnnnnnnnnnnnnnnnnnnnnnnnnnnnnnnnnnnnnnnnnnnnnnnnnnnnnnnnnnnnnnnnnnnnnnnnnnnnnnnnnnnnnnnnnnnnnnnnnnnnnnnnnnnnnnnnnnnnnnnnnnnnnnnnnnnnnnnnnnnnnnnnnnnnnnnnnnnnnnnnnnnnnnnnnnnnnnnnnnnnnnnnnnnnnnnnnnnnnnnnnnnnnnnnnnnnnnnnnnnnnnnnnnnnnnnnnnnnnnnnnnnnnnnnnnnnnnnnnnnnnnnnnnnnnnnnnnnnnnnnnnnnnnnnnnnnnnnnnnnnnnnnnnnnnnnnnnnnnnnnnnnnnnnnnnnnnnnnnnnnnnnnnnnnnnnnnnnnnnnnnnnnnnnnnnnnnnnnnnnnnnnnnnnnnnnnnnnnnnnnnnnnnnnnnnnnnnnnnnnnnnnnnnnnnnnnnnnnnnnnnnnnnnnnnnnnnnnnnnnnnnnnnnnnnnnnnnnnnnnnnnnnnnnnnnnnnnnnnnnnnnnnnnnnnnnnnnnnnnnnnnnnnnnnnnnnnnnnnnnnnnnnnnnnnnnnnnnnnnnnnnnnnnnnnnnnnnnnnnnnnnnnnnnnnnnnnnnnnnnnnnnnnnnnnnnnnnnnnnnnnnnnnnnnnnnnnnnnnnnnnnnnnnnnnnnnnnnnnnnnnnnnnnnnnnnnnnnnnnnnnnnnnnnnnnnnnnnnnnnnnnnnnnnnnnnnnnnnnnnnnnnnnnnnnnnnnnnnnnnnnnnnnnnnnnnnnnnnnnnnnnnnnnnnnnnnnnnnnnnnnnnnnnnnnnnnnnnnnnnnnnnnnnnnnnnnnnnnnnnnnnnnnnnnnnnnnnnnnnnnnnnnnnnnnnnnnnnnnnnnnnnnnnnnnnnnnnnnnnnnnnnnnnnnnnnnnnnnnnnnnnnnnnnnnnnnnnnnnnnnnnnnnnnnnnnnnnnnnnnnnnnnnnnnnnnnnnnnnnnnnnnnnnnnnnnnnnnnnnnnnnnnnnnnnnnnnnnnnnnnnnnnnnnnnnnnnnnnnnnnnnnnnnnnnnnnnnnnnnnnnnnnnnnnnnnnnnnnnnnnnnnnnnnnnnnnnnnnnnnnnnnnnnnnnnnnnnnnnnnnnnnnnnnnnnnnnnnnnnnnnnnnnnnnnnnnnnnnnnnnnnnnnnnnnnnnnnnnnnnnnnnnnnnnnnnnnnnnnnnnnnnnnnnnnnnnnnnnnnnnnnnnnnnnnnnnnnnnnnnnnnnnnnnnnnnnnnnnnnnnnnnnnnnnnnnnnnnnnnnnnnnnnnnnnnnnnnnnnnnnnnnnnnnnnnnnnnnnnnnnnnnnnnnnnnnnnnnnnnnnnnnnnnnnnnnnnnnnnnnnnnnnnnnnnnnnnnnnnnnnnnnnnnnnnnnnnnnnnnnnnnnnnnnnnnnnnnnnnnnnnnnnnnnnnnnnnnnnnnnnnnnnnnnnnnnnnnnnnnnnnnnnnnnnnnnnnnnnnnnnnnnnnnnnnnnnnnnnnnnnnnnnnnnnnnnnnnnnnnnnnnnnnnnnnnnnnnnnnnnnnnnnnnnnnnnnnnnnnnnnnnnnnnnnnnnnnnnnnnnnnnnnnnnnnnnnnnnnnnnnnnnnnnnnnnnnnnnnnnnnnnnnnnnnnnnnnnnnnnnnnnnnnnnnnnnnnnnnnnnnnnnnnnnnnnnnnnnnnnnnnnnnnnnnnnnnnnnnnnnnnnnnnnnnnnnnnnnnnnnnnnnnnnnnnnnnnnnnnnnnnnnnnnnnnnnnnnnnnnnnnnnnnnnnnnnnnnnnnnnnnnnnnnnnnnnnnnnnnnnnnnnnnnnnnnnnnnnnnnnnnnnnnnnnnnnnnnnnnnnnnnnnnnnnnnnnnnnnnnnnnnnnnnnnnnnnnnnnnnnnnnnnnnnnnnnnnnnnnnnnnnnnnnnnnnnnnnnnnnnnnnnnnnnnnnnnnnnnnnnnnnnnnnnnnnnnnnnnnnnnnnnnnnnnnnnnnnnnnnnnnnnnnnnnnnnnnnnnnnnnnnnnnnnnnnnnnnnnnnnnnnnnnnnnnnnnnnnnnnnnnnnnnnnnnnnnnnnnnnnnnnnnnnnnnnnnnnnnnnnnnnnnnnnnnnnnnnnnnnnnnnnnnnnnnnnnnnnnnnnnnnnnnnnnnnnnnnnnnnnnnnnnnnnnnnnnnnnnnnnnnnnnnnnnnnnnnnnnnnnnnnnnnnnnnnnnnnnnnnnnnnnnnnnnnnnnnnnnnnnnnnnnnnnnnnnnnnnnnnnnnnnnnnnnnnnnnnnnnnnnnnnnnnnnnnnnnnnnnnnnnnnnnnnnnnnnnnnnnnnnnnnnnnnnnnnnnnnnnnnnnnnnnnnnnnnnnnnnnnnnnnnnnnnnnnnnnnnnnnnnnnnnnnnnnnnnnnnnnnnnnnnnnnnnnnnnnnnnnnnnnnnnnnnnnnnnnnnnnnnnnnnnnnnnnnnnnnnnnnnnnnnnnnnnnnnnnnnnnnnnnnnnnnnnnnnnnnnnnnnnnnnnnnnnnnnnnnnnnnnnnnnnnnnnnnnnnnnnnnnnnnnnnnnnnnnnnnnnnnnnnnnnnnnnnnnnnnnnnnnnnnnnnnnnnnnnnnnnnnnnnnnnnnnnnnnnnnnnnnnnnnnnnnnnnnnnnnnnnnnnnnnnnnnnnnnnnnnnnnnnnnnnnnnnnnnnnnnnnnnnnnnnnnnnnnnnnnnnnnnnnnnnnnnnnnnnnnnnnnnnnnnnnnnnnnnnnnnnnnnnnnnnnnnnnnnnnnnnnnnnnnnnnnnnnnnnnnnnnnnnnnnnnnnnnnnnnnnnnnnnnnnnnnnnnnnnnnnnnnnnnnnnnnnnnnnnnnnnnnnnnnnnnnnnnnnnnnnnnnnnnnnnnnnnnnnnnnnnnnnnnnnnnnnnnnnnnnnnnnnnnnnnnnnnnnnnnnnnnnnnnnnnnnnnnnnnnnnnnnnnnnnnnnnnnnnnnnnnnnnnnnnnnnnnnnnnnnnnnnnnnnnnnnnnnnnnnnnnnnnnnnnnnnnnnnnnnnnnnnnnnnnnnnnnnnnnnnnnnnnnnnnnnnnnnnnnnnnnnnnnnnnnnnnnnnnnnnnnnnnnnnnnnnnnnnnnnnnnnnnnnnnnnnnnnnnnnnnnnnnnnnnnnnnnnnnnnnnnnnnnnnnnnnnnnnnnnnnnnnnnnnnnnnnnnnnnnnnnnnnnnnnnnnnnnnnnnnnnnnnnnnnnnnnnnnnnnnnnnnnnnnnnnnnnnnnnnnnnnnnnnnnnnnnnnnnnnnnnnnnnnnnnnnnnnnnnnnnnnnnnnnnnnnnnnnnnnnnnnnnnnnnnnnnnnnnnnnnnnnnnnnnnnnnnnnnnnnnnnnnnnnnnnnnnnnnnnnnnnnnnnnnnnnnnnnnnnnnnnnnnnnnnnnnnnnnnnnnnnnnnnnnnnnnnnnnnnnnnnnnnnnnnnnnnnnnnnnnnnnnnnnnnnnnnnnnnnnnnnnnnnnnnnnnnnnnnnnnnnnnnnnnnnnnnnnnnnnnnnnnnnnnnnnnnnnnnnnnnnnnnnnnnnnnnnnnnnnnnnnnnnnnnnnnnnnnnnnnnnnnnnnnnnnnnnnnnnnnnnnnnnnnnnnnnnnnnnnnnnnnnnnnnnnnnnnnnnnnnnnnnnnnnnnnnnnnnnnnnnnnnnnnnnnnnnnnnnnnnnnnnnnnnnnnnnnnnnnnnnnnnnnnnnnnnnnnnnnnnnnnnnnnnnnnnnnnnnnnnnnnnnnnnnnnnnnnnnnnnnnnnnnnnnnnnnnnnnnnnnnnnnnnnnnnnnnnnnnnnnnnnnnnnnnnnnnnnnnnnnnnnnnnnnnnnnnnnnnnnnnnnnnnnnnnnnnnnnnnnnnnnnnnnnnnnnnnnnnnnnnnnnnnnnnnnnnnnnnnnnnnnnnnnnnnnnnnnnnnnnnnnnnnnnnnnnnnnnnnnnnnnnnnnnnnnnnnnnnnnnnnnnnnnnnnnnnnnnnnnnnnnnnnnnnnnnnnnnnnnnnnnnnnnnnnnnnnnnnnnnnnnnnnnnnnnnnnnnnnnnnnnnnnnnnnnnnnnnnnnnnnnnnnnnnnnnnnnnnnnnnnnnnnnnnnnnnnnnnnnnnnnnnnnnnnnnnnnnnnnnnnnnnnnnnnnnnnnnnnnnnnnnnnnnnnnnnnnnnnnnnnnnnnnnnnnnnnnnnnnnnnnnnnnnnnnnnnnnnnnnnnnnnnnnnnnnnnnnnnnnnnnnnnnnnnnnnnnnnnnnnnnnnnnnnnnnnnnnnnnnnnnnnnnnnnnnnnnnnnnnnnnnnnnnnnnnnnnnnnnnnnnnnnnnnnnnnnnnnnnnnnnnnnnnnnnnnnnnnnnnnnnnnnnnnnnnnnnnnnnnnnnnnnnnnnnnnnnnnnnnnnnnnnnnnnnnnnnnnnnnnnnnnnnnnnnnnnnnnnnnnnnnnnnnnnnnnnnnnnnnnnnnnnnnnnnnnnnnnnnnnnnnnnnnnnnnnnnnnnnnnnnnnnnnnnnnnnnnnnnnnnnnnnnnnnnnnnnnnnnnnnnnnnnnnnnnnnnnnnnnnnnnnnnnnnnnnnnnnnnnnnnnnnnnnnnnnnnnnnnnnnnnnnnnnnnnnnnnnnnnnnnnnnnnnnnnnnnnnnnnnnnnnnnnnnnnnnnnnnnnnnnnnnnnnnnnnnnnnnnnnnnnnnnnnnnnnnnnnnnnnnnnnnnnnnnnnnnnnnnnnnnnnnnnnnnnnnnnnnnnnnnnnnnnnnnnnnnnnnnnnnnnnnnnnnnnnnnnnnnnnnnnnnnnnnnnnnnnnnnnnnnnnnnnnnnnnnnnnnnnnnnnnnnnnnnnnnnnnnnnnnnnnnnnnnnnnnnnnnnnnnnnnnnnnnnnnnnnnnnnnnnnnnnnnnnnnnnnnnnnnnnnnnnnnnnnnnnnnnnnnnnnnnnnnnnnnnnnnnnnnnnnnnnnnnnnnnnnnnnnnnnnnnnnnnnnnnnnnnnnnnnnnnnnnnnnnnnnnnnnnnnnnnnnnnnnnnnnnnnnnnnnnnnnnnnnnnnnnnnnnnnnnnnnnnnnnnnnnnnnnnnnnnnnnnnnnnnnnnnnnnnnnnnnnnnnnnnnnnnnnnnnnnnnnnnnnnnnnnnnnnnnnnnnnnnnnnnnnnnnnnnnnnnnnnnnnnnnnnnnnnnnnnnnnnnnnnnnnnnnnnnnnnnnnnnnnnnnnnnnnnnnnnnnnnnnnnnnnnnnnnnnnnnnnnnnnnnnnnnnnnnnnnnnnnnnnnnnnnnnnnnnnnnnnnnnnnnnnnnnnnnnnnnnnnnnnnnnnnnnnnnnnnnnnnnnnnnnnnnnnnnnnnnnnnnnnnnnnnnnnnnnnnnnnnnnnnnnnnnnnnnnnnnnnnnnnnnnnnnnnnnnnnnnnnnnnnnnnnnnnnnnnnnnnnnnnnnnnnnnnnnnnnnnnnnnnnnnnnnnnnnnnnnnnnnnnnnnnnnnnnnnnnnnnnnnnnnnnnnnnnnnnnnnnnnnnnnnnnnnnnnnnnnnnnnnnnnnnnnnnnnnnnnnnnnnnnnnnnnnnnnnnnnnnnnnnnnnnnnnnnnnnnnnnnnnnnnnnnnnnnnnnnnnnnnnnnnnnnnnnnnnnnnnnnnnnnnnnnnnnnnnnnnnnnnnnnnnnnnnnnnnnnnnnnnnnnnnnnnnnnnnnnnnnnnnnnnnnnnnnnnnnnnnnnnnnnnnnnnnnnnnnnnnnnnnnnnnnnnnnnnnnnnnnnnnnnnnnnnnnnnnnnnnnnnnnnnnnnnnnnnnnnnnnnnnnnnnnnnnnnnnnnnnnnnnnnnnnnnnnnnnnnnnnnnnnnnnnnnnnnnnnnnnnnnnnnnnnnnnnnnnnnnnnnnnnnnnnnnnnnnnnnnnnnnnnnnnnnnnnnnnnnnnnnnnnnnnnnnnnnnnnnnnnnnnnnnnnnnnnnnnnnnnnnnnnnnnnnnnnnnnnnnnnnnnnnnnnnnnnnnnnnnnnnnnnnnnnnnnnnnnnnnnnnnnnnnnnnnnnnnnnnnnnnnnnnnnnnnnnnnnnnnnnnnnnnnnnnnnnnnnnnnnnnnnnnnnnnnnnnnnnnnnnnnnnnnnnnnnnnnnnnnnnnnnnnnnnnnnnnnnnnnnnnnnnnnnnnnnnnnnnnnnnnnnnnnnnnnnnnnnnnnnnnnnnnnnnnnnnnnnnnnnnnnnnnnnnnnnnnnnnnnnnnnnnnnnnnnnnnnnnnnnnnnnnnnnnnnnnnnnnnnnnnnnnnnnnnnnnnnnnnnnnnnnnnnnnnnnnnnnnnnnnnnnnnnnnnnnnnnnnnnnnnnnnnnnnnnnnnnnnnnnnnnnnnnnnnnnnnnnnnnnnnnnnnnnnnnnnnnnnnnnnnnnnnnnnnnnnnnnnnnnnnnnnnnnnnnnnnnnnnnnnnnnnnnnnnnnnnnnnnnnnnnnnnnnnnnnnnnnnnnnnnnnnnnnnnnnnnnnnnnnnnnnnnnnnnnnnnnnnnnnnnnnnnnnnnnnnnnnnnnnnnnnnnnnnnnnnnnnnnnnnnnnnnnnnnnnnnnnnnnnnnnnnnnnnnnnnnnnnnnnnnnnnnnnnnnnnnnnnnnnnnnnnnnnnnnnnnnnnnnnnnnnnnnnnnnnnnnnnnnnnnnnnnnnnnnnnnnnnnnnnnnnnnnnnnnnnnnnnnnnnnnnnnnnnnnnnnnnnnnnnnnnnnnnnnnnnnnnnnnnnnnnnnnnnnnnnnnnnnnnnnnnnnnnnnnnnnnnnnnnnnnnnnnnnnnnnnnnnnnnnnnnnnnnnnnnnnnnnnnnnnnnnnnnnnnnnnnnnnnnnnnnnnnnnnnnnnnnnnnnnnnnnnnnnnnnnnnnnnnnnnnnnnnnnnnnnnnnnnnnnnnnnnnnnnnnnnnnnnnnnnnnnnnnnnnnnnnnnnnnnnnnnnnnnnnnnnnnnnnnnnnnnnnnnnnnnnnnnnnnnnnnnnnnnnnnnnnnnnnnnnnnnnnnnnnnnnnnnnnnnnnnnnnnnnnnnnnnnnnnnnnnnnnnnnnnnnnnnnnnnnnnnnnnnnnnnnnnnnnnnnnnnnnnnnnnnnnnnnnnnnnnnnnnnnnnnnnnnnnnnnnnnnnnnnnnnnnnnnnnnnnnnnnnnnnnnnnnnnnnnnnnnnnnnnnnnnnnnnnnnnnnnnnnnnnnnnnnnnnnnnnnnnnnnnnnnnnnnnnnnnnnnnnnnnnnnnnnnnnnnnnnnnnnnnnnnnnnnnnnnnnnnnnnnnnnnnnnnnnnnnnnnnnnnnnnnnnnnnnnnnnnnnnnnnnnnnnnnnnnnnnnnnnnnnnnnnnnnnnnnnnnnnnnnnnnnnnnnnnnnnnnnnnnnnnnnnnnnnnnnnnnnnnnnnnnnnnnnnnnnnnnnnnnnnnnnnnnnnnnnnnnnnnnnnnnnnnnnnnnnnnnnnnnnnnnnnnnnnnnnnnnnnnnnnnnnnnnnnnnnnnnnnnnnnnnnnnnnnnnnnnnnnnnnnnnnnnnnnnnnnnnnnnnnnnnnnnnnnnnnnnnnnnnnnnnnnnnnnnnnnnnnnnnnnnnnnnnnnnnnnnnnnnnnnnnnnnnnnnnnnnnnnnnnnnnnnnnnnnnnnnnnnnnnnnnnnnnnnnnnnnnnnnnnnnnnnnnnnnnnnnnnnnnnnnnnnnnnnnnnnnnnnnnnnnnnnnnnnnnnnnnnnnnnnnnnnnnnnnnnnnnnnnnnnnnnnnnnnnnnnnnnnnnnnnnnnnnnnnnnnnnnnnnnnnnnnnnnnnnnnnnnnnnnnnnnnnnnnnnnnnnnnnnnnnnnnnnnnnnnnnnnnnnnnnnnnnnnnnnnnnnnnnnnnnnnnnnnnnnnnnnnnnnnnnnnnnnnnnnnnnnnnnnnnnnnnnnnnnnnnnnnnnnnnnnnnnnnnnnnnnnnnnnnnnnnnnnnnnnnnnnnnnnnnnnnnnnnnnnnnnnnnnnnnnnnnnnnnnnnnnnnnnnnnnnnnnnnnnnnnnnnnnnnnnnnnnnnnnnnnnnnnnnnnnnnnnnnnnnnnnnnnnnnnnnnnnnnnnnnnnnnnnnnnnnnnnnnnnnnnnnnnnnnnnnnnnnnnnnnnnnnnnnnnnnnnnnnnnnnnnnnnnnnnnnnnnnnnnnnnnnnnnnnnnnnnnnnnnnnnnnnnnnnnnnnnnnnnnnnnnnnnnnnnnnnnnnnnnnnnnnnnnnnnnnnnnnnnnnnnnnnnnnnnnnnnnnnnnnnnnnnnnnnnnnnnnnnnnnnnnnnnnnnnnnnnnnnnnnnnnnnnnnnnnnnnnnnnnnnnnnnnnnnnnnnnnnnnnnnnnnnnnnnnnnnnnnnnnnnnnnnnnnnnnnnnnnnnnnnnnnnnnnnnnnnnnnnnnnnnnnnnnnnnnnnnnnnnnnnnnnnnnnnnnnnnnnnnnnnnnnnnnnnnnnnnnnnnnnnnnnnnnnnnnnnnnnnnnnnnnnnnnnnnnnnnnnnnnnnnnnnnnnnnnnnnnnnnnnnnnnnnnnnnnnnnnnnnnnnnnnnnnnnnnnnnnnnnnnnnnnnnnnnnnnnnnnnnnnnnnnnnnnnnnnnnnnnnnnnnnnnnnnnnnnnnnnnnnnnnnnnnnnnnnnnnnnnnnnnnnnnnnnnnnnnnnnnnnnnnnnnnnnnnnnnnnnnnnnnnnnnnnnnnnnnnnnnnnnnnnnnnnnnnnnnnnnnnnnnnnnnnnnnnnnnnnnnnnnnnnnnnnnnnnnnnnnnnnnnnnnnnnnnnnnnnnnnnnnnnnnnnnnnnnnnnnnnnnnnnnnnnnnnnnnnnnnnnnnnnnnnnnnnnnnnnnnnnnnnnnnnnnnnnnnnnnnnnnnnnnnnnnnnnnnnnnnnnnnnnnnnnnnnnnnnnnnnnnnnnnnnnnnnnnnnnnnnnnnnnnnnnnnnnnnnnnnnnnnnnnnnnnnnnnnnnnnnnnnnnnnnnnnnnnnnnnnnnnnnnnnnnnnnnnnnnnnnnnnnnnnnnnnnnnnnnnnnnnnnnnnnnnnnnnnnnnnnnnnnnnnnnnnnnnnnnnnnnnnnnnnnnnnnnnnnnnnnnnnnnnnnnnnnnnnnnnnnnnnnnnnnnnnnnnnnnnnnnnnnnnnnnnnnnnnnnnnnnnnnnnnnnnnnnnnnnnnnnnnnnnnnnnnnnnnnnnnnnnnnnnnnnnnnnnnnnnnnnnnnnnnnnnnnnnnnnnnnnnnnnnnnnnnnnnnnnnnnnnnnnnnnnnnnnnnnnnnnnnnnnnnnnnnnnnnnnnnnnnnnnnnnnnnnnnnnnnnnnnnnnnnnnnnnnnnnnnnnnnnnnnnnnnnnnnnnnnnnnnnnnnnnnnnnnnnnnnnnnnnnnnnnnnnnnnnnnnnnnnnnnnnnnnnnnnnnnnnnnnnnnnnnnnnnnnnnnnnnnnnnnnnnnnnnnnnnnnnnnnnnnnnnnnnnnnnnnnnnnnnnnnnnnnnnnnnnnnnnnnnnnnnnnnnnnnnnnnnnnnnnnnnnnnnnnnnnnnnnnnnnnnnnnnnnnnnnnnnnnnnnnnnnnnnnnnnnnnnnnnnnnnnnnnnnnnnnnnnnnnnnnnnnnnnnnnnnnnnnnnnnnnnnnnnnnnnnnnnnnnnnnnnnnnnnnnnnnnnnnnnnnnnnnnnnnnnnnnnnnnnnnnnnnnnnnnnnnnnnnnnnnnnnnnnnnnnnnnnnnnnnnnnnnnnnnnnnnnnnnnnnnnnnnnnnnnnnnnnnnnnnnnnnnnnnnnnnnnnnnnnnnnnnnnnnnnnnnnnnnnnnnnnnnnnnnnnnnnnnnnnnnnnnnnnnnnnnnnnnnnnnnnnnnnnnnnnnnnnnnnnnnnnnnnnnnnnnnnnnnnnnnnnnnnnnnnnnnnnnnnnnnnnnnnnnnnnnnnnnnnnnnnnnnnnnnnnnnnnnnnnnnnnnnnnnnnnnnnnnnnnnnnnnnnnnnnnnnnnnnnnnnnnnnnnnnnnnnnnnnnnnnnnnnnnnnnnnnnnnnnnnnnnnnnnnnnnnnnnnnnnnnnnnnnnnnnnnnnnnnnnnnnnnnnnnnnnnnnnnnnnnnnnnnnnnnnnnnnnnnnnnnnnnnnnnnnnnnnnnnnnnnnnnnnnnnnnnnnnnnnnnnnnnnnnnnnnnnnnnnnnnnnnnnnnnnnnnnnnnnnnnnnnnnnnnnnnnnnnnnnnnnnnnnnnnnnnnnnnnnnnnnnnnnnnnnnnnnnnnnnnnnnnnnnnnnnnnnnnnnnnnnnnnnnnnnnnnnnnnnnnnnnnnnnnnnnnnnnnnnnnnnnnnnnnnnnnnnnnnnnnnnnnnnnnnnnnnnnnnnnnnnnnnnnnnnnnnnnnnnnnnnnnnnnnnnnnnnnnnnnnnnnnnnnnnnnnnnnnnnnnnnnnnnnnnnnnnnnnnnnnnnnnnnnnnnnnnnnnnnnnnnnnnnnnnnnnnnnnnnnnnnnnnnnnnnnnnnnnnnnnnnnnnnnnnnnnnnnnnnnnnnnnnnnnnnnnnnnnnnnnnnnnnnnnnnnnnnnnnnnnnnnnnnnnnnnnnnnnnnnnnnnnnnnnnnnnnnnnnnnnnnnnnnnnnnnnnnnnnnnnnnnnnnnnnnnnnnnnnnnnnnnnnnnnnnnnnnnnnnnnnnnnnnnnnnnnnnnnnnnnnnnnnnnnnnnnnnnnnnnnnnnnnnnnnnnnnnnnnnnnnnnnnnnnnnnnnnnnnnnnnnnnnnnnnnnnnnnnnnnnnnnnnnnnnnnnnnnnnnnnnnnnnnnnnnnnnnnnnnnnnnnnnnnnnnnnnnnnnnnnnnnnnnnnnnnnnnnnnnnnnnnnnnnnnnnnnnnnnnnnnnnnnnnnnnnnnnnnnnnnnnnnnnnnnnnnnnnnnnnnnnnnnnnnnnnnnnnnnnnnnnnnnnnnnnnnnnnnnnnnnnnnnnnnnnnnnnnnnnnnnnnnnnnnnnnnnnnnnnnnnnnnnnnnnnnnnnnnnnnnnnnnnnnnnnnnnnnnnnnnnnnnnnnnnnnnnnnnnnnnnnnnnnnnnnnnnnnnnnnnnnnnnnnnnnnnnnnnnnnnnnnnnnnnnnnnnnnnnnnnnnnnnnnnnnnnnnnnnnnnnnnnnnnnnnnnnnnnnnnnnnnnnnnnnnnnnnnnnnnnnnnnnnnnnnnnnnnnnnnnnnnnnnnnnnnnnnnnnnnnnnnnnnnnnnnnnnnnnnnnnnnnnnnnnnnnnnnnnnnnnnnnnnnnnnnnnnnnnnnnnnnnnnnnnnnnnnnnnnnnnnnnnnnnnnnnnnnnnnnnnnnnnnnnnnnnnnnnnnnnnnnnnnnnnnnnnnnnnnnnnnnnnnnnnnnnnnnnnnnnnnnnnnnnnnnnnnnnnnnnnnnnnnnnnnnnnnnnnnnnnnnnnnnnnnnnnnnnnnnnnnnnnnnnnnnnnnnnnnnnnnnnnnnnnnnnnnnnnnnnnnnnnnnnnnnnnnnnnnnnnnnnnnnnnnnnnnnnnnnnnnnnnnnnnnnnnnnnnnnnnnnnnnnnnnnnnnnnnnnnnnnnnnnnnnnnnnnnnnnnnnnnnnnnnnnnnnnnnnnnnnnnnnnnnnnnnnnnnnnnnnnnnnnnnnnnnnnnnnnnnnnnnnnnnnnnnnnnnnnnnnnnnnnnnnnnnnnnnnnnnnnnnnnnnnnnnnnnnnnnnnnnnnnnnnnnnnnnnnnnnnnnnnnnnnnnnnnnnnnnnnnnnnnnnnnnnnnnnnnnnnnnnnnnnnnnnnnnnnnnnnnnnnnnnnnnnnnnnnnnnnnnnnnnnnnnnnnnnnnnnnnnnnnnnnnnnnnnnnnnnnnnnnnnnnnnnnnnnnnnnnnnnnnnnnnnnnnnnnnnnnnnnnnnnnnnnnnnnnnnnnnnnnnnnnnnnnnnnnnnnnnnnnnnnnnnnnnnnnnnnnnnnnnnnnnnnnnnnnnnnnnnnnnnnnnnnnnnnnnnnnnnnnnnnnnnnnnnnnnnnnnnnnnnnnnnnnnnnnnnnnnnnnnnnnnnnnnnnnnnnnnnnnnnnnnnnnnnnnnnnnnnnnnnnnnnnnnnnnnnnnnnnnnnnnnnnnnnnnnnnnnnnnnnnnnnnnnnnnnnnnnnnnnnnnnnnnnnnnnnnnnnnnnnnnnnnnnnnnnnnnnnnnnnnnnnnnnnnnnnnnnnnnnnnnnnnnnnnnnnnnnnnnnnnnnnnnnnnnnnnnnnnnnnnnnnnnnnnnnnnnnnnnnnnnnnnnnnnnnnnnnnnnnnnnnnnnnnnnnnnnnnnnnnnnnnnnnnnnnnnnnnnnnnnnnnnnnnnnnnnnnnnnnnnnnnnnnnnnnnnnnnnnnnnnnnnnnnnnnnnnnnnnnnnnnnnnnnnnnnnnnnnnnnnnnnnnnnnnnnnnnnnnnnnnnnnnnnnnnnnnnnnnnnnnnnnnnnnnnnnnnnnnnnnnnnnnnnnnnnnnnnnnnnnnnnnnnnnnnnnnnnnnnnnnnnnnnnnnnnnnnnnnnnnnnnnnnnnnnnnnnnnnnnnnnnnnnnnnnnnnnnnnnnnnnnnnnnnnnnnnnnnnnnnnnnnnnnnnnnnnnnnnnnnnnnnnnnnnnnnnnnnnnnnnnnnnnnnnnnnnnnnnnnnnnnnnnnnnnnnnnnnnnnnnnnnnnnnnnnnnnnnnnnnnnnnnnnnnnnnnnnnnnnnnnnnnnnnnnnnnnnnnnnnnnnnnnnnnnnnnnnnnnnnnnnnnnnnnnnnnnnnnnnnnnnnnnnnnnnnnnnnnnnnnnnnnnnnnnnnnnnnnnnnnnnnnnnnnnnnnnnnnnnnnnnnnnnnnnnnnnnnnnnnnnnnnnnnnnnnnnnnnnnnnnnnnnnnnnnnnnnnnnnnnnnnnnnnnnnnnnnnnnnnnnnnnnnnnnnnnnnnnnnnnnnnnnnnnnnnnnnnnnnnnnnnnnnnnnnnnnnnnnnnnnnnnnnnnnnnnnnnnnnnnnnnnnnnnnnnnnnnnnnnnnnnnnnnnnnnnnnnnnnnnnnnnnnnnnnnnnnnnnnnnnnnnnnnnnnnnnnnnnnnnnnnnnnnnnnnnnnnnnnnnnnnnnnnnnnnnnnnnnnnnnnnnnnnnnnnnnnnnnnnnnnnnnnnnnnnnnnnnnnnnnnnnnnnnnnnnnnnnnnnnnnnnnnnnnnnnnnnnnnnnnnnnnnnnnnnnnnnnnnnnnnnnnnnnnnnnnnnnnnnnnnnnnnnnnnnnnnnnnnnnnnnnnnnnnnnnnnnnnnnnnnnnnnnnnnnnnnnnnnnnnnnnnnnnnnnnnnnnnnnnnnnnnnnnnnnnnnnnnnnnnnnnnnnnnnnnnnnnnnnnnnnnnnnnnnnnnnnnnnnnnnnnnnnnnnnnnnnnnnnnnnnnnnnnnnnnnnnnnnnnnnnnnnnnnnnnnnnnnnnnnnnnnnnnnnnnnnnnnnnnnnnnnnnnnnnnnnnnnnnnnnnnnnnnnnnnnnnnnnnnnnnnnnnnnnnnnnnnnnnnnnnnnnnnnnnnnnnnnnnnnnnnnnnnnnnnnnnnnnnnnnnnnnnnnnnnnnnnnnnnnnnnnnnnnnnnnnnnnnnnnnnnnnnnnnnnnnnnnnnnnnnnnnnnnnnnnnnnnnnnnnnnnnnnnnnnnnnnnnnnnnnnnnnnnnnnnnnnnnnnnnnnnnnnnnnnnnnnnnnnnnnnnnnnnnnnnnnnnnnnnnnnnnnnnnnnnnnnnnnnnnnnnnnnnnnnnnnnnnnnnnnnnnnnnnnnnnnnnnnnnnnnnnnnnnnnnnnnnnnnnnnnnnnnnnnnnnnnnnnnnnnnnnnnnnnnnnnnnnnnnnnnnnnnnnnnnnnnnnnnnnnnnnnnnnnnnnnnnnnnnnnnnnnnnnnnnnnnnnnnnnnnnnnnnnnnnnnnnnnnnnnnnnnnnnnnnnnnnnnnnnnnnnnnnnnnnnnnnnnnnnnnnnnnnnnnnnnnnnnnnnnnnnnnnnnnnnnnnnnnnnnnnnnnnnnnnnnnnnnnnnnnnnnnnnnnnnnnnnnnnnnnnnnnnnnnnnnnnnnnnnnnnnnnnnnnnnnnnnnnnnnnnnnnnnnnnnnnnnnnnnnnnnnnnnnnnnnnnnnnnnnnnnnnnnnnnnnnnnnnnnnnnnnnnnnnnnnnnnnnnnnnnnnnnnnnnnnnnnnnnnnnnnnnnnnnnnnnnnnnnnnnnnnnnnnnnnnnnnnnnnnnnnnnnnnnnnnnnnnnnnnnnnnnnnnnnnnnnnnnnnnnnnnnnnnnnnnnnnnnnnnnnnnnnnnnnnnnnnnnnnnnnnnnnnnnnnnnnnnnnnnnnnnnnnnnnnnnnnnnnnnnnnnnnnnnnnnnnnnnnnnnnnnnnnnnnnnnnnnnnnnnnnnnnnnnnnnnnnnnnnnnnnnnnnnnnnnnnnnnnnnnnnnnnnnnnnnnnnnnnnnnnnnnnnnnnnnnnnnnnnnnnnnnnnnnnnnnnnnnnnnnnnnnnnnnnnnnnnnnnnnnnnnnnnnnnnnnnnnnnnnnnnnnnnnnnnnnnnnnnnnnnnnnnnnnnnnnnnnnnnnnnnnnnnnnnnnnnnnnnnnnnnnnnnnnnnnnnnnnnnnnnnnnnnnnnnnnnnnnnnnnnnnnnnnnnnnnnnnnnnnnnnnnnnnnnnnnnnnnnnnnnnnnnnnnnnnnnnnnnnnnnnnnnnnnnnnnnnnnnnnnnnnnnnnnnnnnnnnnnnnnnnnnnnnnnnnnnnnnnnnnnnnnnnnnnnnnnnnnnnnnnnnnnnnnnnnnnnnnnnnnnnnnnnnnnnnnnnnnnnnnnnnnnnnnnnnnnnnnnnnnnnnnnnnnnnnnnnnnnnnnnnnnnnnnnnnnnnnnnnnnnnnnnnnnnnnnnnnnnnnnnnnnnnnnnnnnnnnnnnnnnnnnnnnnnnnnnnnnnnnnnnnnnnnnnnnnnnnnnnnnnnnnnnnnnnnnnnnnnnnnnnnnnnnnnnnnnnnnnnnnnnnnnnnnnnnnnnnnnnnnnnnnnnnnnnnnnnnnnnnnnnnnnnnnnnnnnnnnnnnnnnnnnnnnnnnnnnnnnnnnnnnnnnnnnnnnnnnnnnnnnnnnnnnnnnnnnnnnnnnnnnnnnnnnnnnnnnnnnnnnnnnnnnnnnnnnnnnnnnnnnnnnnnnnnnnnnnnnnnnnnnnnnnnnnnnnnnnnnnnnnnnnnnnnnnnnnnnnnnnnnnnnnnnnnnnnnnnnnnnnnnnnnnnnnnnnnnnnnnnnnnnnnnnnnnnnnnnnnnnnnnnnnnnnnnnnnnnnnnnnnnnnnnnnnnnnnnnnnnnnnnnnnnnnnnnnnnnnnnnnnnnnnnnnnnnnnnnnnnnnnnnnnnnnnnnnnnnnnnnnnnnnnnnnnnnnnnnnnnnnnnnnnnnnnnnnnnnnnnnnnnnnnnnnnnnnnnnnnnnnnnnnnnnnnnnnnnnnnnnnnnnnnnnnnnnnnnnnnnnnnnnnnnnnnnnnnnnnnnnnnnnnnnnnnnnnnnnnnnnnnnnnnnnnnnnnnnnnnnnnnnnnnnnnnnnnnnnnnnnnnnnnnnnnnnnnnnnnnnnnnnnnnnnnnnnnnnnnnnnnnnnnnnnnnnnnnnnnnnnnnnnnnnnnnnnnnnnnnnnnnnnnnnnnnnnnnnnnnnnnnnnnnnnnnnnnnnnnnnnnnnnnnnnnnnnnnnnnnnnnnnnnnnnnnnnnnnnnnnnnnnnnnnnnnnnnnnnnnnnnnnnnnnnnnnnnnnnnnnnnnnnnnnnnnnnnnnnnnnnnnnnnnnnnnnnnnnnnnnnnnnnnnnnnnnnnnnnnnnnnnnnnnnnnnnnnnnnnnnnnnnnnnnnnnnnnnnnnnnnnnnnnnnnnnnnnnnnnnnnnnnnnnnnnnnnnnnnnnnnnnnnnnnnnnnnnnnnnnnnnnnnnnnnnnnnnnnnnnnnnnnnnnnnnnnnnnnnnnnnnnnnnnnnnnnnnnnnnnnnnnnnnnnnnnnnnnnnnnnnnnnnnnnnnnnnnnnnnnnnnnnnnnnnnnnnnnnnnnnnnnnnnnnnnnnnnnnnnnnnnnnnnnnnnnnnnnnnnnnnnnnnnnnnnnnnnnnnnnnnnnnnnnnnnnnnnnnnnnnnnnnnnnnnnnnnnnnnnnnnnnnnnnnnnnnnnnnnnnnnnnnnnnnnnnnnnnnnnnnnnnnnnnnnnnnnnnnnnnnnnnnnnnnnnnnnnnnnnnnnnnnnnnnnnnnnnnnnnnnnnnnnnnnnnnnnnnnnnnnnnnnnnnnnnnnnnnnnnnnnnnnnnnnnnnnnnnnnnnnnnnnnnnnnnnnnnnnnnnnnnnnnnnnnnnnnnnnnnnnnnnnnnnnnnnnnnnnnnnnnnnnnnnnnnnnnnnnnnnnnnnnnnnnnnnnnnnnnnnnnnnnnnnnnnnnnnnnnnnnnnnnnnnnnnnnnnnnnnnnnnnnnnnnnnnnnnnnnnnnnnnnnnnnnnnnnnnnnnnnnnnnnnnnnnnnnnnnnnnnnnnnnnnnnnnnnnnnnnnnnnnnnnnnnnnnnnnnnnnnnnnnnnnnnnnnnnnnnnnnnnnnnnnnnnnnnnnnnnnnnnnnnnnnnnnnnnnnnnnnnnnnnnnnnnnnnnnnnnnnnnnnnnnnnnnnnnnnnnnnnnnnnnnnnnnnnnnnnnnnnnnnnnnnnnnnnnnnnnnnnnnnnnnnnnnnnnnnnnnnnnnnnnnnnnnnnnnnnnnnnnnnnnnnnnnnnnnnnnnnnnnnnnnnnnnnnnnnnnnnnnnnnnnnnnnnnnnnnnnnnnnnnnnnnnnnnnnnnnnnnnnnnnnnnnnnnnnnnnnnnnnnnnnnnnnnnnnnnnnnnnnnnnnnnnnnnnnnnnnnnnnnnnnnnnnnnnnnnnnnnnnnnnnnnnnnnnnnnnnnnnnnnnnnnnnnnnnnnnnnnnnnnnnnnnnnnnnnnnnnnnnnnnnnnnnnnnnnnnnnnnnnnnnnnnnnnnnnnnnnnnnnnnnnnnnnnnnnnnnnnnnnnnnnnnnnnnnnnnnnnnnnnnnnnnnnnnnnnnnnnnnnnnnnnnnnnnnnnnnnnnnnnnnnnnnnnnnnnnnnnnnnnnnnnnnnnnnnnnnnnnnnnnnnnnnnnnnnnnnnnnnnnnnnnnnnnnnnnnnnnnnnnnnnnnnnnnnnnnnnnnnnnnnnnnnnnnnnnnnnnnnnnnnnnnnnnnnnnnnnnnnnnnnnnnnnnnnnnnnnnnnnnnnnnnnnnnnnnnnnnnnnnnnnnnnnnnnnnnnnnnnnnnnnnnnnnnnnnnnnnnnnnnnnnnnnnnnnnnnnnnnnnnnnnnnnnnnnnnnnnnnnnnnnnnnnnnnnnnnnnnnnnnnnnnnnnnnnnnnnnnnnnnnnnnnnnnnnnnnnnnnnnnnnnnnnnnnnnnnnnnnnnnnnnnnnnnnnnnnnnnnnnnnnnnnnnnnnnnnnnnnnnnnnnnnnnnnnnnnnnnnnnnnnnnnnnnnnnnnnnnnnnnnnnnnnnnnnnnnnnnnnnnnnnnnnnnnnnnnnnnnnnnnnnnnnnnnnnnnnnnnnnnnnnnnnnnnnnnnnnnnnnnnnnnnnnnnnnnnnnnnnnnnnnnnnnnnnnnnnnnnnnnnnnnnnnnnnnnnnnnnnnnnnnnnnnnnnnnnnnnnnnnnnnnnnnnnnnnnnnnnnnnnnnnnnnnnnnnnnnnnnnnnnnnnnnnnnnnnnnnnnnnnnnnnnnnnnnnnnnnnnnnnnnnnnnnnnnnnnnnnnnnnnnnnnnnnnnnnnnnnnnnnnnnnnnnnnnnnnnnnnnnnnnnnnnnnnnnnnnnnnnnnnnnnnnnnnnnnnnnnnnnnnnnnnnnnnnnnnnnnnnnnnnnnnnnnnnnnnnnnnnnnnnnnnnnnnnnnnnnnnnnnnnnnnnnnnnnnnnnnnnnnnnnnnnnnnnnnnnnnnnnnnnnnnnnnnnnnnnnnnnnnnnnnnnnnnnnnnnnnnnnnnnnnnnnnnnnnnnnnnnnnnnnnnnnnnnnnnnnnnnnnnnnnnnnnnnnnnnnnnnnnnnnnnnnnnnnnnnnnnnnnnnnnnnnnnnnnnnnnnnnnnnnnnnnnnnnnnnnnnnnnnnnnnnnnnnnnnnnnnnnnnnnnnnnnnnnnnnnnnnnnnnnnnnnnnnnnnnnnnnnnnnnnnnnnnnnnnnnnnnnnnnnnnnnnnnnnnnnnnnnnnnnnnnnnnnnnnnnnnnnnnnnnnnnnnnnnnnnnnnnnnnnnnnnnnnnnnnnnnnnnnnnnnnnnnnnnnnnnnnnnnnnnnnnnnnnnnnnnnnnnnnnnnnnnnnnnnnnnnnnnnnnnnnnnnnnnnnnnnnnnnnnnnnnnnnnnnnnnnnnnnnnnnnnnnnnnnnnnnnnnnnnnnnnnnnnnnnnnnnnnnnnnnnnnnnnnnnnnnnnnnnnnnnnnnnnnnnnnnnnnnnnnnnnnnnnnnnnnnnnnnnnnnnnnnnnnnnnnnnnnnnnnnnnnnnnnnnnnnnnnnnnnnnnnnnnnnnnnnnnnnnnnnnnnnnnnnnnnnnnnnnnnnnnnnnnnnnnnnnnnnnnnnnnnnnnnnnnnnnnnnnnnnnnnnnnnnnnnnnnnnnnnnnnnnnnnnnnnnnnnnnnnnnnnnnnnnnnnnnnnnnnnnnnnnnnnnnnnnnnnnnnnnnnnnnnnnnnnnnnnnnnnnnnnnnnnnnnnnnnnnnnnnnnnnnnnnnnnnnnnnnnnnnnnnnnnnnnnnnnnnnnnnnnnnnnnnnnnnnnnnnnnnnnnnnnnnnnnnnnnnnnnnnnnnnnnnnnnnnnnnnnnnnnnnnnnnnnnnnnnnnnnnnnnnnnnnnnnnnnnnnnnnnnnnnnnnnnnnnnnnnnnnnnnnnnnnnnnnnnnnnnnnnnnnnnnnnnnnnnnnnnnnnnnnnnnnnnnnnnnnnnnnnnnnnnnnnnnnnnnnnnnnnnnnnnnnnnnnnnnnnnnnnnnnnnnnnnnnnnnnnnnnnnnnnnnnnnnnnnnnnnnnnnnnnnnnnnnnnnnnnnnnnnnnnnnnnnnnnnnnnnnnnnnnnnnnnnnnnnnnnnnnnnnnnnnnnnnnnnnnnnnnnnnnnnnnnnnnnnnnnnnnnnnnnnnnnnnnnnnnnnnnnnnnnnnnnnnnnnnnnnnnnnnnnnnnnnnnnnnnnnnnnnnnnnnnnnnnnnnnnnnnnnnnnnnnnnnnnnnnnnnnnnnnnnnnnnnnnnnnnnnnnnnnnnnnnnnnnnnnnnnnnnnnnnnnnnnnnnnnnnnnnnnnnnnnnnnnnnnnnnnnnnnnnnnnnnnnnnnnnnnnnnnnnnnnnnnnnnnnnnnnnnnnnnnnnnnnnnnnnnnnnnnnnnnnnnnnnnnnnnnnnnnnnnnnnnnnnnnnnnnnnnnnnnnnnnnnnnnnnnnnnnnnnnnnnnnnnnnnnnnnnnnnnnnnnnnnnnnnnnnnnnnnnnnnnnnnnnnnnnnnnnnnnnnnnnnnnnnnnnnnnnnnnnnnnnnnnnnnnnnnnnnnnnnnnnnnnnnnnnnnnnnnnnnnnnnnnnnnnnnnnnnnnnnnnnnnnnnnnnnnnnnnnnnnnnnnnnnnnnnnnnnnnnnnnnnnnnnnnnnnnnnnnnnnnnnnnnnnnnnnnnnnnnnnnnnnnnnnnnnnnnnnnnnnnnnnnnnnnnnnnnnnnnnnnnnnnnnnnnnnnnnnnnnnnnnnnnnnnnnnnnnnnnnnnnnnnnnnnnnnnnnnnnnnnnnnnnnnnnnnnnnnnnnnnnnnnnnnnnnnnnnnnnnnnnnnnnnnnnnnnnnnnnnnnnnnnnnnnnnnnnnnnnnnnnnnnnnnnnnnnnnnnnnnnnnnnnnnnnnnnnnnnnnnnnnnnnnnnnnnnnnnnnnnnnnnnnnnnnnnnnnnnnnnnnnnnnnnnnnnnnnnnnnnnnnnnnnnnnnnnnnnnnnnnnnnnnnnnnnnnnnnnnnnnnnnnnnnnnnnnnnnnnnnnnnnnnnnnnnnnnnnnnnnnnnnnnnnnnnnnnnnnnnnnnnnnnnnnnnnnnnnnnnnnnnnnnnnnnnnnnnnnnnnnnnnnnnnnnnnnnnnnnnnnnnnnnnnnnnnnnnnnnnnnnnnnnnnnnnnnnnnnnnnnnnnnnnnnnnnnnnnnnnnnnnnnnnnnnnnnnnnnnnnnnnnnnnnnnnnnnnnnnnnnnnnnnnnnnnnnnnnnnnnnnnnnnnnnnnnnnnnnnnnnnnnnnnnnnnnnnnnnnnnnnnnnnnnnnnnnnnnnnnnnnnnnnnnnnnnnnnnnnnnnnnnnnnnnnnnnnnnnnnnnnnnnnnnnnnnnnnnnnnnnnnnnnnnnnnnnnnnnnnnnnnnnnnnnnnnnnnnnnnnnnnnnnnnnnnnnnnnnnnnnnnnnnnnnnnnnnnnnnnnnnnnnnnnnnnnnnnnnnnnnnnnnnnnnnnnnnnnnnnnnnnnnnnnnnnnnnnnnnnnnnnnnnnnnnnnnnnnnnnnnnnnnnnnnnnnnnnnnnnnnnnnnnnnnnnnnnnnnnnnnnnnnnnnnnnnnnnnnnnnnnnnnnnnnnnnnnnnnnnnnnnnnnnnnnnnnnnnnnnnnnnnnnnnnnnnnnnnnnnnnnnnnnnnnnnnnnnnnnnnnnnnnnnnnnnnnnnnnnnnnnnnnnnnnnnnnnnnnnnnnnnnnnnnnnnnnnnnnnnnnnnnnnnnnnnnnnnnnnnnnnnnnnnnnnnnnnnnnnnnnnnnnnnnnnnnnnnnnnnnnnnnnnnnnnnnnnnnnnnnnnnnnnnnnnnnnnnnnnnnnnnnnnnnnnnnnnnnnnnnnnnnnnnnnnnnnnnnnnnnnnnnnnnnnnnnnnnnnnnnnnnnnnnnnnnnnnnnnnnnnnnnnnnnnnnnnnnnnnnnnnnnnnnnnnnnnnnnnnnnnnnnnnnnnnnnnnnnnnnnnnnnnnnnnnnnnnnnnnnnnnnnnnnnnnnnnnnnnnnnnnnnnnnnnnnnnnnnnnnnnnnnnnnnnnnnnnnnnnnnnnnnnnnnnnnnnnnnnnnnnnnnnnnnnnnnnnnnnnnnnnnnnnnnnnnnnnnnnnnnnnnnnnnnnnnnnnnnnnnnnnnnnnnnnnnnnnnnnnnnnnnnnnnnnnnnnnnnnnnnnnnnnnnnnnnnnnnnnnnnnnnnnnnnnnnnnnnnnnnnnnnnnnnnnnnnnnnnnnnnnnnnnnnnnnnnnnnnnnnnnnnnnnnnnnnnnnnnnnnnnnnnnnnnnnnnnnnnnnnnnnnnnnnnnnnnnnnnnnnnnnnnnnnnnnnnnnnnnnnnnnnnnnnnnnnnnnnnnnnnnnnnnnnnnnnnnnnnnnnnnnnnnnnnnnnnnnnnnnnnnnnnnnnnnnnnnnnnnnnnnnnnnnnnnnnnnnnnnnnnnnnnnnnnnnnnnnnnnnnnnnnnnnnnnnnnnnnnnnnnnnnnnnnnnnnnnnnnnnnnnnnnnnnnnnnnnnnnnnnnnnnnnnnnnnnnnnnnnnnnnnnnnnnnnnnnnnnnnnnnnnnnnnnnnnnnnnnnnnnnnnnnnnnnnnnnnnnnnnnnnnnnnnnnnnnnnnnnnnnnnnnnnnnnnnnnnnnnnnnnnnnnnnnnnnnnnnnnnnnnnnnnnnnnnnnnnnnnnnnnnnnnnnnnnnnnnnnnnnnnnnnnnnnnnnnnnnnnnnnnnnnnnnnnnnnnnnnnnnnnnnnnnnnnnnnnnnnnnnnnnnnnnnnnnnnnnnnnnnnnnnnnnnnnnnnnnnnnnnnnnnnnnnnnnnnnnnnnnnnnnnnnnnnnnnnnnnnnnnnnnnnnnnnnnnnnnnnnnnnnnnnnnnnnnnnnnnnnnnnnnnnnnnnnnnnnnnnnnnnnnnnnnnnnnnnnnnnnnnnnnnnnnnnnnnnnnnnnnnnnnnnnnnnnnnnnnnnnnnnnnnnnnnnnnnnnnnnnnnnnnnnnnnnnnnnnnnnnnnnnnnnnnnnnnnnnnnnnnnnnnnnnnnnnnnnnnnnnnnnnnnnnnnnnnnnnnnnnnnnnnnnnnnnnnnnnnnnnnnnnnnnnnnnnnnnnnnnnnnnnnnnnnnnnnnnnnnnnnnnnnnnnnnnnnnnnnnnnnnnnnnnnnnnnnnnnnnnnnnnnnnnnnnnnnnnnnnnnnnnnnnnnnnnnnnnnnnnnnnnnnnnnnnnnnnnnnnnnnnnnnnnnnnnnnnnnnnnnnnnnnnnnnnnnnnnnnnnnnnnnnnnnnnnnnnnnnnnnnnnnnnnnnnnnnnnnnnnnnnnnnnnnnnnnnnnnnnnnnnnnnnnnnnnnnnnnnnnnnnnnnnnnnnnnnnnnnnnnnnnnnnnnnnnnnnnnnnnnnnnnnnnnnnnnnnnnnnnnnnnnnnnnnnnnnnnnnnnnnnnnnnnnnnnnnnnnnnnnnnnnnnnnnnnnnnnnnnnnnnnnnnnnnnnnnnnnnnnnnnnnnnnnnnnnnnnnnnnnnnnnnnnnnnnnnnnnnnnnnnnnnnnnnnnnnnnnnnnnnnnnnnnnnnnnnnnnnnnnnnnnnnnnnnnnnnnnnnnnnnnnnnnnnnnnnnnnnnnnnnnnnnnnnnnnnnnnnnnnnnnnnnnnnnnnnnnnnnnnnnnnnnnnnnnnnnnnnnnnnnnnnnnnnnnnnnnnnnnnnnnnnnnnnnnnnnnnnnnnnnnnnnnnnnnnnnnnnnnnnnnnnnnnnnnnnnnnnnnnnnnnnnnnnnnnnnnnnnnnnnnnnnnnnnnnnnnnnnnnnnnnnnnnnnnnnnnnnnnnnnnnnnnnnnnnnnnnnnnnnnnnnnnnnnnnnnnnnnnnnnnnnnnnnnnnnnnnnnnnnnnnnnnnnnnnnnnnnnnnnnnnnnnnnnnnnnnnnnnnnnnnnnnnnnnnnnnnnnnnnnnnnnnnnnnnnnnnnnnnnnnnnnnnnnnnnnnnnnnnnnnnnnnnnnnnnnnnnnnnnnnnnnnnnnnnnnnnnnnnnnnnnnnnnnnnnnnnnnnnnnnnnnnnnnnnnnnnnnnnnnnnnnnnnnnnnnnnnnnnnnnnnnnnnnnnnnnnnnnnnnnnnnnnnnnnnnnnnnnnnnnnnnnnnnnnnnnnnnnnnnnnnnnnnnnnnnnnnnnnnnnnnnnnnnnnnnnnnnnnnnnnnnnnnnnnnnnnnnnnnnnnnnnnnnnnnnnnnnnnnnnnnnnnnnnnnnnnnnnnnnnnnnnnnnnnnnnnnnnnnnnnnnnnnnnnnnnnnnnnnnnnnnnnnnnnnnnnnnnnnnnnnnnnnnnnnnnnnnnnnnnnnnnnnnnnnnnnnnnnnnnnnnnnnnnnnnnnnnnnnnnnnnnnnnnnnnnnnnnnnnnnnnnnnnnnnnnnnnnnnnnnnnnnnnnnnnnnnnnnnnnnnnnnnnnnnnnnnnnnnnnnnnnnnnnnnnnnnnnnnnnnnnnnnnnnnnnnnnnnnnnnnnnnnnnnnnnnnnnnnnnnnnnnnnnnnnnnnnnnnnnnnnnnnnnnnnnnnnnnnnnnnnnnnnnnnnnnnnnnnnnnnnnnnnnnnnnnnnnnnnnnnnnnnnnnnnnnnnnnnnnnnnnnnnnnnnnnnnnnnnnnnnnnnnnnnnnnnnnnnnnnnnnnnnnnnnnnnnnnnnnnnnnnnnnnnnnnnnnnnnnnnnnnnnnnnnnnnnnnnnnnnnnnnnnnnnnnnnnnnnnnnnnnnnnnnnnnnnnnnnnnnnnnnnnnnnnnnnnnnnnnnnnnnnnnnnnnnnnnnnnnnnnnnnnnnnnnnnnnnnnnnnnnnnnnnnnnnnnnnnnnnnnnnnnnnnnnnnnnnnnnnnnnnnnnnnnnnnnnnnnnnnnnnnnnnnnnnnnnnnnnnnnnnnnnnnnnnnnnnnnnnnnnnnnnnnnnnnnnnnnnnnnnnnnnnnnnnnnnnnnnnnnnnnnnnnnnnnnnnnnnnnnnnnnnnnnnnnnnnnnnnnnnnnnnnnnnnnnnnnnnnnnnnnnnnnnnnnnnnnnnnnnnnnnnnnnnnnnnnnnnnnnnnnnnnnnnnnnnnnnnnnnnnnnnnnnnnnnnnnnnnnnnnnnnnnnnnnnnnnnnnnnnnnnnnnnnnnnnnnnnnnnnnnnnnnnnnnnnnnnnnnnnnnnnnnnnnnnnnnnnnnnnnnnnnnnnnnnnnnnnnnnnnnnnnnnnnnnnnnnnnnnnnnnnnnnnnnnnnnnnnnnnnnnnnnnnnnnnnnnnnnnnnnnnnnnnnnnnnnnnnnnnnnnnnnnnnnnnnnnnnnnnnnnnnnnnnnnnnnnnnnnnnnnnnnnnnnnnnnnnnnnnnnnnnnnnnnnnnnnnnnnnnnnnnnnnnnnnnnnnnnnnnnnnnnnnnnnnnnnnnnnnnnnnnnnnnnnnnnnnnnnnnnnnnnnnnnnnnnnnnnnnnnnnnnnnnnnnnnnnnnnnnnnnnnnnnnnnnnnnnnnnnnnnnnnnnnnnnnnnnnnnnnnnnnnnnnnnnnnnnnnnnnnnnnnnnnnnnnnnnnnnnnnnnnnnnnnnnnnnnnnnnnnnnnnnnnnnnnnnnnnnnnnnnnnnnnnnnnnnnnnnnnnnnnnnnnnnnnnnnnnnnnnnnnnnnnnnnnnnnnnnnnnnnnnnnnnnnnnnnnnnnnnnnnnnnnnnnnnnnnnnnnnnnnnnnnnnnnnnnnnnnnnnnnnnnnnnnnnnnnnnnnnnnnnnnnnnnnnnnnnnnnnnnnnnnnnnnnnnnnnnnnnnnnnnnnnnnnnnnnnnnnnnnnnnnnnnnnnnnnnnnnnnnnnnnnnnnnnnnnnnnnnnnnnnnnnnnnnnnnnnnnnnnnnnnnnnnnnnnnnnnnnnnnnnnnnnnnnnnnnnnnnnnnnnnnnnnnnnnnnnnnnnnnnnnnnnnnnnnnnnnnnnnnnnnnnnnnnnnnnnnnnnnnnnnnnnnnnnnnnnnnnnnnnnnnnnnnnnnnnnnnnnnnnnnnnnnnnnnnnnnnnnnnnnnnnnnnnnnnnnnnnnnnnnnnnnnnnnnnnnnnnnnnnnnnnnnnnnnnnnnnnnnnnnnnnnnnnnnnnnnnnnnnnnnnnnnnnnnnnnnnnnnnnnnnnnnnnnnnnnnnnnnnnnnnnnnnnnnnnnnnnnnnnnnnnnnnnnnnnnnnnnnnnnnnnnnnnnnnnnnnnnnnnnnnnnnnnnnnnnnnnnnnnnnnnnnnnnnnnnnnnnnnnnnnnnnnnnnnnnnnnnnnnnnnnnnnnnnnnnnnnnnnnnnnnnnnnnnnnnnnnnnnnnnnnnnnnnnnnnnnnnnnnnnnnnnnnnnnnnnnnnnnnnnnnnnnnnnnnnnnnnnnnnnnnnnnnnnnnnnnnnnnnnnnnnnnnnnnnnnnnnnnnnnnnnnnnnnnnnnnnnnnnnnnnnnnnnnnnnnnnnnnnnnnnnnnnnnnnnnnnnnnnnnnnnnnnnnnnnnnnnnnnnnnnnnnnnnnnnnnnnnnnnnnnnnnnnnnnnnnnnnnnnnnnnnnnnnnnnnnnnnnnnnnnnnnnnnnnnnnnnnnnnnnnnnnnnnnnnnnnnnnnnnnnnnnnnnnnnnnnnnnnnnnnnnnnnnnnnnnnnnnnnnnnnnnnnnnnnnnnnnnnnnnnnnnnnnnnnnnnnnnnnnnnnnnnnnnnnnnnnnnnnnnnnnnnnnnnnnnnnnnnnnnnnnnnnnnnnnnnnnnnnnnnnnnnnnnnnnnnnnnnnnnnnnnnnnnnnnnnnnnnnnnnnnnnnnnnnnnnnnnnnnnnnnnnnnnnnnnnnnnnnnnnnnnnnnnnnnnnnnnnnnnnnnnnnnnnnnnnnnnnnnnnnnnnnnnnnnnnnnnnnnnnnnnnnnnnnnnnnnnnnnnnnnnnnnnnnnnnnnnnnnnnnnnnnnnnnnnnnnnnnnnnnnnnnnnnnnnnnnnnnnnnnnnnnnnnnnnnnnnnnnnnnnnnnnnnnnnnnnnnnnnnnnnnnnnnnnnnnnnnnnnnnnnnnnnnnnnnnnnnnnnnnnnnnnnnnnnnnnnnnnnnnnnnnnnnnnnnnnnnnnnnnnnnnnnnnnnnnnnnnnnnnnnnnnnnnnnnnnnnnnnnnnnnnnnnnnnnnnnnnnnnnnnnnnnnnnnnnnnnnnnnnnnnnnnnnnnnnnnnnnnnnnnnnnnnnnnnnnnnnnnnnnnnnnnnnnnnnnnnnnnnnnnnnnnnnnnnnnnnnnnnnnnnnnnnnnnnnnnnnnnnnnnnnnnnnnnnnnnnnnnnnnnnnnnnnnnnnnnnnnnnnnnnnnnnnnnnnnnnnnnnnnnnnnnnnnnnnnnnnnnnnnnnnnnnnnnnnnnnnnnnnnnnnnnnnnnnnnnnnnnnnnnnnnnnnnnnnnnnnnnnnnnnnnnnnnnnnnnnnnnnnnnnnnnnnnnnnnnnnnnnnnnnnnnnnnnnnnnnnnnnnnnnnnnnnnnnnnnnnnnnnnnnnnnnnnnnnnnnnnnnnnnnnnnnnnnnnnnnnnnnnnnnnnnnnnnnnnnnnnnnnnnnnnnnnnnnnnnnnnnnnnnnnnnnnnnnnnnnnnnnnnnnnnnnnnnnnnnnnnnnnnnnnnnnnnnnnnnnnnnnnnnnnnnnnnnnnnnnnnnnnnnnnnnnnnnnnnnnnnnnnnnnnnnnnnnnnnnnnnnnnnnnnnnnnnnnnnnnnnnnnnnnnnnnnnnnnnnnnnnnnnnnnnnnnnnnnnnnnnnnnnnnnnnnnnnnnnnnnnnnnnnnnnnnnnnnnnnnnnnnnnnnnnnnnnnnnnnnnnnnnnnnnnnnnnnnnnnnnnnnnnnnnnnnnnnnnnnnnnnnnnnnnnnnnnnnnnnnnnnnnnnnnnnnnnnnnnnnnnnnnnnnnnnnnnnnnnnnnnnnnnnnnnnnnnnnnnnnnnnnnnnnnnnnnnnnnnnnnnnnnnnnnnnnnnnnnnnnnnnnnnnnnnnnnnnnnnnnnnnnnnnnnnnnnnnnnnnnnnnnnnnnnnnnnnnnnnnnnnnnnnnnnnnnnnnnnnnnnnnnnnnnnnnnnnnnnnnnnnnnnnnnnnnnnnnnnnnnnnnnnnnnnnnnnnnnnnnnnnnnnnnnnnnnnnnnnnnnnnnnnnnnnnnnnnnnnnnnnnnnnnnnnnnnnnnnnnnnnnnnnnnnnnnnnnnnnnnnnnnnnnnnnnnnnnnnnnnnnnnnnnnnnnnnnnnnnnnnnnnnnnnnnnnnnnnnnnnnnnnnnnnnnnnnnnnnnnnnnnnnnnnnnnnnnnnnnnnnnnnnnnnnnnnnnnnnnnnnnnnnnnnnnnnnnnnnnnnnnnnnnnnnnnnnnnnnnnnnnnnnnnnnnnnnnnnnnnnnnnnnnnnnnnnnnnnnnnnnnnnnnnnnnnnnnnnnnnnnnnnnnnnnnnnnnnnnnnnnnnnnnnnnnnnnnnnnnnnnnnnnnnnnnnnnnnnnnnnnnnnnnnnnnnnnnnnnnnnnnnnnnnnnnnnnnnnnnnnnnnnnnnnnnnnnnnnnnnnnnnnnnnnnnnnnnnnnnnnnnnnnnnnnnnnnnnnnnnnnnnnnnnnnnnnnnnnnnnnnnnnnnnnnnnnnnnnnnnnnnnnnnnnnnnnnnnnnnnnnnnnnnnnnnnnnnnnnnnnnnnnnnnnnnnnnnnnnnnnnnnnnnnnnnnnnnnnnnnnnnnnnnnnnnnnnnnnnnnnnnnnnnnnnnnnnnnnnnnnnnnnnnnnnnnnnnnnnnnnnnnnnnnnnnnnnnnnnnnnnnnnnnnnnnnnnnnnnnnnnnnnnnnnnnnnnnnnnnnnnnnnnnnnnnnnnnnnnnnnnnnnnnnnnnnnnnnnnnnnnnnnnnnnnnnnnnnnnnnnnnnnnnnnnnnnnnnnnnnnnnnnnnnnnnnnnnnnnnnnnnnnnnnnnnnnnnnnnnnnnnnnnnnnnnnnnnnnnnnnnnnnnnnnnnnnnnnnnnnnnnnnnnnnnnnnnnnnnnnnnnnnnnnnnnnnnnnnnnnnnnnnnnnnnnnnnnnnnnnnnnnnnnnnnnnnnnnnnnnnnnnnnnnnnnnnnnnnnnnnnnnnnnnnnnnnnnnnnnnnnnnnnnnnnnnnnnnnnnnnnnnnnnnnnnnnnnnnnnnnnnnnnnnnnnnnnnnnnnnnnnnnnnnnnnnnnnnnnnnnnnnnnnnnnnnnnnnnnnnnnnnnnnnnnnnnnnnnnnnnnnnnnnnnnnnnnnnnnnnnnnnnnnnnnnnnnnnnnnnnnnnnnnnnnnnnnnnnnnnnnnnnnnnnnnnnnnnnnnnnnnnnnnnnnnnnnnnnnnnnnnnnnnnnnnnnnnnnnnnnnnnnnnnnnnnnnnnnnnnnnnnnnnnnnnnnnnnnnnnnnnnnnnnnnnnnnnnnnnnnnnnnnnnnnnnnnnnnnnnnnnnnnnnnnnnnnnnnnnnnnnnnnnnnnnnnnnnnnnnnnnnnnnnnnnnnnnnnnnnnnnnnnnnnnnnnnnnnnnnnnnnnnnnnnnnnnnnnnnnnnnnnnnnnnnnnnnnnnnnnnnnnnnnnnnnnnnnnnnnnnnnnnnnnnnnnnnnnnnnnnnnnnnnnnnnnnnnnnnnnnnnnnnnnnnnnnnnnnnnnnnnnnnnnnnnnnnnnnnnnnnnnnnnnnnnnnnnnnnnnnnnnnnnnnnnnnnnnnnnnnnnnnnnnnnnnnnnnnnnnnnnnnnnnnnnnnnnnnnnnnnnnnnnnnnnnnnnnnnnnnnnnnnnnnnnnnnnnnnnnnnnnnnnnnnnnnnnnnnnnnnnnnnnnnnnnnnnnnnnnnnnnnnnnnnnnnnnnnnnnnnnnnnnnnnnnnnnnnnnnnnnnnnnnnnnnnnnnnnnnnnnnnnnnnnnnnnnnnnnnnnnnnnnnnnnnnnnnnnnnnnnnnnnnnnnnnnnnnnnnnnnnnnnnnnnnnnnnnnnnnnnnnnnnnnnnnnnnnnnnnnnnnnnnnnnnnnnnnnnnnnnnnnnnnnnnnnnnnnnnnnnnnnnnnnnnnnnnnnnnnnnnnnnnnnnnnnnnnnnnnnnnnnnnnnnnnnnnnnnnnnnnnnnnnnnnnnnnnnnnnnnnnnnnnnnnnnnnnnnnnnnnnnnnnnnnnnnnnnnnnnnnnnnnnnnnnnnnnnnnnnnnnnnnnnnnnnnnnnnnnnnnnnnnnnnnnnnnnnnnnnnnnnnnnnnnnnnnnnnnnnnnnnnnnnnnnnnnnnnnnnnnnnnnnnnnnnnnnnnnnnnnnnnnnnnnnnnnnnnnnnnnnnnnnnnnnnnnnnnnnnnnnnnnnnnnnnnnnnnnnnnnnnnnnnnnnnnnnnnnnnnnnnnnnnnnnnnnnnnnnnnnnnnnnnnnnnnnnnnnnnnnnnnnnnnnnnnnnnnnnnnnnnnnnnnnnnnnnnnnnnnnnnnnnnnnnnnnnnnnnnnnnnnnnnnnnnnnnnnnnnnnnnnnnnnnnnnnnnnnnnnnnnnnnnnnnnnnnnnnnnnnnnnnnnnnnnnnnnnnnnnnnnnnnnnnnnnnnnnnnnnnnnnnnnnnnnnnnnnnnnnnnnnnnnnnnnnnnnnnnnnnnnnnnnnnnnnnnnnnnnnnnnnnnnnnnnnnnnnnnnnnnnnnnnnnnnnnnnnnnnnnnnnnnnnnnnnnnnnnnnnnnnnnnnnnnnnnnnnnnnnnnnnnnnnnnnnnnnnnnnnnnnnnnnnnnnnnnnnnnnnnnnnnnnnnnnnnnnnnnnnnnnnnnnnnnnnnnnnnnnnnnnnnnnnnnnnnnnnnnnnnnnnnnnnnnnnnnnnnnnnnnnnnnnnnnnnnnnnnnnnnnnnnnnnnnnnnnnnnnnnnnnnnnnnnnnnnnnnnnnnnnnnnnnnnnnnnnnnnnnnnnnnnnnnnnnnnnnnnnnnnnnnnnnnnnnnnnnnnnnnnnnnnnnnnnnnnnnnnnnnnnnnnnnnnnnnnnnnnnnnnnnnnnnnnnnnnnnnnnnnnnnnnnnnnnnnnnnnnnnnnnnnnnnnnnnnnnnnnnnnnnnnnnnnnnnnnnnnnnnnnnnnnnnnnnnnnnnnnnnnnnnnnnnnnnnnnnnnnnnnnnnnnnnnnnnnnnnnnnnnnnnnnnnnnnnnnnnnnnnnnnnnnnnnnnnnnnnnnnnnnnnnnnnnnnnnnnnnnnnnnnnnnnnnnnnnnnnnnnnnnnnnnnnnnnnnnnnnnnnnnnnnnnnnnnnnnnnnnnnnnnnnnnnnnnnnnnnnnnnnnnnnnnnnnnnnnnnnnnnnnnnnnnnnnnnnnnnnnnnnnnnnnnnnnnnnnnnnnnnnnnnnnnnnnnnnnnnnnnnnnnnnnnnnnnnnnnnnnnnnnnnnnnnnnnnnnnnnnnnnnnnnnnnnnnnnnnnnnnnnnnnnnnnnnnnnnnnnnnnnnnnnnnnnnnnnnnnnnnnnnnnnnnnnnnnnnnnnnnnnnnnnnnnnnnnnnnnnnnnnnnnnnnnnnnnnnnnnnnnnnnnnnnnnnnnnnnnnnnnnnnnnnnnnnnnnnnnnnnnnnnnnnnnnnnnnnnnnnnnnnnnnnnnnnnnnnnnnnnnnnnnnnnnnnnnnnnnnnnnnnnnnnnnnnnnnnnnnnnnnnnnnnnnnnnnnnnnnnnnnnnnnnnnnnnnnnnnnnnnnnnnnnnnnnnnnnnnnnnnnnnnnnnnnnnnnnnnnnnnnnnnnnnnnnnnnnnnnnnnnnnnnnnnnnnnnnnnnnnnnnnnnnnnnnnnnnnnnnnnnnnnnnnnnnnnnnnnnnnnnnnnnnnnnnnnnnnnnnnnnnnnnnnnnnnnnnnnnnnnnnnnnnnnnnnnnnnnnnnnnnnnnnnnnnnnnnnnnnnnnnnnnnnnnnnnnnnnnnnnnnnnnnnnnnnnnnnnnnnnnnnnnnnnnnnnnnnnnnnnnnnnnnnnnnnnnnnnnnnnnnnnnnnnnnnnnnnnnnnnnnnnnnnnnnnnnnnnnnnnnnnnnnnnnnnnnnnnnnnnnnnnnnnnnnnnnnnnnnnnnnnnnnnnnnnnnnnnnnnnnnnnnnnnnnnnnnnnnnnnnnnnnnnnnnnnnnnnnnnnnnnnnnnnnnnnnnnnnnnnnnnnnnnnnnnnnnnnnnnnnnnnnnnnnnnnnnnnnnnnnnnnnnnnnnnnnnnnnnnnnnnnnnnnnnnnnnnnnnnnnnnnnnnnnnnnnnnnnnnnnnnnnnnnnnnnnnnnnnnnnnnnnnnnnnnnnnnnnnnnnnnnnnnnnnnnnnnnnnnnnnnnnnnnnnnnnnnnnnnnnnnnnnnnnnnnnnnnnnnnnnnnnnnnnnnnnnnnnnnnnnnnnnnnnnnnnnnnnnnnnnnnnnnnnnnnnnnnnnnnnnnnnnnnnnnnnnnnnnnnnnnnnnnnnnnnnnnnnnnnnnnnnnnnnnnnnnnnnnnnnnnnnnnnnnnnnnnnnnnnnnnnnnnnnnnnnnnnnnnnnnnnnnnnnnnnnnnnnnnnnnnnnnnnnnnnnnnnnnnnnnnnnnnnnnnnnnnnnnnnnnnnnnnnnnnnnnnnnnnnnnnnnnnnnnnnnnnnnnnnnnnnnnnnnnnnnnnnnnnnnnnnnnnnnnnnnnnnnnnnnnnnnnnnnnnnnnnnnnnnnnnnnnnnnnnnnnnnnnnnnnnnnnnnnnnnnnnnnnnnnnnnnnnnnnnnnnnnnnnnnnnnnnnnnnnnnnnnnnnnnnnnnnnnnnnnnnnnnnnnnnnnnnnnnnnnnnnnnnnnnnnnnnnnnnnnnnnnnnnnnnnnnnnnnnnnnnnnnnnnnnnnnnnnnnnnnnnnnnnnnnnnnnnnnnnnnnnnnnnnnnnnnnnnnnnnnnnnnnnnnnnnnnnnnnnnnnnnnnnnnnnnnnnnnnnnnnnnnnnnnnnnnnnnnnnnnnnnnnnnnnnnnnnnnnnnnnnnnnnnnnnnnnnnnnnnnnnnnnnnnnnnnnnnnnnnnnnnnnnnnnnnnnnnnnnnnnnnnnnnnnnnnnnnnnnnnnnnnnnnnnnnnnnnnnnnnnnnnnnnnnnnnnnnnnnnnnnnnnnnnnnnnnnnnnnnnnnnnnnnnnnnnnnnnnnnnnnnnnnnnnnnnnnnnnnnnnnnnnnnnnnnnnnnnnnnnnnnnnnnnnnnnnnnnnnnnnnnnnnnnnnnnnnnnnnnnnnnnnnnnnnnnnnnnnnnnnnnnnnnnnnnnnnnnnnnnnnnnnnnnnnnnnnnnnnnnnnnnnnnnnnnnnnnnnnnnnnnnnnnnnnnnnnnnnnnnnnnnnnnnnnnnnnnnnnnnnnnnnnnnnnnnnnnnnnnnnnnnnnnnnnnnnnnnnnnnnnnnnnnnnnnnnnnnnnnnnnnnnnnnnnnnnnnnnnnnnnnnnnnnnnnnnnnnnnnnnnnnnnnnnnnnnnnnnnnnnnnnnnnnnnnnnnnnnnnnnnnnnnnnnnnnnnnnnnnnnnnnnnnnnnnnnnnnnnnnnnnnnnnnnnnnnnnnnnnnnnnnnnnnnnnnnnnnnnnnnnnnnnnnnnnnnnnnnnnnnnnnnnnnnnnnnnnnnnnnnnnnnnnnnnnnnnnnnnnnnnnnnnnnnnnnnnnnnnnnnnnnnnnnnnnnnnnnnnnnnnnnnnnnnnnnnnnnnnnnnnnnnnnnnnnnnnnnnnnnnnnnnnnnnnnnnnnnnnnnnnnnnnnnnnnnnnnnnnnnnnnnnnnnnnnnnnnnnnnnnnnnnnnnnnnnnnnnnnnnnnnnnnnnnnnnnnnnnnnnnnnnnnnnnnnnnnnnnnnnnnnnnnnnnnnnnnnnnnnnnnnnnnnnnnnnnnnnnnnnnnnnnnnnnnnnnnnnnnnnnnnnnnnnnnnnnnnnnnnnnnnnnnnnnnnnnnnnnnnnnnnnnnnnnnnnnnnnnnnnnnnnnnnnnnnnnnnnnnnnnnnnnnnnnnnnnnnnnnnnnnnnnnnnnnnnnnnnnnnnnnnnnnnnnnnnnnnnnnnnnnnnnnnnnnnnnnnnnnnnnnnnnnnnnnnnnnnnnnnnnnnnnnnnnnnnnnnnnnnnnnnnnnnnnnnnnnnnnnnnnnnnnnnnnnnnnnnnnnnnnnnnnnnnnnnnnnnnnnnnnnnnnnnnnnnnnnnnnnnnnnnnnnnnnnnnnnnnnnnnnnnnnnnnnnnnnnnnnnnnnnnnnnnnnnnnnnnnnnnnnnnnnnnnnnnnnnnnnnnnnnnnnnnnnnnnnnnnnnnnnnnnnnnnnnnnnnnnnnnnnnnnnnnnnnnnnnnnnnnnnnnnnnnnnnnnnnnnnnnnnnnnnnnnnnnnnnnnnnnnnnnnnnnnnnnnnnnnnnnnnnnnnnnnnnnnnnnnnnnnnnnnnnnnnnnnnnnnnnnnnnnnnnnnnnnnnnnnnnnnnnnnnnnnnnnnnnnnnnnnnnnnnnnnnnnnnnnnnnnnnnnnnnnnnnnnnnnnnnnnnnnnnnnnnnnnnnnnnnnnnnnnnnnnnnnnnnnnnnnnnnnnnnnnnnnnnnnnnnnnnnnnnnnnnnnnnnnnnnnnnnnnnnnnnnnnnnnnnnnnnnnnnnnnnnnnnnnnnnnnnnnnnnnnnnnnnnnnnnnnnnnnnnnnnnnnnnnnnnnnnnnnnnnnnnnnnnnnnnnnnnnnnnnnnnnnnnnnnnnnnnnnnnnnnnnnnnnnnnnnnnnnnnnnnnnnnnnnnnnnnnnnnnnnnnnnnnnnnnnnnnnnnnnnnnnnnnnnnnnnnnnnnnnnnnnnnnnnnnnnnnnnnnnnnnnnnnnnnnnnnnnnnnnnnnnnnnnnnnnnnnnnnnnnnnnnnnnnnnnnnnnnnnnnnnnnnnnnnnnnnnnnnnnnnnnnnnnnnnnnnnnnnnnnnnnnnnnnnnnnnnnnnnnnnnnnnnnnnnnnnnnnnnnnnnnnnnnnnnnnnnnnnnnnnnnnnnnnnnnnnnnnnnnnnnnnnnnnnnnnnnnnnnnnnnnnnnnnnnnnnnnnnnnnnnnnnnnnnnnnnnnnnnnnnnnnnnnnnnnnnnnnnnnnnnnnnnnnnnnnnnnnnnnnnnnnnnnnnnnnnnnnnnnnnnnnnnnnnnnnnnnnnnnnnnnnnnnnnnnnnnnnnnnnnnnnnnnnnnnnnnnnnnnnnnnnnnnnnnnnnnnnnnnnnnnnnnnnnnnnnnnnnnnnnnnnnnnnnnnnnnnnnnnnnnnnnnnnnnnnnnnnnnnnnnnnnnnnnnnnnnnnnnnnnnnnnnnnnnnnnnnnnnnnnnnnnnnnnnnnnnnnnnnnnnnnnnnnnnnnnnnnnnnnnnnnnnnnnnnnnnnnnnnnnnnnnnnnnnnnnnnnnnnnnnnnnnnnnnnnnnnnnnnnnnnnnnnnnnnnnnnnnnnnnnnnnnnnnnnnnnnnnnnnnnnnnnnnnnnnnnnnnnnnnnnnnnnnnnnnnnnnnnnnnnnnnnnnnnnnnnnnnnnnnnnnnnnnnnnnnnnnnnnnnnnnnnnnnnnnnnnnnnnnnnnnnnnnnnnnnnnnnnnnnnnnnnnnnnnnnnnnnnnnnnnnnnnnnnnnnnnnnnnnnnnnnnnnnnnnnnnnnnnnnnnnnnnnnnnnnnnnnnnnnnnnnnnnnnnnnnnnnnnnnnnnnnnnnnnnnnnnnnnnnnnnnnnnnnnnnnnnnnnnnnnnnnnnnnnnnnnnnnnnnnnnnnnnnnnnnnnnnnnnnnnnnnnnnnnnnnnnnnnnnnnnnnnnnnnnnnnnnnnnnnnnnnnnnnnnnnnnnnnnnnnnnnnnnnnnnnnnnnnnnnnnnnnnnnnnnnnnnnnnnnnnnnnnnnnnnnnnnnnnnnnnnnnnnnnnnnnnnnnnnnnnnnnnnnnnnnnnnnnnnnnnnnnnnnnnnnnnnnnnnnnnnnnnnnnnnnnnnnnnnnnnnnnnnnnnnnnnnnnnnnnnnnnnnnnnnnnnnnnnnnnnnnnnnnnnnnnnnnnnnnnnnnnnnnnnnnnnnnnnnnnnnnnnnnnnnnnnnnnnnnnnnnnnnnnnnnnnnnnnnnnnnnnnnnnnnnnnnnnnnnnnnnnnnnnnnnnnnnnnnnnnnnnnnnnnnnnnnnnnnnnnnnnnnnnnnnnnnnnnnnnnnnnnnnnnnnnnnnnnnnnnnnnnnnnnnnnnnnnnnnnnnnnnnnnnnnnnnnnnnnnnnnnnnnnnnnnnnnnnnnnnnnnnnnnnnnnnnnnnnnnnnnnnnnnnnnnnnnnnnnnnnnnnnnnnnnnnnnnnnnnnnnnnnnnnnnnnnnnnnnnnnnnnnnnnnnnnnnnnnnnnnnnnnnnnnnnnnnnnnnnnnnnnnnnnnnnnnnnnnnnnnnnnnnnnnnnnnnnnnnnnnnnnnnnnnnnnnnnnnnnnnnnnnnnnnnnnnnnnnnnnnnnnnnnnnnnnnnnnnnnnnnnnnnnnnnnnnnnnnnnnnnnnnnnnnnnnnnnnnnnnnnnnnnnnnnnnnnnnnnnnnnnnnnnnnnnnnnnnnnnnnnnnnnnnnnnnnnnnnnnnnnnnnnnnnnnnnnnnnnnnnnnnnnnnnnnnnnnnnnnnnnnnnnnnnnnnnnnnnnnnnnnnnnnnnnnnnnnnnnnnnnnnnnnnnnnnnnnnnnnnnnnnnnnnnnnnnnnnnnnnnnnnnnnnnnnnnnnnnnnnnnnnnnnnnnnnnnnnnnnnnnnnnnnnnnnnnnnnnnnnnnnnnnnnnnnnnnnnnnnnnnnnnnnnnnnnnnnnnnnnnnnnnnnnnnnnnnnnnnnnnnnnnnnnnnnnnnnnnnnnnnnnnnnnnnnnnnnnnnnnnnnnnnnnnnnnnnnnnnnnnnnnnnnnnnnnnnnnnnnnnnnnnnnnnnnnnnnnnnnnnnnnnnnnnnnnnnnnnnnnnnnnnnnnnnnnnnnnnnnnnnnnnnnnnnnnnnnnnnnnnnnnnnnnnnnnnnnnnnnnnnnnnnnnnnnnnnnnnnnnnnnnnnnnnnnnnnnnnnnnnnnnnnnnnnnnnnnnnnnnnnnnnnnnnnnnnnnnnnnnnnnnnnnnnnnnnnnnnnnnnnnnnnnnnnnnnnnnnnnnnnnnnnnnnnnnnnnnnnnnnnnnnnnnnnnnnnnnnnnnnnnnnnnnnnnnnnnnnnnnnnnnnnnnnnnnnnnnnnnnnnnnnnnnnnnnnnnnnnnnnnnnnnnnnnnnnnnnnnnnnnnnnnnnnnnnnnnnnnnnnnnnnnnnnnnnnnnnnnnnnnnnnnnnnnnnnnnnnnnnnnnnnnnnnnnnnnnnnnnnnnnnnnnnnnnnnnnnnnnnnnnnnnnnnnnnnnnnnnnnnnnnnnnnnnnnnnnnnnnnnnnnnnnnnnnnnnnnnnnnnnnnnnnnnnnnnnnnnnnnnnnnnnnnnnnnnnnnnnnnnnnnnnnnnnnnnnnnnnnnnnnnnnnnnnnnnnnnnnnnnnnnnnnnnnnnnnnnnnnnnnnnnnnnnnnnnnnnnnnnnnnnnnnnnnnnnnnnnnnnnnnnnnnnnnnnnnnnnnnnnnnnnnnnnnnnnnnnnnnnnnnnnnnnnnnnnnnnnnnnnnnnnnnnnnnnnnnnnnnnnnnnnnnnnnnnnnnnnnnnnnnnnnnnnnnnnnnnnnnnnnnnnnnnnnnnnnnnnnnnnnnnnnnnnnnnnnnnnnnnnnnnnnnnnnnnnnnnnnnnnnnnnnnnnnnnnnnnnnnnnnnnnnnnnnnnnnnnnnnnnnnnnnnnnnnnnnnnnnnnnnnnnnnnnnnnnnnnnnnnnnnnnnnnnnnnnnnnnnnnnnnnnnnnnnnnnnnnnnnnnnnnnnnnnnnnnnnnnnnnnnnnnnnnnnnnnnnnnnnnnnnnnnnnnnnnnnnnnnnnnnnnnnnnnnnnnnnnnnnnnnnnnnnnnnnnnnnnnnnnnnnnnnnnnnnnnnnnnnnnnnnnnnnnnnnnnnnnnnnnnnnnnnnnnnnnnnnnnnnnnnnnnnnnnnnnnnnnnnnnnnnnnnnnnnnnnnnnnnnnnnnnnnnnnnnnnnnnnnnnnnnnnnnnnnnnnnnnnnnnnnnnnnnnnnnnnnnnnnnnnnnnnnnnnnnnnnnnnnnnnnnnnnnnnnnnnnnnnnnnnnnnnnnnnnnnnnnnnnnnnnnnnnnnnnnnnnnnnnnnnnnnnnnnnnnnnnnnnnnnnnnnnnnnnnnnnnnnnnnnnnnnnnnnnnnnnnnnnnnnnnnnnnnnnnnnnnnnnnnnnnnnnnnnnnnnnnnnnnnnnnnnnnnnnnnnnnnnnnnnnnnnnnnnnnnnnnnnnnnnnnnnnnnnnnnnnnnnnnnnnnnnnnnnnnnnnnnnnnnnnnnnnnnnnnnnnnnnnnnnnnnnnnnnnnnnnnnnnnnnnnnnnnnnnnnnnnnnnnnnnnnnnnnnnnnnnnnnnnnnnnnnnnnnnnnnnnnnnnnnnnnnnnnnnnnnnnnnnnnnnnnnnnnnnnnnnnnnnnnnnnnnnnnnnnnnnnnnnnnnnnnnnnnnnnnnnnnnnnnnnnnnnnnnnnnnnnnnnnnnnnnnnnnnnnnnnnnnnnnnnnnnnnnnnnnnnnnnnnnnnnnnnnnnnnnnnnnnnnnnnnnnnnnnnnnnnnnnnnnnnnnnnnnnnnnnnnnnnnnnnnnnnnnnnnnnnnnnnnnnnnnnnnnnnnnnnnnnnnnnnnnnnnnnnnnnnnnnnnnnnnnnnnnnnnnnnnnnnnnnnnnnnnnnnnnnnnnnnnnnnnnnnnnnnnnnnnnnnnnnnnnnnnnnnnnnnnnnnnnnnnnnnnnnnnnnnnnnnnnnnnnnnnnnnnnnnnnnnnnnnnnnnnnnnnnnnnnnnnnnnnnnnnnnnnnnnnnnnnnnnnnnnnnnnnnnnnnnnnnnnnnnnnnnnnnnnnnnnnnnnnnnnnnnnnnnnnnnnnnnnnnnnnnnnnnnnnnnnnnnnnnnnnnnnnnnnnnnnnnnnnnnnnnnnnnnnnnnnnnnnnnnnnnnnnnnnnnnnnnnnnnnnnnnnnnnnnnnnnnnnnnnnnnnnnnnnnnnnnnnnnnnnnnnnnnnnnnnnnnnnnnnnnnnnnnnnnnnnnnnnnnnnnnnnnnnnnnnnnnnnnnnnnnnnnnnnnnnnnnnnnnnnnnnnnnnnnnnnnnnnnnnnnnnnnnnnnnnnnnnnnnnnnnnnnnnnnnnnnnnnnnnnnnnnnnnnnnnnnnnnnnnnnnnnnnnnnnnnnnnnnnnnnnnnnnnnnnnnnnnnnnnnnnnnnnnnnnnnnnnnnnnnnnnnnnnnnnnnnnnnnnnnnnnnnnnnnnnnnnnnnnnnnnnnnnnnnnnnnnnnnnnnnnnnnnnnnnnnnnnnnnnnnnnnnnnnnnnnnnnnnnnnnnnnnnnnnnnnnnnnnnnnnnnnnnnnnnnnnnnnnnnnnnnnnnnnnnnnnnnnnnnnnnnnnnnnnnnnnnnnnnnnnnnnnnnnnnnnnnnnnnnnnnnnnnnnnnnnnnnnnnnnnnnnnnnnnnnnnnnnnnnnnnnnnnnnnnnnnnnnnnnnnnnnnnnnnnnnnnnnnnnnnnnnnnnnnnnnnnnnnnnnnnnnnnnnnnnnnnnnnnnnnnnnnnnnnnnnnnnnnnnnnnnnnnnnnnnnnnnnnnnnnnnnnnnnnnnnnnnnnnnnnnnnnnnnnnnnnnnnnnnnnnnnnnnnnnnnnnnnnnnnnnnnnnnnnnnnnnnnnnnnnnnnnnnnnnnnnnnnnnnnnnnnnnnnnnnnnnnnnnnnnnnnnnnnnnnnnnnnnnnnnnnnnnnnnnnnnnnnnnnnnnnnnnnnnnnnnnnnnnnnnnnnnnnnnnnnnnnnnnnnnnnnnnnnnnnnnnnnnnnnnnnnnnnnnnnnnnnnnnnnnnnnnnnnnnnnnnnnnnnnnnnnnnnnnnnnnnnnnnnnnnnnnnnnnnnnnnnnnnnnnnnnnnnnnnnnnnnnnnnnnnnnnnnnnnnnnnnnnnnnnnnnnnnnnnnnnnnnnnnnnnnnnnnnnnnnnnnnnnnnnnnnnnnnnnnnnnnnnnnnnnnnnnnnnnnnnnnnnnnnnnnnnnnnnnnnnnnnnnnnnnnnnnnnnnnnnnnnnnnnnnnnnnnnnnnnnnnnnnnnnnnnnnnnnnnnnnnnnnnnnnnnnnnnnnnnnnnnnnnnnnnnnnnnnnnnnnnnnnnnnnnnnnnnnnnnnnnnnnnnnnnnnnnnnnnnnnnnnnnnnnnnnnnnnnnnnnnnnnnnnnnnnnnnnnnnnnnnnnnnnnnnnnnnnnnnnnnnnnnnnnnnnnnnnnnnnnnnnnnnnnnnnnnnnnnnnnnnnnnnnnnnnnnnnnnnnnnnnnnnnnnnnnnnnnnnnnnnnnnnnnnnnnnnnnnnnnnnnnnnnnnnnnnnnnnnnnnnnnnnnnnnnnnnnnnnnnnnnnnnnnnnnnnnnnnnnnnnnnnnnnnnnnnnnnnnnnnnnnnnnnnnnnnnnnnnnnnnnnnnnnnnnnnnnnnnnnnnnnnnnnnnnnnnnnnnnnnnnnnnnnnnnnnnnnnnnnnnnnnnnnnnnnnnnnnnnnnnnnnnnnnnnnnnnnnnnnnnnnnnnnnnnnnnnnnnnnnnnnnnnnnnnnnnnnnnnnnnnnnnnnnnnnnnnnnnnnnnnnnnnnnnnnnnnnnnnnnnnnnnnnnnnnnnnnnnnnnnnnnnnnnnnnnnnnnnnnnnnnnnnnnnnnnnnnnnnnnnnnnnnnnnnnnnnnnnnnnnnnnnnnnnnnnnnnnnnnnnnnnnnnnnnnnnnnnnnnnnnnnnnnnnnnnnnnnnnnnnnnnnnnnnnnnnnnnnnnnnnnnnnnnnnnnnnnnnnnnnnnnnnnnnnnnnnnnnnnnnnnnnnnnnnnnnnnnnnnnnnnnnnnnnnnnnnnnnnnnnnnnnnnnnnnnnnnnnnnnnnnnnnnnnnnnnnnnnnnnnnnnnnnnnnnnnnnnnnnnnnnnnnnnnnnnnnnnnnnnnnnnnnnnnnnnnnnnnnnnnnnnnnnnnnnnnnnnnnnnnnnnnnnnnnnnnnnnnnnnnnnnnnnnnnnnnnnnnnnnnnnnnnnnnnnnnnnnnnnnnnnnnnnnnnnnnnnnnnnnnnnnnnnnnnnnnnnnnnnnnnnnnnnnnnnnnnnnnnnnnnnnnnnnnnnnnnnnnnnnnnnnnnnnnnnnnnnnnnnnnnnnnnnnnnnnnnnnnnnnnnnnnnnnnnnnnnnnnnnnnnnnnnnnnnnnnnnnnnnnnnnnnnnnnnnnnnnnnnnnnnnnnnnnnnnnnnnnnnnnnnnnnnnnnnnnnnnnnnnnnnnnnnnnnnnnnnnnnnnnnnnnnnnnnnnnnnnnnnnnnnnnnnnnnnnnnnnnnnnnnnnnnnnnnnnnnnnnnnnnnnnnnnnnnnnnnnnnnnnnnnnnnnnnnnnnnnnnnnnnnnnnnnnnnnnnnnnnnnnnnnnnnnnnnnnnnnnnnnnnnnnnnnnnnnnnnnnnnnnnnnnnnnnnnnnnnnnnnnnnnnnnnnnnnnnnnnnnnnnnnnnnnnnnnnnnnnnnnnnnnnnnnnnnnnnnnnnnnnnnnnnnnnnnnnnnnnnnnnnnnnnnnnnnnnnnnnnnnnnnnnnnnnnnnnnnnnnnnnnnnnnnnnnnnnnnnnnnnnnnnnnnnnnnnnnnnnnnnnnnnnnnnnnnnnnnnnnnnnnnnnnnnnnnnnnnnnnnnnnnnnnnnnnnnnnnnnnnnnnnnnnnnnnnnnnnnnnnnnnnnnnnnnnnnnnnnnnnnnnnnnnnnnnnnnnnnnnnnnnnnnnnnnnnnnnnnnnnnnnnnnnnnnnnnnnnnnnnnnnnnnnnnnnnnnnnnnnnnnnnnnnnnnnnnnnnnnnnnnnnnnnnnnnnnnnnnnnnnnnnnnnnnnnnnnnnnnnnnnnnnnnnnnnnnnnnnnnnnnnnnnnnnnnnnnnnnnnnnnnnnnnnnnnnnnnnnnnnnnnnnnnnnnnnnnnnnnnnnnnnnnnnnnnnnnnnnnnnnnnnnnnnnnnnnnnnnnnnnnnnnnnnnnnnnnnnnnnnnnnnnnnnnnnnnnnnnnnnnnnnnnnnnnnnnnnnnnnnnnnnnnnnnnnnnnnnnnnnnnnnnnnnnnnnnnnnnnnnnnnnnnnnnnnnnnnnnnnnnnnnnnnnnnnnnnnnnnnnnnnnnnnnnnnnnnnnnnnnnnnnnnnnnnnnnnnnnnnnnnnnnnnnnnnnnnnnnnnnnnnnnnnnnnnnnnnnnnnnnnnnnnnnnnnnnnnnnnnnnnnnnnnnnnnnnnnnnnnnnnnnnnnnnnnnnnnnnnnnnnnnnnnnnnnnnnnnnnnnnnnnnnnnnnnnnnnnnnnnnnnnnnnnnnnnnnnnnnnnnnnnnnnnnnnnnnnnnnnnnnnnnnnnnnnnnnnnnnnnnnnnnnnnnnnnnnnnnnnnnnnnnnnnnnnnnnnnnnnnnnnnnnnnnnnnnnnnnnnnnnnnnnnnnnnnnnnnnnnnnnnnnnnnnnnnnnnnnnnnnnnnnnnnnnnnnnnnnnnnnnnnnnnnnnnnnnnnnnnnnnnnnnnnnnnnnnnnnnnnnnnnnnnnnnnnnnnnnnnnnnnnnnnnnnnnnnnnnnnnnnnnnnnnnnnnnnnnnnnnnnnnnnnnnnnnnnnnnnnnnnnnnnnnnnnnnnnnnnnnnnnnnnnnnnnnnnnnnnnnnnnnnnnnnnnnnnnnnnnnnnnnnnnnnnnnnnnnnnnnnnnnnnnnnnnnnnnnnnnnnnnnnnnnnnnnnnnnnnnnnnnnnnnnnnnnnnnnnnnnnnnnnnnnnnnnnnnnnnnnnnnnnnnnnnnnnnnnnnnnnnnnnnnnnnnnnnnnnnnnnnnnnnnnnnnnnnnnnnnnnnnnnnnnnnnnnnnnnnnnnnnnnnnnnnnnnnnnnnnnnnnnnnnnnnnnnnnnnnnnnnnnnnnnnnnnnnnnnnnnnnnnnnnnnnnnnnnnnnnnnnnnnnnnnnnnnnnnnnnnnnnnnnnnnnnnnnnnnnnnnnnnnnnnnnnnnnnnnnnnnnnnnnnnnnnnnnnnnnnnnnnnnnnnnnnnnnnnnnnnnnnnnnnnnnnnnnnnnnnnnnnnnnnnnnnnnnnnnnnnnnnnnnnnnnnnnnnnnnnnnnnnnnnnnnnnnnnnnnnnnnnnnnnnnnnnnnnnnnnnnnnnnnnnnnnnnnnnnnnnnnnnnnnnnnnnnnnnnnnnnnnnnnnnnnnnnnnnnnnnnnnnnnnnnnnnnnnnnnnnnnnnnnnnnnnnnnnnnnnnnnnnnnnnnnnnnnnnnnnnnnnnnnnnnnnnnnnnnnnnnnnnnnnnnnnnnnnnnnnnnnnnnnnnnnnnnnnnnnnnnnnnnnnnnnnnnnnnnnnnnnnnnnnnnnnnnnnnnnnnnnnnnnnnnnnnnnnnnnnnnnnnnnnnnnnnnnnnnnnnnnnnnnnnnnnnnnnnnnnnnnnnnnnnnnnnnnnnnnnnnnnnnnnnnnnnnnnnnnnnnnnnnnnnnnnnnnnnnnnnnnnnnnnnnnnnnnnnnnnnnnnnnnnnnnnnnnnnnnnnnnnnnnnnnnnnnnnnnnnnnnnnnnnnnnnnnnnnnnnnnnnnnnnnnnnnnnnnnnnnnnnnnnnnnnnnnnnnnnnnnnnnnnnnnnnnnnnnnnnnnnnnnnnnnnnnnnnnnnnnnnnnnnnnnnnnnnnnnnnnnnnnnnnnnnnnnnnnnnnnnnnnnnnnnnnnnnnnnnnnnnnnnnnnnnnnnnnnnnnnnnnnnnnnnnnnnnnnnnnnnnnnnnnnnnnnnnnnnnnnnnnnnnnnnnnnnnnnnnnnnnnnnnnnnnnnnnnnnnnnnnnnnnnnnnnnnnnnnnnnnnnnnnnnnnnnnnnnnnnnnnnnnnnnnnnnnnnnnnnnnnnnnnnnnnnnnnnnnnnnnnnnnnnnnnnnnnnnnnnnnnnnnnnnnnnnnnnnnnnnnnnnnnnnnnnnnnnnnnnnnnnnnnnnnnnnnnnnnnnnnnnnnnnnnnnnnnnnnnnnnnnnnnnnnnnnnnnnnnnnnnnnnnnnnnnnnnnnnnnnnnnnnnnnnnnnnnnnnnnnnnnnnnnnnnnnnnnnnnnnnnnnnnnnnnnnnnnnnnnnnnnnnnnnnnnnnnnnnnnnnnnnnnnnnnnnnnnnnnnnnnnnnnnnnnnnnnnnnnnnnnnnnnnnnnnnnnnnnnnnnnnnnnnnnnnnnnnnnnnnnnnnnnnnnnnnnnnnnnnnnnnnnnnnnnnnnnnnnnnnnnnnnnnnnnnnnnnnnnnnnnnnnnnnnnnnnnnnnnnnnnnnnnnnnnnnnnnnnnnnnnnnnnnnnnnnnnnnnnnnnnnnnnnnnnnnnnnnnnnnnnnnnnnnnnnnnnnnnnnnnnnnnnnnnnnnnnnnnnnnnnnnnnnnnnnnnnnnnnnnnnnnnnnnnnnnnnnnnnnnnnnnnnnnnnnnnnnnnnnnnnnnnnnnnnnnnnnnnnnnnnnnnnnnnnnnnnnnnnnnnnnnnnnnnnnnnnnnnnnnnnnnnnnnnnnnnnnnnnnnnnnnnnnnnnnnnnnnnnnnnnnnnnnnnnnnnnnnnnnnnnnnnnnnnnnnnnnnnnnnnnnnnnnnnnnnnnnnnnnnnnnnnnnnnnnnnnnnnnnnnnnnnnnnnnnnnnnnnnnnnnnnnnnnnnnnnnnnnnnnnnnnnnnnnnnnnnnnnnnnnnnnnnnnnnnnnnnnnnnnnnnnnnnnnnnnnnnnnnnnnnnnnnnnnnnnnnnnnnnnnnnnnnnnnnnnnnnnnnnnnnnnnnnnnnnnnnnnnnnnnnnnnnnnnnnnnnnnnnnnnnnnnnnnnnnnnnnnnnnnnnnnnnnnnnnnnnnnnnnnnnnnnnnnnnnnnnnnnnnnnnnnnnnnnnnnnnnnnnnnnnnnnnnnnnnnnnnnnnnnnnnnnnnnnnnnnnnnnnnnnnnnnnnnnnnnnnnnnnnnnnnnnnnnnnnnnnnnnnnnnnnnnnnnnnnnnnnnnnnnnnnnnnnnnnnnnnnnnnnnnnnnnnnnnnnnnnnnnnnnnnnnnnnnnnnnnnnnnnnnnnnnnnnnnnnnnnnnnnnnnnnnnnnnnnnnnnnnnnnnnnnnnnnnnnnnnnnnnnnnnnnnnnnnnnnnnnnnnnnnnnnnnnnnnnnnnnnnnnnnnnnnnnnnnnnnnnnnnnnnnnnnnnnnnnnnnnnnnnnnnnnnnnnnnnnnnnnnnnnnnnnnnnnnnnnnnnnnnnnnnnnnnnnnnnnnnnnnnnnnnnnnnnnnnnnnnnnnnnnnnnnnnnnnnnnnnnnnnnnnnnnnnnnnnnnnnnnnnnnnnnnnnnnnnnnnnnnnnnnnnnnnnnnnnnnnnnnnnnnnnnnnnnnnnnnnnnnnnnnnnnnnnnnnnnnnnnnnnnnnnnnnnnnnnnnnnnnnnnnnnnnnnnnnnnnnnnnnnnnnnnnnnnnnnnnnnnnnnnnnnnnnnnnnnnnnnnnnnnnnnnnnnnnnnnnnnnnnnnnnnnnnnnnnnnnnnnnnnnnnnnnnnnnnnnnnnnnnnnnnnnnnnnnnnnnnnnnnnnnnnnnnnnnnnnnnnnnnnnnnnnnnnnnnnnnnnnnnnnnnnnnnnnnnnnnnnnnnnnnnnnnnnnnnnnnnnnnnnnnnnnnnnnnnnnnnnnnnnnnnnnnnnnnnnnnnnnnnnnnnnnnnnnnnnnnnnnnnnnnnnnnnnnnnnnnnnnnnnnnnnnnnnnnnnnnnnnnnnnnnnnnnnnnnnnnnnnnnnnnnnnnnnnnnnnnnnnnnnnnnnnnnnnnnnnnnnnnnnnnnnnnnnnnnnnnnnnnnnnnnnnnnnnnnnnnnnnnnnnnnnnnnnnnnnnnnnnnnnnnnnnnnnnnnnnnnnnnnnnnnnnnnnnnnnnnnnnnnnnnnnnnnnnnnnnnnnnnnnnnnnnnnnnnnnnnnnnnnnnnnnnnnnnnnnnnnnnnnnnnnnnnnnnnnnnnnnnnnnnnnnnnnnnnnnnnnnnnnnnnnnnnnnnnnnnnnnnnnnnnnnnnnnnnnnnnnnnnnnnnnnnnnnnnnnnnnnnnnnnnnnnnnnnnnnnnnnnnnnnnnnnnnnnnnnnnnnnnnnnnnnnnnnnnnnnnnnnnnnnnnnnnnnnnnnnnnnnnnnnnnnnnnnnnnnnnnnnnnnnnnnnnnnnnnnnnnnnnnnnnnnnnnnnnnnnnnnnnnnnnnnnnnnnnnnnnnnnnnnnnnnnnnnnnnnnnnnnnnnnnnnnnnnnnnnnnnnnnnnnnnnnnnnnnnnnnnnnnnnnnnnnnnnnnnnnnnnnnnnnnnnnnnnnnnnnnnnnnnnnnnnnnnnnnnnnnnnnnnnnnnnnnnnnnnnnnnnnnnnnnnnnnnnnnnnnnnnnnnnnnnnnnnnnnnnnnnnnnnnnnnnnnnnnnnnnnnnnnnnnnnnnnnnnnnnnnnnnnnnnnnnnnnnnnnnnnnnnnnnnnnnnnnnnnnnnnnnnnnnnnnnnnnnnnnnnnnnnnnnnnnnnnnnnnnnnnnnnnnnnnnnnnnnnnnnnnnnnnnnnnnnnnnnnnnnnnnnnnnnnnnnnnnnnnnnnnnnnnnnnnnnnnnnnnnnnnnnnnnnnnnnnnnnnnnnnnnnnnnnnnnnnnnnnnnnnnnnnnnnnnnnnnnnnnnnnnnnnnnnnnnnnnnnnnnnnnnnnnnnnnnnnnnnnnnnnnnnnnnnnnnnnnnnnnnnnnnnnnnnnnnnnnnnnnnnnnnnnnnnnnnnnnnnnnnnnnnnnnnnnnnnnnnnnnnnnnnnnnnnnnnnnnnnnnnnnnnnnnnnnnnnnnnnnnnnnnnnnnnnnnnnnnnnnnnnnnnnnnnnnnnnnnnnnnnnnnnnnnnnnnnnnnnnnnnnnnnnnnnnnnnnnnnnnnnnnnnnnnnnnnnnnnnnnnnnnnnnnnnnnnnnnnnnnnnnnnnnnnnnnnnnnnnnnnnnnnnnnnnnnnnnnnnnnnnnnnnnnnnnnnnnnnnnnnnnnnnnnnnnnnnnnnnnnnnnnnnnnnnnnnnnnnnnnnnnnnnnnnnnnnnnnnnnnnnnnnnnnnnnnnnnnnnnnnnnnnnnnnnnnnnnnnnnnnnnnnnnnnnnnnnnnnnnnnnnnnnnnnnnnnnnnnnnnnnnnnnnnnnnnnnnnnnnnnnnnnnnnnnnnnnnnnnnnnnnnnnnnnnnnnnnnnnnnnnnnnnnnnnnnnnnnnnnnnnnnnnnnnnnnnnnnnnnnnnnnnnnnnnnnnnnnnnnnnnnnnnnnnnnnnnnnnnnnnnnnnnnnnnnnnnnnnnnnnnnnnnnnnnnnnnnnnnnnnnnnnnnnnnnnnnnnnnnnnnnnnnnnnnnnnnnnnnnnnnnnnnnnnnnnnnnnnnnnnnnnnnnnnnnnnnnnnnnnnnnnnnnnnnnnnnnnnnnnnnnnnnnnnnnnnnnnnnnnnnnnnnnnnnnnnnnnnnnnnnnnnnnnnnnnnnnnnnnnnnnnnnnnnnnnnnnnnnnnnnnnnnnnnnnnnnnnnnnnnnnnnnnnnnnnnnnnnnnnnnnnnnnnnnnnnnnnnnnnnnnnnnnnnnnnnnnnnnnnnnnnnnnnnnnnnnnnnnnnnnnnnnnnnnnnnnnnnnnnnnnnnnnnnnnnnnnnnnnnnnnnnnnnnnnnnnnnnnnnnnnnnnnnnnnnnnnnnnnnnnnnnnnnnnnnnnnnnnnnnnnnnnnnnnnnnnnnnnnnnnnnnnnnnnnnnnnnnnnnnnnnnnnnnnnnnnnnnnnnnnnnnnnnnnnnnnnnnnnnnnnnnnnnnnnnnnnnnnnnnnnnnnnnnnnnnnnnnnnnnnnnnnnnnnnnnnnnnnnnnnnnnnnnnnnnnnnnnnnnnnnnnnnnnnnnnnnnnnnnnnnnnnnnnnnnnnnnnnnnnnnnnnnnnnnnnnnnnnnnnnnnnnnnnnnnnnnnnnnnnnnnnnnnnnnnnnnnnnnnnnnnnnnnnnnnnnnnnnnnnnnnnnnnnnnnnnnnnnnnnnnnnnnnnnnnnnnnnnnnnnnnnnnnnnnnnnnnnnnnnnnnnnnnnnnnnnnnnnnnnnnnnnnnnnnnnnnnnnnnnnnnnnnnnnnnnnnnnnnnnnnnnnnnnnnnnnnnnnnnnnnnnnnnnnnnnnnnnnnnnnnnnnnnnnnnnnnnnnnnnnnnnnnnnnnnnnnnnnnnnnnnnnnnnnnnnnnnnnnnnnnnnnnnnnnnnnnnnnnnnnnnnnnnnnnnnnnnnnnnnnnnnnnnnnnnnnnnnnnnnnnnnnnnnnnnnnnnnnnnnnnnnnnnnnnnnnnnnnnnnnnnnnnnnnnnnnnnnnnnnnnnnnnnnnnnnnnnnnnnnnnnnnnnnnnnnnnnnnnnnnnnnnnnnnnnnnnnnnnnnnnnnnnnnnnnnnnnnnnnnnnnnnnnnnnnnnnnnnnnnnnnnnnnnnnnnnnnnnnnnnnnnnnnnnnnnnnnnnnnnnnnnnnnnnnnnnnnnnnnnnnnnnnnnnnnnnnnnnnnnnnnnnnnnnnnnnnnnnnnnnnnnnnnnnnnnnnnnnnnnnnnnnnnnnnnnnnnnnnnnnnnnnnnnnnnnnnnnnnnnnnnnnnnnnnnnnnnnnnnnnnnnnnnnnnnnnnnnnnnnnnnnnnnnnnnnnnnnnnnnnnnnnnnnnnnnnnnnnnnnnnnnnnnnnnnnnnnnnnnnnnnnnnnnnnnnnnnnnnnnnnnnnnnnnnnnnnnnnnnnnnnnnnnnnnnnnnnnnnnnnnnnnnnnnnnnnnnnnnnnnnnnnnnnnnnnnnnnnnnnnnnnnnnnnnnnnnnnnnnnnnnnnnnnnnnnnnnnnnnnnnnnnnnnnnnnnnnnnnnnnnnnnnnnnnnnnnnnnnnnnnnnnnnnnnnnnnnnnnnnnnnnnnnnnnnnnnnnnnnnnnnnnnnnnnnnnnnnnnnnnnnnnnnnnnnnnnnnnnnnnnnnnnnnnnnnnnnnnnnnnnnnnnnnnnnnnnnnnnnnnnnnnnnnnnnnnnnnnnnnnnnnnnnnnnnnnnnnnnnnnnnnnnnnnnnnnnnnnnnnnnnnnnnnnnnnnnnnnnnnnnnnnnnnnnnnnnnnnnnnnnnnnnnnnnnnnnnnnnnnnnnnnnnnnnnnnnnnnnnnnnnnnnnnnnnnnnnnnnnnnnnnnnnnnnnnnnnnnnnnnnnnnnnnnnnnnnnnnnnnnnnnnnnnnnnnnnnnnnnnnnnnnnnnnnnnnnnnnnnnnnnnnnnnnnnnnnnnnnnnnnnnnnnnnnnnnnnnnnnnnnnnnnnnnnnnnnnnnnnnnnnnnnnnnnnnnnnnnnnnnnnnnnnnnnnnnnnnnnnnnnnnnnnnnnnnnnnnnnnnnnnnnnnnnnnnnnnnnnnnnnnnnnnnnnnnnnnnnnnnnnnnnnnnnnnnnnnnnnnnnnnnnnnnnnnnnnnnnnnnnnnnnnnnnnnnnnnnnnnnnnnnnnnnnnnnnnnnnnnnnnnnnnnnnnnnnnnnnnnnnnnnnnnnnnnnnnnnnnnnnnnnnnnnnnnnnnnnnnnnnnnnnnnnnnnnnnnnnnnnnnnnnnnnnnnnnnnnnnnnnnnnnnnnnnnnnnnnnnnnnnnnnnnnnnnnnnnnnnnnnnnnnnnnnnnnnnnnnnnnnnnnnnnnnnnnnnnnnnnnnnnnnnnnnnnnnnnnnnnnnnnnnnnnnnnnnnnnnnnnnnnnnnnnnnnnnnnnnnnnnnnnnnnnnnnnnnnnnnnnnnnnnnnnnnnnnnnnnnnnnnnnnnnnnnnnnnnnnnnnnnnnnnnnnnnnnnnnnnnnnnnnnnnnnnnnnnnnnnnnnnnnnnnnnnnnnnnnnnnnnnnnnnnnnnnnnnnnnnnnnnnnnnnnnnnnnnnnnnnnnnnnnnnnnnnnnnnnnnnnnnnnnnnnnnnnnnnnnnnnnnnnnnnnnnnnnnnnnnnnnnnnnnnnnnnnnnnnnnnnnnnnnnnnnnnnnnnnnnnnnnnnnnnnnnnnnnnnnnnnnnnnnnnnnnnnnnnnnnnnnnnnnnnnnnnnnnnnnnnnnnnnnnnnnnnnnnnnnnnnnnnnnnnnnnnnnnnnnnnnnnnnnnnnnnnnnnnnnnnnnnnnnnnnnnnnnnnnnnnnnnnnnnnnnnnnnnnnnnnnnnnnnnnnnnnnnnnnnnnnnnnnnnnnnnnnnnnnnnnnnnnnnnnnnnnnnnnnnnnnnnnnnnnnnnnnnnnnnnnnnnnnnnnnnnnnnnnnnnnnnnnnnnnnnnnnnnnnnnnnnnnnnnnnnnnnnnnnnnnnnnnnnnnnnnnnnnnnnnnnnnnnnnnnnnnnnnnnnnnnnnnnnnnnnnnnnnnnnnnnnnnnnnnnnnnnnnnnnnnnnnnnnnnnnnnnnnnnnnnnnnnnnnnnnnnnnnnnnnnnnnnnnnnnnnnnnnnnnnnnnnnnnnnnnnnnnnnnnnnnnnnnnnnnnnnnnnnnnnnnnnnnnnnnnnnnnnnnnnnnnnnnnnnnnnnnnnnnnnnnnnnnnnnnnnnnnnnnnnnnnnnnnnnnnnnnnnnnnnnnnnnnnnnnnnnnnnnnnnnnnnnnnnnnnnnnnnnnnnnnnnnnnnnnnnnnnnnnnnnnnnnnnnnnnnnnnnnnnnnnnnnnnnnnnnnnnnnnnnnnnnnnnnnnnnnnnnnnnnnnnnnnnnnnnnnnnnnnnnnnnnnnnnnnnnnnnnnnnnnnnnnnnnnnnnnnnnnnnnnnnnnnnnnnnnnnnnnnnnnnnnnnnnnnnnnnnnnnnnnnnnnnnnnnnnnnnnnnnnnnnnnnnnnnnnnnnnnnnnnnnnnnnnnnnnnnnnnnnnnnnnnnnnnnnnnnnnnnnnnnnnnnnnnnnnnnnnnnnnnnnnnnnnnnnnnnnnnnnnnnnnnnnnnnnnnnnnnnnnnnnnnnnnnnnnnnnnnnnnnnnnnnnnnnnnnnnnnnnnnnnnnnnnnnnnnnnnnnnnnnnnnnnnnnnnnnnnnnnnnnnnnnnnnnnnnnnnnnnnnnnnnnnnnnnnnnnnnnnnnnnnnnnnnnnnnnnnnnnnnnnnnnnnnnnnnnnnnnnnnnnnnnnnnnnnnnnnnnnnnnnnnnnnnnnnnnnnnnnnnnnnnnnnnnnnnnnnnnnnnnnnnnnnnnnnnnnnnnnnnnnnnnnnnnnnnnnnnnnnnnnnnnnnnnnnnnnnnnnnnnnnnnnnnnnnnnnnnnnnnnnnnnnnnnnnnnnnnnnnnnnnnnnnnnnnnnnnnnnnnnnnnnnnnnnnnnnnnnnnnnnnnnnnnnnnnnnnnnnnnnnnnnnnnnnnnnnnnnnnnnnnnnnnnnnnnnnnnnnnnnnnnnnnnnnnnnnnnnnnnnnnnnnnnnnnnnnnnnnnnnnnnnnnnnnnnnnnnnnnnnnnnnnnnnnnnnnnnnnnnnnnnnnnnnnnnnnnnnnnnnnnnnnnnnnnnnnnnnnnnnnnnnnnnnnnnnnnnnnnnnnnnnnnnnnnnnnnnnnnnnnnnnnnnnnnnnnnnnnnnnnnnnnnnnnnnnnnnnnnnnnnnnnnnnnnnnnnnnnnnnnnnnnnnnnnnnnnnnnnnnnnnnnnnnnnnnnnnnnnnnnnnnnnnnnnnnnnnnnnnnnnnnnnnnnnnnnnnnnnnnnnnnnnnnnnnnnnnnnnnnnnnnnnnnnnnnnnnnnnnnnnnnnnnnnnnnnnnnnnnnnnnnnnnnnnnnnnnnnnnnnnnnnnnnnnnnnnnnnnnnnnnnnnnnnnnnnnnnnnnnnnnnnnnnnnnnnnnnnnnnnnnnnnnnnnnnnnnnnnnnnnnnnnnnnnnnnnnnnnnnnnnnnnnnnnnnnnnnnnnnnnnnnnnnnnnnnnnnnnnnnnnnnnnnnnnnnnnnnnnnnnnnnnnnnnnnnnnnnnnnnnnnnnnnnnnnnnnnnnnnnnnnnnnnnnnnnnnnnnnnnnnnnnnnnnnnnnnnnnnnnnnnnnnnnnnnnnnnnnnnnnnnnnnnnnnnnnnnnnnnnnnnnnnnnnnnnnnnnnnnnnnnnnnnnnnnnnnnnnnnnnnnnnnnnnnnnnnnnnnnnnnnnnnnnnnnnnnnnnnnnnnnnnnnnnnnnnnnnnnnnnnnnnnnnnnnnnnnnnnnnnnnnnnnnnnnnnnnnnnnnnnnnnnnnnnnnnnnnnnnnnnnnnnnnnnnnnnnnnnnnnnnnnnnnnnnnnnnnnnnnnnnnnnnnnnnnnnnnnnnnnnnnnnnnnnnnnnnnnnnnnnnnnnnnnnnnnnnnnnnnnnnnnnnnnnnnnnnnnnnnnnnnnnnnnnnnnnnnnnnnnnnnnnnnnnnnnnnnnnnnnnnnnnnnnnnnnnnnnnnnnnnnnnnnnnnnnnnnnnnnnnnnnnnnnnnnnnnnnnnnnnnnnnnnnnnnnnnnnnnnnnnnnnnnnnnnnnnnnnnnnnnnnnnnnnnnnnnnnnnnnnnnnnnnnnnnnnnnnnnnnnnnnnnnnnnnnnnnnnnnnnnnnnnnnnnnnnnnnnnnnnnnnnnnnnnnnnnnnnnnnnnnnnnnnnnnnnnnnnnnnnnnnnnnnnnnnnnnnnnnnnnnnnnnnnnnnnnnnnnnnnnnnnnnnnnnnnnnnnnnnnnnnnnnnnnnnnnnnnnnnnnnnnnnnnnnnnnnnnnnnnnnnnnnnnnnnnnnnnnnnnnnnnnnnnnnnnnnnnnnnnnnnnnnnnnnnnnnnnnnnnnnnnnnnnnnnnnnnnnnnnnnnnnnnnnnnnnnnnnnnnnnnnnnnnnnnnnnnnnnnnnnnnnnnnnnnnnnnnnnnnnnnnnnnnnnnnnnnnnnnnnnnnnnnnnnnnnnnnnnnnnnnnnnnnnnnnnnnnnnnnnnnnnnnnnnnnnnnnnnnnnnnnnnnnnnnnnnnnnnnnnnnnnnnnnnnnnnnnnnnnnnnnnnnnnnnnnnnnnnnnnnnnnnnnnnnnnnnnnnnnnnnnnnnnnnnnnnnnnnnnnnnnnnnnnnnnnnnnnnnnnnnnnnnnnnnnnnnnnnnnnnnnnnnnnnnnnnnnnnnnnnnnnnnnnnnnnnnnnnnnnnnnnnnnnnnnnnnnnnnnnnnnnnnnnnnnnnnnnnnnnnnnnnnnnnnnnnnnnnnnnnnnnnnnnnnnnnnnnnnnnnnnnnnnnnnnnnnnnnnnnnnnnnnnnnnnnnnnnnnnnnnnnnnnnnnnnnnnnnnnnnnnnnnnnnnnnnnnnnnnnnnnnnnnnnnnnnnnnnnnnnnnnnnnnnnnnnnnnnnnnnnnnnnnnnnnnnnnnnnnnnnnnnnnnnnnnnnnnnnnnnnnnnnnnnnnnnnnnnnnnnnnnnnnnnnnnnnnnnnnnnnnnnnnnnnnnnnnnnnnnnnnnnnnnnnnnnnnnnnnnnnnnnnnnnnnnnnnnnnnnnnnnnnnnnnnnnnnnnnnnnnnnnnnnnnnnnnnnnnnnnnnnnnnnnnnnnnnnnnnnnnnnnnnnnnnnnnnnnnnnnnnnnnnnnnnnnnnnnnnnnnnnnnnnnnnnnnnnnnnnnnnnnnnnnnnnnnnnnnnnnnnnnnnnnnnnnnnnnnnnnnnnnnnnnnnnnnnnnnnnnnnnnnnnnnnnnnnnnnnnnnnnnnnnnnnnnnnnnnnnnnnnnnnnnnnnnnnnnnnnnnnnnnnnnnnnnnnnnnnnnnnnnnnnnnnnnnnnnnnnnnnnnnnnnnnnnnnnnnnnnnnnnnnnnnnnnnnnnnnnnnnnnnnnnnnnnnnnnnnnnnnnnnnnnnnnnnnnnnnnnnnnnnnnnnnnnnnnnnnnnnnnnnnnnnnnnnnnnnnnnnnnnnnnnnnnnnnnnnnnnnnnnnnnnnnnnnnnnnnnnnnnnnnnnnnnnnnnnnnnnnnnnnnnnnnnnnnnnnnnnnnnnnnnnnnnnnnnnnnnnnnnnnnnnnnnnnnnnnnnnnnnnnnnnnnnnnnnnnnnnnnnnnnnnnnnnnnnnnnnnnnnnnnnnnnnnnnnnnnnnnnnnnnnnnnnnnnnnnnnnnnnnnnnnnnnnnnnnnnnnnnnnnnnnnnnnnnnnnnnnnnnnnnnnnnnnnnnnnnnnnnnnnnnnnnnnnnnnnnnnnnnnnnnnnnnnnnnnnnnnnnnnnnnnnnnnnnnnnnnnnnnnnnnnnnnnnnnnnnnnnnnnnnnnnnnnnnnnnnnnnnnnnnnnnnnnnnnnnnnnnnnnnnnnnnnnnnnnnnnnnnnnnnnnnnnnnnnnnnnnnnnnnnnnnnnnnnnnnnnnnnnnnnnnnnnnnnnnnnnnnnnnnnnnnnnnnnnnnnnnnnnnnnnnnnnnnnnnnnnnnnnnnnnnnnnnnnnnnnnnnnnnnnnnnnnnnnnnnnnnnnnnnnnnnnnnnnnnnnnnnnnnnnnnnnnnnnnnnnnnnnnnnnnnnnnnnnnnnnnnnnnnnnnnnnnnnnnnnnnnnnnnnnnnnnnnnnnnnnnnnnnnnnnnnnnnnnnnnnnnnnnnnnnnnnnnnnnnnnnnnnnnnnnnnnnnnnnnnnnnnnnnnnnnnnnnnnnnnnnnnnnnnnnnnnnnnnnnnnnnnnnnnnnnnnnnnnnnnnnnnnnnnnnnnnnnnnnnnnnnnnnnnnnnnnnnnnnnnnnnnnnnnnnnnnnnnnnnnnnnnnnnnnnnnnnnnnnnnnnnnnnnnnnnnnnnnnnnnnnnnnnnnnnnnnnnnnnnnnnnnnnnnnnnnnnnnnnnnnnnnnnnnnnnnnnnnnnnnnnnnnnnnnnnnnnnnnnnnnnnnnnnnnnnnnnnnnnnnnnnnnnnnnnnnnnnnnnnnnnnnnnnnnnnnnnnnnnnnnnnnnnnnnnnnnnnnnnnnnnnnnnnnnnnnnnnnnnnnnnnnnnnnnnnnnnnnnnnnnnnnnnnnnnnnnnnnnnnnnnnnnnnnnnnnnnnnnnnnnnnnnnnnnnnnnnnnnnnnnnnnnnnnnnnnnnnnnnnnnnnnnnnnnnnnnnnnnnnnnnnnnnnnnnnnnnnnnnnnnnnnnnnnnnnnnnnnnnnnnnnnnnnnnnnnnnnnnnnnnnnnnnnnnnnnnnnnnnnnnnnnnnnnnnnnnnnnnnnnnnnnnnnnnnnnnnnnnnnnnnnnnnnnnnnnnnnnnnnnnnnnnnnnnnnnnnnnnnnnnnnnnnnnnnnnnnnnnnnnnnnnnnnnnnnnnnnnnnnnnnnnnnnnnnnnnnnnnnnnnnnnnnnnnnnnnnnnnnnnnnnnnnnnnnnnnnnnnnnnnnnnnnnnnnnnnnnnnnnnnnnnnnnnnnnnnnnnnnnnnnnnnnnnnnnnnnnnnnnnnnnnnnnnnnnnnnnnnnnnnnnnnnnnnnnnnnnnnnnnnnnnnnnnnnnnnnnnnnnnnnnnnnnnnnnnnnnnnnnnnnnnnnnnnnnnnnnnnnnnnnnnnnnnnnnnnnnnnnnnnnnnnnnnnnnnnnnnnnnnnnnnnnnnnnnnnnnnnnnnnnnnnnnnnnnnnnnnnnnnnnnnnnnnnnnnnnnnnnnnnnnnnnnnnnnnnnnnnnnnnnnnnnnnnnnnnnnnnnnnnnnnnnnnnnnnnnnnnnnnnnnnnnnnnnnnnnnnnnnnnnnnnnnnnnnnnnnnnnnnnnnnnnnnnnnnnnnnnnnnnnnnnnnnnnnnnnnnnnnnnnnnnnnnnnnnnnnnnnnnnnnnnnnnnnnnnnnnnnnnnnnnnnnnnnnnnnnnnnnnnnnnnnnnnnnnnnnnnnnnnnnnnnnnnnnnnnnnnnnnnnnnnnnnnnnnnnnnnnnnnnnnnnnnnnnnnnnnnnnnnnnnnnnnnnnnnnnnnnnnnnnnnnnnnnnnnnnnnnnnnnnnnnnnnnnnnnnnnnnnnnnnnnnnnnnnnnnnnnnnnnnnnnnnnnnnnnnnnnnnnnnnnnnnnnnnnnnnnnnnnnnnnnnnnnnnnnnnnnnnnnnnnnnnnnnnnnnnnnnnnnnnnnnnnnnnnnnnnnnnnnnnnnnnnnnnnnnnnnnnnnnnnnnnnnnnnnnnnnnnnnnnnnnnnnnnnnnnnnnnnnnnnnnnnnnnnnnnnnnnnnnnnnnnnnnnnnnnnnnnnnnnnnnnnnnnnnnnnnnnnnnnnnnnnnnnnnnnnnnnnnnnnnnnnnnnnnnnnnnnnnnnnnnnnnnnnnnnnnnnnnnnnnnnnnnnnnnnnnnnnnnnnnnnnnnnnnnnnnnnnnnnnnnnnnnnnnnnnnnnnnnnnnnnnnnnnnnnnnnnnnnnnnnnnnnnnnnnnnnnnnnnnnnnnnnnnnnnnnnnnnnnnnnnnnnnnnnnnnnnnnnnnnnnnnnnnnnnnnnnnnnnnnnnnnnnnnnnnnnnnnnnnnnnnnnnnnnnnnnnnnnnnnnnnnnnnnnnnnnnnnnnnnnnnnnnnnnnnnnnnnnnnnnnnnnnnnnnnnnnnnnnnnnnnnnnnnnnnnnnnnnnnnnnnnnnnnnnnnnnnnnnnnnnnnnnnnnnnnnnnnnnnnnnnnnnnnnnnnnnnnnnnnnnnnnnnnnnnnnnnnnnnnnnnnnnnnnnnnnnnnnnnnnnnnnnnnnnnnnnnnnnnnnnnnnnnnnnnnnnnnnnnnnnnnnnnnnnnnnnnnnnnnnnnnnnnnnnnnnnnnnnnnnnnnnnnnnnnnnnnnnnnnnnnnnnnnnnnnnnnnnnnnnnnnnnnnnnnnnnnnnnnnnnnnnnnnnnnnnnnnnnnnnnnnnnnnnnnnnnnnnnnnnnnnnnnnnnnnnnnnnnnnnnnnnnnnnnnnnnnnnnnnnnnnnnnnnnnnnnnnnnnnnnnnnnnnnnnnnnnnnnnnnnnnnnnnnnnnnnnnnnnnnnnnnnnnnnnnnnnnnnnnnnnnnnnnnnnnnnnnnnnnnnnnnnnnnnnnnnnnnnnnnnnnnnnnnnnnnnnnnnnnnnnnnnnnnnnnnnnnnnnnnnnnnnnnnnnnnnnnnnnnnnnnnnnnnnnnnnnnnnnnnnnnnnnnnnnnnnnnnnnnnnnnnnnnnnnnnnnnnnnnnnnnnnnnnnnnnnnnnnnnnnnnnnnnnnnnnnnnnnnnnnnnnnnnnnnnnnnnnnnnnnnnnnnnnnnnnnnnnnnnnnnnnnnnnnnnnnnnnnnnnnnnnnnnnnnnnnnnnnnnnnnnnnnnnnnnnnnnnnnnnnnnnnnnnnnnnnnnnnnnnnnnnnnnnnnnnnnnnnnnnnnnnnnnnnnnnnnnnnnnnnnnnnnnnnnnnnnnnnnnnnnnnnnnnnnnnnnnnnnnnnnnnnnnnnnnnnnnnnnnnnnnnnnnnnnnnnnnnnnnnnnnnnnnnnnnnnnnnnnnnnnnnnnnnnnnnnnnnnnnnnnnnnnnnnnnnnnnnnnnnnnnnnnnnnnnnnnnnnnnnnnnnnnnnnnnnnnnnnnnnnnnnnnnnnnnnnnnnnnnnnnnnnnnnnnnnnnnnnnnnnnnnnnnnnnnnnnnnnnnnnnnnnnnnnnnnnnnnnnnnnnnnnnnnnnnnnnnnnnnnnnnnnnnnnnnnnnnnnnnnnnnnnnnnnnnnnnnnnnnnnnnnnnnnnnnnnnnnnnnnnnnnnnnnnnnnnnnnnnnnnnnnnnnnnnnnnnnnnnnnnnnnnnnnnnnnnnnnnnnnnnnnnnnnnnnnnnnnnnnnnnnnnnnnnnnnnnnnnnnnnnnnnnnnnnnnnnnnnnnnnnnnnnnnnnnnnnnnnnnnnnnnnnnnnnnnnnnnnnnnnnnnnnnnnnnnnnnnnnnnnnnnnnnnnnnnnnnnnnnnnnnnnnnnnnnnnnnnnnnnnnnnnnnnnnnnnnnnnnnnnnnnnnnnnnnnnnnnnnnnnnnnnnnnnnnnnnnnnnnnnnnnnnnnnnnnnnnnnnnnnnnnnnnnnnnnnnnnnnnnnnnnnnnnnnnnnnnnnnnnnnnnnnnnnnnnnnnnnnnnnnnnnnnnnnnnnnnnnnnnnnnnnnnnnnnnnnnnnnnnnnnnnnnnnnnnnnnnnnnnnnnnnnnnnnnnnnnnnnnnnnnnnnnnnnnnnnnnnnnnnnnnnnnnnnnnnnnnnnnnnnnnnnnnnnnnnnnnnnnnnnnnnnnnnnnnnnnnnnnnnnnnnnnnnnnnnnnnnnnnnnnnnnnnnnnnnnnnnnnnnnnnnnnnnnnnnnnnnnnnnnnnnnnnnnnnnnnnnnnnnnnnnnnnnnnnnnnnnnnnnnnnnnnnnnnnnnnnnnnnnnnnnnnnnnnnnnnnnnnnnnnnnnnnnnnnnnnnnnnnnnnnnnnnnnnnnnnnnnnnnnnnnnnnnnnnnnnnnnnnnnnnnnnnnnnnnnnnnnnnnnnnnnnnnnnnnnnnnnnnnnnnnnnnnnnnnnnnnnnnnnnnnnnnnnnnnnnnnnnnnnnnnnnnnnnnnnnnnnnnnnnnnnnnnnnnnnnnnnnnnnnnnnnnnnnnnnnnnnnnnnnnnnnnnnnnnnnnnnnnnnnnnnnnnnnnnnnnnnnnnnnnnnnnnnnnnnnnnnnnnnnnnnnnnnnnnnnnnnnnnnnnnnnnnnnnnnnnnnnnnnnnnnnnnnnnnnnnnnnnnnnnnnnnnnnnnnnnnnnnnnnnnnnnnnnnnnnnnnnnnnnnnnnnnnnnnnnnnnnnnnnnnnnnnnnnnnnnnnnnnnnnnnnnnnnnnnnnnnnnnnnnnnnnnnnnnnnnnnnnnnnnnnnnnnnnnnnnnnnnnnnnnnnnnnnnnnnnnnnnnnnnnnnnnnnnnnnnnnnnnnnnnnnnnnnnnnnnnnnnnnnnnnnnnnnnnnnnnnnnnnnnnnnnnnnnnnnnnnnnnnnnnnnnnnnnnnnnnnnnnnnnnnnnnnnnnnnnnnnnnnnnnnnnnnnnnnnnnnnnnnnnnnnnnnnnnnnnnnnnnnnnnnnnnnnnnnnnnnnnnnnnnnnnnnnnnnnnnnnnnnnnnnnnnnnnnnnnnnnnnnnnnnnnnnnnnnnnnnnnnnnnnnnnnnnnnnnnnnnnnnnnnnnnnnnnnnnnnnnnnnnnnnnnnnnnnnnnnnnnnnnnnnnnnnnnnnnnnnnnnnnnnnnnnnnnnnnnnnnnnnnnnnnnnnnnnnnnnnnnnnnnnnnnnnnnnnnnnnnnnnnnnnnnnnnnnnnnnnnnnnnnnnnnnnnnnnnnnnnnnnnnnnnnnnnnnnnnnnnnnnnnnnnnnnnnnnnnnnnnnnnnnnnnnnnnnnnnnnnnnnnnnnnnnnnnnnnnnnnnnnnnnnnnnnnnnnnnnnnnnnnnnnnnnnnnnnnnnnnnnnnnnnnnnnnnnnnnnnnnnnnnnnnnnnnnnnnnnnnnnnnnnnnnnnnnnnnnnnnnnnnnnnnnnnnnnnnnnnnnnnnnnnnnnnnnnnnnnnnnnnnnnnnnnnnnnnnnnnnnnnnnnnnnnnnnnnnnnnnnnnnnnnnnnnnnnnnnnnnnnnnnnnnnnnnnnnnnnnnnnnnnnnnnnnnnnnnnnnnnnnnnnnnnnnnnnnnnnnnnnnnnnnnnnnnnnnnnnnnnnnnnnnnnnnnnnnnnnnnnnnnnnnnnnnnnnnnnnnnnnnnnnnnnnnnnnnnnnnnnnnnnnnnnnnnnnnnnnnnnnnnnnnnnnnnnnnnnnnnnnnnnnnnnnnnnnnnnnnnnnnnnnnnnnnnnnnnnnnnnnnnnnnnnnnnnnnnnnnnnnnnnnnnnnnnnnnnnnnnnnnnnnnnnnnnnnnnnnnnnnnnnnnnnnnnnnnnnnnnnnnnnnnnnnnnnnnnnnnnnnnnnnnnnnnnnnnnnnnnnnnnnnnnnnnnnnnnnnnnnnnnnnnnnnnnnnnnnnnnnnnnnnnnnnnnnnnnnnnnnnnnnnnnnnnnnnnnnnnnnnnnnnnnnnnnnnnnnnnnnnnnnnnnnnnnnnnnnnnnnnnnnnnnnnnnnnnnnnnnnnnnnnnnnnnnnnnnnnnnnnnnnnnnnnnnnnnnnnnnnnnnnnnnnnnnnnnnnnnnnnnnnnnnnnnnnnnnnnnnnnnnnnnnnnnnnnnnnnnnnnnnnnnnnnnnnnnnnnnnnnnnnnnnnnnnnnnnnnnnnnnnnnnnnnnnnnnnnnnnnnnnnnnnnnnnnnnnnnnnnnnnnnnnnnnnnnnnnnnnnnnnnnnnnnnnnnnnnnnnnnnnnnnnnnnnnnnnnnnnnnnnnnnnnnnnnnnnnnnnnnnnnnnnnnnnnnnnnnnnnnnnnnnnnnnnnnnnnnnnnnnnnnnnnnnnnnnnnnnnnnnnnnnnnnnnnnnnnnnnnnnnnnnnnnnnnnnnnnnnnnnnnnnnnnnnnnnnnnnnnnnnnnnnnnnnnnnnnnnnnnnnnnnnnnnnnnnnnnnnnnnnnnnnnnnnnnnnnnnnnnnnnnnnnnnnnnnnnnnnnnnnnnnnnnnnnnnnnnnnnnnnnnnnnnnnnnnnnnnnnnnnnnnnnnnnnnnnnnnnnnnnnnnnnnnnnnnnnnnnnnnnnnnnnnnnnnnnnnnnnnnnnnnnnnnnnnnnnnnnnnnnnnnnnnnnnnnnnnnnnnnnnnnnnnnnnnnnnnnnnnnnnnnnnnnnnnnnnnnnnnnnnnnnnnnnnnnnnnnnnnnnnnnnnnnnnnnnnnnnnnnnnnnnnnnnnnnnnnnnnnnnnnnnnnnnnnnnnnnnnnnnnnnnnnnnnnnnnnnnnnnnnnnnnnnnnnnnnnnnnnnnnnnnnnnnnnnnnnnnnnnnnnnnnnnnnnnnnnnnnnnnnnnnnnnnnnnnnnnnnnnnnnnnnnnnnnnnnnnnnnnnnnnnnnnnnnnnnnnnnnnnnnnnnnnnnnnnnnnnnnnnnnnnnnnnnnnnnnnnnnnnnnnnnnnnnnnnnnnnnnnnnnnnnnnnnnnnnnnnnnnnnnnnnnnnnnnnnnnnnnnnnnnnnnnnnnnnnnnnnnnnnnnnnnnnnnnnnnnnnnnnnnnnnnnnnnnnnnnnnnnnnnnnnnnnnnnnnnnnnnnnnnnnnnnnnnnnnnnnnnnnnnnnnnnnnnnnnnnnnnnnnnnnnnnnnnnnnnnnnnnnnnnnnnnnnnnnnnnnnnnnnnnnnnnnnnnnnnnnnnnnnnnnnnnnnnnnnnnnnnnnnnnnnnnnnnnnnnnnnnnnnnnnnnnnnnnnnnnnnnnnnnnnnnnnnnnnnnnnnnnnnnnnnnnnnnnnnnnnnnnnnnnnnnnnnnnnnnnnnnnnnnnnnnnnnnnnnnnnnnnnnnnnnnnnnnnnnnnnnnnnnnnnnnnnnnnnnnnnnnnnnnnnnnnnnnnnnnnnnnnnnnnnnnnnnnnnnnnnnnnnnnnnnnnnnnnnnnnnnnnnnnnnnnnnnnnnnnnnnnnnnnnnnnnnnnnnnnnnnnnnnnnnnnnnnnnnnnnnnnnnnnnnnnnnnnnnnnnnnnnnnnnnnnnnnnnnnnnnnnnnnnnnnnnnnnnnnnnnnnnnnnnnnnnnnnnnnnnnnnnnnnnnnnnnnnnnnnnnnnnnnnnnnnnnnnnnnnnnnnnnnnnnnnnnnnnnnnnnnnnnnnnnnnnnnnnnnnnnnnnnnnnnnnnnnnnnnnnnnnnnnnnnnnnnnnnnnnnnnnnnnnnnnnnnnnnnnnnnnnnnnnnnnnnnnnnnnnnnnnnnnnnnnnnnnnnnnnnnnnnnnnnnnnnnnnnnnnnnnnnnnnnnnnnnnnnnnnnnnnnnnnnnnnnnnnnnnnnnnnnnnnnnnnnnnnnnnnnnnnnnnnnnnnnnnnnnnnnnnnnnnnnnnnnnnnnnnnnnnnnnnnnnnnnnnnnnnnnnnnnnnnnnnnnnnnnnnnnnnnnnnnnnnnnnnnnnnnnnnnnnnnnnnnnnnnnnnnnnnnnnnnnnnnnnnnnnnnnnnnnnnnnnnnnnnnnnnnnnnnnnnnnnnnnnnnnnnnnnnnnnnnnnnnnnnnnnnnnnnnnnnnnnnnnnnnnnnnnnnnnnnnnnnnnnnnnnnnnnnnnnnnnnnnnnnnnnnnnnnnnnnnnnnnnnnnnnnnnnnnnnnnnnnnnnnnnnnnnnnnnnnnnnnnnnnnnnnnnnnnnnnnnnnnnnnnnnnnnnnnnnnnnnnnnnnnnnnnnnnnnnnnnnnnnnnnnnnnnnnnnnnnnnnnnnnnnnnnnnnnnnnnnnnnnnnnnnnnnnnnnnnnnnnnnnnnnnnnnnnnnnnnnnnnnnnnnnnnnnnnnnnnnnnnnnnnnnnnnnnnnnnnnnnnnnnnnnnnnnnnnnnnnnnnnnnnnnnnnnnnnnnnnnnnnnnnnnnnnnnnnnnnnnnnnnnnnnnnnnnnnnnnnnnnnnnnnnnnnnnnnnnnnnnnnnnnnnnnnnnnnnnnnnnnnnnnnnnnnnnnnnnnnnnnnnnnnnnnnnnnnnnnnnnnnnnnnnnnnnnnnnnnnnnnnnnnnnnnnnnnnnnnnnnnnnnnnnnnnnnnnnnnnnnnnnnnnnnnnnnnnnnnnnnnnnnnnnnnnnnnnnnnnnnnnnnnnnnnnnnnnnnnnnnnnnnnnnnnnnnnnnnnnnnnnnnnnnnnnnnnnnnnnnnnnnnnnnnnnnnnnnnnnnnnnnnnnnnnnnnnnnnnnnnnnnnnnnnnnnnnnnnnnnnnnnnnnnnnnnnnnnnnnnnnnnnnnnnnnnnnnnnnnnnnnnnnnnnnnnnnnnnnnnnnnnnnnnnnnnnnnnnnnnnnnnnnnnnnnnnnnnnnnnnnnnnnnnnnnnnnnnnnnnnnnnnnnnnnnnnnnnnnnnnnnnnnnnnnnnnnnnnnnnnnnnnnnnnnnnnnnnnnnnnnnnnnnnnnnnnnnnnnnnnnnnnnnnnnnnnnnnnnnnnnnnnnnnnnnnnnnnnnnnnnnnnnnnnnnnnnnnnnnnnnnnnnnnnnnnnnnnnnnnnnnnnnnnnnnnnnnnnnnnnnnnnnnnnnnnnnnnnnnnnnnnnnnnnnnnnnnnnnnnnnnnnnnnnnnnnnnnnnnnnnnnnnnnnnnnnnnnnnnnnnnnnnnnnnnnnnnnnnnnnnnnnnnnnnnnnnnnnnnnnnnnnnnnnnnnnnnnnnnnnnnnnnnnnnnnnnnnnnnnnnnnnnnnnnnnnnnnnnnnnnnnnnnnnnnnnnnnnnnnnnnnnnnnnnnnnnnnnnnnnnnnnnnnnnnnnnnnnnnnnnnnnnnnnnnnnnnnnnnnnnnnnnnnnnnnnnnnnnnnnnnnnnnnnnnnnnnnnnnnnnnnnnnnnnnnnnnnnnnnnnnnnnnnnnnnnnnnnnnnnnnnnnnnnnnnnnnnnnnnnnnnnnnnnnnnnnnnnnnnnnnnnnnnnnnnnnnnnnnnnnnnnnnnnnnnnnnnnnnnnnnnnnnnnnnnnnnnnnnnnnnnnnnnnnnnnnnnnnnnnnnnnnnnnnnnnnnnnnnnnnnnnnnnnnnnnnnnnnnnnnnnnnnnnnnnnnnnnnnnnnnnnnnnnnnnnnnnnnnnnnnnnnnnnnnnnnnnnnnnnnnnnnnnnnnnnnnnnnnnnnnnnnnnnnnnnnnnnnnnnnnnnnnnnnnnnnnnnnnnnnnnnnnnnnnnnnnnnnnnnnnnnnnnnnnnnnnnnnnnnnnnnnnnnnnnnnnnnnnnnnnnnnnnnnnnnnnnnnnnnnnnnnnnnnnnnnnnnnnnnnnnnnnnnnnnnnnnnnnnnnnnnnnnnnnnnnnnnnnnnnnnnnnnnnnnnnnnnnnnnnnnnnnnnnnnnnnnnnnnnnnnnnnnnnnnnnnnnnnnnnnnnnnnnnnnnnnnnnnnnnnnnnnnnnnnnnnnnnnnnnnnnnnnnnnnnnnnnnnnnnnnnnnnnnnnnnnnnnnnnnnnnnnnnnnnnnnnnnnnnnnnnnnnnnnnnnnnnnnnnnnnnnnnnnnnnnnnnnnnnnnnnnnnnnnnnnnnnnnnnnnnnnnnnnnnnnnnnnnnnnnnnnnnnnnnnnnnnnnnnnnnnnnnnnnnnnnnnnnnnnnnnnnnnnnnnnnnnnnnnnnnnnnnnnnnnnnnnnnnnnnnnnnnnnnnnnnnnnnnnnnnnnnnnnnnnnnnnnnnnnnnnnnnnnnnnnnnnnnnnnnnnnnnnnnnnnnnnnnnnnnnnnnnnnnnnnnnnnnnnnnnnnnnnnnnnnnnnnnnnnnnnnnnnnnnnnnnnnnnnnnnnnnnnnnnnnnnnnnnnnnnnnnnnnnnnnnnnnnnnnnnnnnnnnnnnnnnnnnnnnnnnnnnnnnnnnnnnnnnnnnnnnnnnnnnnnnnnnnnnnnnnnnnnnnnnnnnnnnnnnnnnnnnnnnnnnnnnnnnnnnnnnnnnnnnnnnnnnnnnnnnnnnnnnnnnnnnnnnnnnnnnnnnnnnnnnnnnnnnnnnnnnnnnnnnnnnnnnnnnnnnnnnnnnnnnnnnnnnnnnnnnnnnnnnnnnnnnnnnnnnnnnnnnnnnnnnnnnnnnnnnnnnnnnnnnnnnnnnnnnnnnnnnnnnnnnnnnnnnnnnnnnnnnnnnnnnnnnnnnnnnnnnnnnnnnnnnnnnnnnnnnnnnnnnnnnnnnnnnnnnnnnnnnnnnnnnnnnnnnnnnnnnnnnnnnnnnnnnnnnnnnnnnnnnnnnnnnnnnnnnnnnnnnnnnnnnnnnnnnnnnnnnnnnnnnnnnnnnnnnnnnnnnnnnnnnnnnnnnnnnnnnnnnnnnnnnnnnnnnnnnnnnnnnnnnnnnnnnnnnnnnnnnnnnnnnnnnnnnnnnnnnnnnnnnnnnnnnnnnnnnnnnnnnnnnnnnnnnnnnnnnnnnnnnnnnnnnnnnnnnnnnnnnnnnnnnnnnnnnnnnnnnnnnnnnnnnnnnnnnnnnnnnnnnnnnnnnnnnnnnnnnnnnnnnnnnnnnnnnnnnnnnnnnnnnnnnnnnnnnnnnnnnnnnnnnnnnnnnnnnnnnnnnnnnnnnnnnnnnnnnnnnnnnnnnnnnnnnnnnnnnnnnnnnnnnnnnnnnnnnnnnnnnnnnnnnnnnnnnnnnnnnnnnnnnnnnnnnnnnnnnnnnnnnnnnnnnnnnnnnnnnnnnnnnnnnnnnnnnnnnnnnnnnnnnnnnnnnnnnnnnnnnnnnnnnnnnnnnnnnnnnnnnnnnnnnnnnnnnnnnnnnnnnnnnnnnnnnnnnnnnnnnnnnnnnnnnnnnnnnnnnnnnnnnnnnnnnnnnnnnnnnnnnnnnnnnnnnnnnnnnnnnnnnnnnnnnnnnnnnnnnnnnnnnnnnnnnnnnnnnnnnnnnnnnnnnnnnnnnnnnnnnnnnnnnnnnnnnnnnnnnnnnnnnnnnnnnnnnnnnnnnnnnnnnnnnnnnnnnnnnnnnnnnnnnnnnnnnnnnnnnnnnnnnnnnnnnnnnnnnnnnnnnnnnnnnnnnnnnnnnnnnnnnnnnnnnnnnnnnnnnnnnnnnnnnnnnnnnnnnnnnnnnnnnnnnnnnnnnnnnnnnnnnnnnnnnnnnnnnnnnnnnnnnnnnnnnnnnnnnnnnnnnnnnnnnnnnnnnnnnnnnnnnnnnnnnnnnnnnnnnnnnnnnnnnnnnnnnnnnnnnnnnnnnnnnnnnnnnnnnnnnnnnnnnnnnnnnnnnnnnnnnnnnnnnnnnnnnnnnnnnnnnnnnnnnnnnnnnnnnnnnnnnnnnnnnnnnnnnnnnnnnnnnnnnnnnnnnnnnnnnnnnnnnnnnnnnnnnnnnnnnnnnnnnnnnnnnnnnnnnnnnnnnnnnnnnnnnnnnnnnnnnnnnnnnnnnnnnnnnnnnnnnnnnnnnnnnnnnnnnnnnnnnnnnnnnnnnnnnnnnnnnnnnnnnnnnnnnnnnnnnnnnnnnnnnnnnnnnnnnnnnnnnnnnnnnnnnnnnnnnnnnnnnnnnnnnnnnnnnnnnnnnnnnnnnnnnnnnnnnnnnnnnnnnnnnnnnnnnnnnnnnnnnnnnnnnnnnnnnnnnnnnnnnnnnnnnnnnnnnnnnnnnnnnnnnnnnnnnnnnnnnnnnnnnnnnnnnnnnnnnnnnnnnnnnnnnnnnnnnnnnnnnnnnnnnnnnnnnnnnnnnnnnnnnnnnnnnnnnnnnnnnnnnnnnnnnnnnnnnnnnnnnnnnnnnnnnnnnnnnnnnnnnnnnnnnnnnnnnnnnnnnnnnnnnnnnnnnnnnnnnnnnnnnnnnnnnnnnnnnnnnnnnnnnnnnnnnnnnnnnnnnnnnnnnnnnnnnnnnnnnnnnnnnnnnnnnnnnnnnnnnnnnnnnnnnnnnnnnnnnnnnnnnnnnnnnnnnnnnnnnnnnnnnnnnnnnnnnnnnnnnnnnnnnnnnnnnnnnnnnnnnnnnnnnnnnnnnnnnnnnnnnnnnnnnnnnnnnnnnnnnnnnnnnnnnnnnnnnnnnnnnnnnnnnnnnnnnnnnnnnnnnnnnnnnnnnnnnnnnnnnnnnnnnnnnnnnnnnnnnnnnnnnnnnnnnnnnnnnnnnnnnnnnnnnnnnnnnnnnnnnnnnnnnnnnnnnnnnnnnnnnnnnnnnnnnnnnnnnnnnnnnnnnnnnnnnnnnnnnnnnnnnnnnnnnnnnnnnnnnnnnnnnnnnnnnnnnnnnnnnnnnnnnnnnnnnnnnnnnnnnnnnnnnnnnnnnnnnnnnnnnnnnnnnnnnnnnnnnnnnnnnnnnnnnnnnnnnnnnnnnnnnnnnnnnnnnnnnnnnnnnnnnnnnnnnnnnnnnnnnnnnnnnnnnnnnnnnnnnnnnnnnnnnnnnnnnnnnnnnnnnnnnnnnnnnnnnnnnnnnnnnnnnnnnnnnnnnnnnnnnnnnnnnnnnnnnnnnnnnnnnnnnnnnnnnnnnnnnnnnnnnnnnnnnnnnnnnnnnnnnnnnnnnnnnnnnnnnnnnnnnnnnnnnnnnnnnnnnnnnnnnnnnnnnnnnnnnnnnnnnnnnnnnnnnnnnnnnnnnnnnnnnnnnnnnnnnnnnnnnnnnnnnnnnnnnnnnnnnnnnnnnnnnnnnnnnnnnnnnnnnnnnnnnnnnnnnnnnnnnnnnnnnnnnnnnnnnnnnnnnnnnnnnnnnnnnnnnnnnnnnnnnnnnnnnnnnnnnnnnnnnnnnnnnnnnnnnnnnnnnnnnnnnnnnnnnnnnnnnnnnnnnnnnnnnnnnnnnnnnnnnnnnnnnnnnnnnnnnnnnnnnnnnnnnnnnnnnnnnnnnnnnnnnnnnnnnnnnnnnnnnnnnnnnnnnnnnnnnnnnnnnnnnnnnnnnnnnnnnnnnnnnnnnnnnnnnnnnnnnnnnnnnnnnnnnnnnnnnnnnnnnnnnnnnnnnnnnnnnnnnnnnnnnnnnnnnnnnnnnnnnnnnnnnnnnnnnnnnnnnnnnnnnnnnnnnnnnnnnnnnnnnnnnnnnnnnnnnnnnnnnnnnnnnnnnnnnnnnnnnnnnnnnnnnnnnnnnnnnnnnnnnnnnnnnnnnnnnnnnnnnnnnnnnnnnnnnnnnnnnnnnnnnnnnnnnnnnnnnnnnnnnnnnnnnnnnnnnnnnnnnnnnnnnnnnnnnnnnnnnnnnnnnnnnnnnnnnnnnnnnnnnnnnnnnnnnnnnnnnnnnnnnnnnnnnnnnnnnnnnnnnnnnnnnnnnnnnnnnnnnnnnnnnnnnnnnnnnnnnnnnnnnnnnnnnnnnnnnnnnnnnnnnnnnnnnnnnnnnnnnnnnnnnnnnnnnnnnnnnnnnnnnnnnnnnnnnnnnnnnnnnnnnnnnnnnnnnnnnnnnnnnnnnnnnnnnnnnnnnnnnnnnnnnnnnnnnnnnnnnnnnnnnnnnnnnnnnnnnnnnnnnnnnnnnnnnnnnnnnnnnnnnnnnnnnnnnnnnnnnnnnnnnnnnnnnnnnnnnnnnnnnnnnnnnnnnnnnnnnnnnnnnnnnnnnnnnnnnnnnnnnnnnnnnnnnnnnnnnnnnnnnnnnnnnnnnnnnnnnnnnnnnnnnnnnnnnnnnnnnnnnnnnnnnnnnnnnnnnnnnnnnnnnnnnnnnnnnnnnnnnnnnnnnnnnnnnnnnnnnnnnnnnnnnnnnnnnnnnnnnnnnnnnnnnnnnnnnnnnnnnnnnnnnnnnnnnnnnnnnnnnnnnnnnnnnnnnnnnnnnnnnnnnnnnnnnnnnnnnnnnnnnnnnnnnnnnnnnnnnnnnnnnnnnnnnnnnnnnnnnnnnnnnnnnnnnnnnnnnnnnnnnnnnnnnnnnnnnnnnnnnnnnnnnnnnnnnnnnnnnnnnnnnnnnnnnnnnnnnnnnnnnnnnnnnnnnnnnnnnnnnnnnnnnnnnnnnnnnnnnnnnnnnnnnnnnnnnnnnnnnnnnnnnnnnnnnnnnnnnnnnnnnnnnnnnnnnnnnnnnnnnnnnnnnnnnnnnnnnnnnnnnnnnnnnnnnnnnnnnnnnnnnnnnnnnnnnnnnnnnnnnnnnnnnnnnnnnnnnnnnnnnnnnnnnnnnnnnnnnnnnnnnnnnnnnnnnnnnnnnnnnnnnnnnnnnnnnnnnnnnnnnnnnnnnnnnnnnnnnnnnnnnnnnnnnnnnnnnnnnnnnnnnnnnnnnnnnnnnnnnnnnnnnnnnnnnnnnnnnnnnnnnnnnnnnnnnnnnnnnnnnnnnnnnnnnnnnnnnnnnnnnnnnnnnnnnnnnnnnnnnnnnnnnnnnnnnnnnnnnnnnnnnnnnnnnnnnnnnnnnnnnnnnnnnnnnnnnnnnnnnnnnnnnnnnnnnnnnnnnnnnnnnnnnnnnnnnnnnnnnnnnnnnnnnnnnnnnnnnnnnnnnnnnnnnnnnnnnnnnnnnnnnnnnnnnnnnnnnnnnnnnnnnnnnnnnnnnnnnnnnnnnnnnnnnnnnnnnnnnnnnnnnnnnnnnnnnnnnnnnnnnnnnnnnnnnnnnnnnnnnnnnnnnnnnnnnnnnnnnnnnnnnnnnnnnnnnnnnnnnnnnnnnnnnnnnnnnnnnnnnnnnnnnnnnnnnnnnnnnnnnnnnnnnnnnnnnnnnnnnnnnnnnnnnnnnnnnnnnnnnnnnnnnnnnnnnnnnnnnnnnnnnnnnnnnnnnnnnnnnnnnnnnnnnnnnnnnnnnnnnnnnnnnnnnnnnnnnnnnnnnnnnnnnnnnnnnnnnnnnnnnnnnnnnnnnnnnnnnnnnnnnnnnnnnnnnnnnnnnnnnnnnnnnnnnnnnnnnnnnnnnnnnnnnnnnnnnnnnnnnnnnnnnnnnnnnnnnnnnnnnnnnnnnnnnnnnnnnnnnnnnnnnnnnnnnnnnnnnnnnnnnnnnnnnnnnnnnnnnnnnnnnnnnnnnnnnnnnnnnnnnnnnnnnnnnnnnnnnnnnnnnnnnnnnnnnnnnnnnnnnnnnnnnnnnnnnnnnnnnnnnnnnnnnnnnnnnnnnnnnnnnnnnnnnnnnnnnnnnnnnnnnnnnnnnnnnnnnnnnnnnnnnnnnnnnnnnnnnnnnnnnnnnnnnnnnnnnnnnnnnnnnnnnnnnnnnnnnnnnnnnnnnnnnnnnnnnnnnnnnnnnnnnnnnnnnnnnnnnnnnnnnnnnnnnnnnnnnnnnnnnnnnnnnnnnnnnnnnnnnnnnnnnnnnnnnnnnnnnnnnnnnnnnnnnnnnnnnnnnnnnnnnnnnnnnnnnnnnnnnnnnnnnnnnnnnnnnnnnnnnnnnnnnnnnnnnnnnnnnnnnnnnnnnnnnnnnnnnnnnnnnnnnnnnnnnnnnnnnnnnnnnnnnnnnnnnnnnnnnnnnnnnnnnnnnnnnnnnnnnnnnnnnnnnnnnnnnnnnnnnnnnnnnnnnnnnnnnnnnnnnnnnnnnnnnnnnnnnnnnnnnnnnnnnnnnnnnnnnnnnnnnnnnnnnnnnnnnnnnnnnnnnnnnnnnnnnnnnnnnnnnnnnnnnnnnnnnnnnnnnnnnnnnnnnnnnnnnnnnnnnnnnnnnnnnnnnnnnnnnnnnnnnnnnnnnnnnnnnnnnnnnnnnnnnnnnnnnnnnnnnnnnnnnnnnnnnnnnnnnnnnnnnnnnnnnnnnnnnnnnnnnnnnnnnnnnnnnnnnnnnnnnnnnnnnnnnnnnnnnnnnnnnnnnnnnnnnnnnnnnnnnnnnnnnnnnnnnnnnnnnnnnnnnnnnnnnnnnnnnnnnnnnnnnnnnnnnnnnnnnnnnnnnnnnnnnnnnnnnnnnnnnnnnnnnnnnnnnnnnnnnnnnnnnnnnnnnnnnnnnnnnnnnnnnnnnnnnnnnnnnnnnnnnnnnnnnnnnnnnnnnnnnnnnnnnnnnnnnnnnnnnnnnnnnnnnnnnnnnnnnnnnnnnnnnnnnnnnnnnnnnnnnnnnnnnnnnnnnnnnnnnnnnnnnnnnnnnnnnnnnnnnnnnnnnnnnnnnnnnnnnnnnnnnnnnnnnnnnnnnnnnnnnnnnnnnnnnnnnnnnnnnnnnnnnnnnnnnnnnnnnnnnnnnnnnnnnnnnnnnnnnnnnnnnnnnnnnnnnnnnnnnnnnnnnnnnnnnnnnnnnnnnnnnnnnnnnnnnnnnnnnnnnnnnnnnnnnnnnnnnnnnnnnnnnnnnnnnnnnnnnnnnnnnnnnnnnnnnnnnnnnnnnnnnnnnnnnnnnnnnnnnnnnnnnnnnnnnnnnnnnnnnnnnnnnnnnnnnnnnnnnnnnnnnnnnnnnnnnnnnnnnnnnnnnnnnnnnnnnnnnnnnnnnnnnnnnnnnnnnnnnnnnnnnnnnnnnnnnnnnnnnnnnnnnnnnnnnnnnnnnnnnnnnnnnnnnnnnnnnnnnnnnnnnnnnnnnnnnnnnnnnnnnnnnnnnnnnnnnnnnnnnnnnnnnnnnnnnnnnnnnnnnnnnnnnnnnnnnnnnnnnnnnnnnnnnnnnnnnnnnnnnnnnnnnnnnnnnnnnnnnnnnnnnnnnnnnnnnnnnnnnnnnnnnnnnnnnnnnnnnnnnnnnnnnnnnnnnnnnnnnnnnnnnnnnnnnnnnnnnnnnnnnnnnnnnnnnnnnnnnnnnnnnnnnnnnnnnnnnnnnnnnnnnnnnnnnnnnnnnnnnnnnnnnnnnnnnnnnnnnnnnnnnnnnnnnnnnnnnnnnnnnnnnnnnnnnnnnnnnnnnnnnnnnnnnnnnnnnnnnnnnnnnnnnnnnnnnnnnnnnnnccggtgaggacccatcattggtccggtgtcgggacctgtctgaagaattacatcatgtttgtccccgatccatcctcttaccacgatgagggttgttcgcccctgggtaaaatatggacctatcccattgtaaagggaaagacccgcctgaacattctcagtgcccttaccccccagttttatggaaggggagccagtttctttgaccgaagatatgtctggccctacgggggccttattgtgggaaccgatccagtagcagtagacgccataggcgctcatctgcttcaggcaaagcggatcgcctttttcggcgaagaccgggctctggatgttccccccacccatattatggtggctgataaaacatatcacctcgggatcagtgacctgagccgcattcagcttatcaaattaggctgggcggatgaattactgatctaagcctcggggagcacggcgcctttgggggacgctcgtccatcgactgcgacccactgtttgggaatacggagggacgtatttgtctcctagccatataagtattttgacagaagacctgttaatgggcgaccccatgaactgatgagatcaataggggcgctgagaaggccaccgggaacccactttttatgtaaaaagccggttcccggcccctccgacaaaaactctaatattttcatgatcaactgtgaatctgttgatccacctcacgcagacgccccaactcctgcggcgtaacgaaaaaatgggaggtttcgagatttcctgaaaatcctttctacaaaaagcgccttgccgtgcactctttccttctatcccagtctaaaatagagcaatcaggcggcgcccgaaaattcaggggtaggtcgggccgtgcccgacaacgcttttatgacctgagattggtagcggccggcgtccatgccaggtcggatattcattccgggaaatcccggtgggtttaggtcgttcatacatcttttctctgtgcgttctccacggtgaatttcccttttcaagggcagatccaccggcgccacccgagaaacgtaccggcaagggcgaagaaggtacgcaacacggttgtgcctcagcagggcgccaataattgtttcctcgccaggagaagtgttttcctcgatagagggcctcttaacgggtgaccccgtaagacgcaactcgtaagagtgaacatacccaagtcctggtgtaggtttccatcgctctaatccggaactttagccctgtacctcggtttacatacagatagaaatttatacatgtatgaagctatttgaggttgctcattaattccggcaggttgacaattgcaaagccggaggccatatcgctgattccgtatggtattaccagcatatcacgatgaataagcgcgccgcaggaatataccacgttgggtacgtagccgcttcgttcttcctcgataggactcataagaggttcctttaatcgcgccaatacttttgaagggtcgttcaaatccagaaggacagctcctatgcaatatttcctcatcggcccaacgccgtgagtaagcagcagccatccttcttccgtcaacagcggggagccgcagtttcccatctgtacgaattcccagtcgtattttggctcaattatccattttgcgttgtcccaggcatgtattgaatcggatttcaggagaaatagattttcgttgtcgattcgtcctatcagcgcatactggccgtcgattcgctttgggaaaaaggccattcctttattcttggcgaatttcccccacataatacgcaccacggcatactcttccggtgaaacttccagaacctgcggcacaatctcccggccgttgtacgcggtgtatgttccgtagaaccttactgtcctgtcttcctcttcgaaccggaccagcctcatatcttccatcccgtgcgattctctggcgcttattggaaaaagcaccatatcttccaggtcgaaaggctgttggacgctgatttcatactcagtttcggccaccgttctcagcagcctcgatattttgtcgtatgatttcaggttttcgtattttggagcaaggcgttcgattgtttcttcgagcatggcaaaagaaaacgtatcgggcagttcggacaataccgcttccgtaaattcattctttatggccaagttgtcgagctcttcgtgagcagcggcctttttaaatttgcggtctttttctcttttgaaaggtcgtgcccgcagagtggcgggatgaattttgatattgcctttctcgtcgattgagcctctccggaaaataatggaggaaatgtggccttcgccgaccgctctcaaactcattataaatgcaagtgaaccgtccggcgcattggactggtcataagccggaaccatcgacggattaaaaagcgccactgattcaaaagcatattccattgaaaaataggcgccaatcagcattcggacatcgctgtcgttttcatcgacaaggccgacgtgctcggcagccatttcatagttttcaatcagaatctcctttagcagcggcttgttaggcgagaattgattgaggaggtccttcagaagcccggagactttatccggtgataatcgtttgactcgcttgattatttttttcgctcgttccgcgccgggccagaaaaatcgggttatcgttcttctcgagtcaggcataagtcggatcggaagccgccttacattgatagattctttagtcatttggtgctttttagcccctgcaaggccgaaagttgtgatggattggtcgagtcgagcggaggcgcgaccggtttagccggaattatgcggcggtcttgtcattctggggcgtttaccccggaatcccgtctcggcagtgtccccctgacgccgaaagagccccgggatgattcctcaagacacaggaggacggcaaaaccgtcgtagcgttaatgaaaaagtcccttttgacccggttctgagcgtacctccccgtatgcccctcagtcaagcgcaatgtccttgtcgccctcacccgaacacagcttggtagtatcgggacaaggcgaaggtggatcctacatgaacttcccacctccaaccgtgatacgcgactttcgctccgaccttcatggtagagccagtgggatcaggtcgttcatccggagctcccgctcgatcccctctattcgcctccgcaggctcgcatcttccctgatctcattgttcatgcgagaaaccacgctgctcacactgccgtgccagtagtctcagttctgttctcggtccaaacaatgagtcaagagcagatctgaccccttgcacaatccttgcacaatcaagaatgatttttccggcatgtgattatccacgccgagcattagtatggcttgtgcgagtttcccggctgggatataagtgcaacaccccgtctgtcacggcaaggtcgtacgtgcaggttgaataaatgaagatcagtgaggtcaccaggcgagacatctttgatgcgctatttgtaactgggggccattgggctggtcggttggagaacctcgaatttttgtcccgagtttacgatctggaaagtcttccttcccatgaccaccgtttcgataatgcttactctgacatttggcaacatacggtcaataacgatgactggccgggggactggatcctctatgatagccggttcaatctgctgggttgcgaagatgagagcctgctacgatttctttgcgaaaccattcatccggtcgttagaccagacacccatgaggcggaaggccttcttcaaatctacaacagttacctcaaaaatgatggatttcaaatagttgaaaaatcgcgcatttcggggaagcctgtctttgtagggaactatgtcggcgttgtagcaactcctggactcgcagcggttcgcggcgtagccttagtggcggaccaggcttacgtggctaagcagataacccgtatggagtcggccgtggacagtgatccggctctagctatcgggaccgcaaaagagctcgtcgagacttgttgcaagacgatattgaatgactgtgatgttgtagtaccagataagcctgatctggcgaagctagtcaaattaacaacaaagcaactcaaattgacccccgaggatattccggatcgagccaaagccggggaaacaatcaaacgcctgttgagcaatcttgcgagcattactcagggaattacagagttgcggaaccattatggcacgggccatgggaaacatgcaaaaagcaagggactcgaaccgaggcacgcgaagcttgctgttggtgctgcttccactctcgctgtatttcttgtagaaactcacaatgcccgtagaccggacaaaccttgacgccaaaccccttttattcattgttcgtatcagatatccgggttacttcagtaacggcaatgtcaacggccgaatactcattctttgctgaggtgttttgaaattgtgggtcaggtcttgaaatgacacgacctcggttactagaatagagcgatcgtggccgactgaagatccattaaagtattgataaactgatttcgggaacagccaatggtgagaccccgtttttcaagagatgaccgcatacacccctgaccccatacatgtatccttttgcatgaagcagaatctgtcactggaacgattccatcagagactcaaaccgggaatccgtctttgaggggtctggcgagcgtgatttggaaacactctcatgacgtcagacgataatcagatcttgtccactgattcgagacgctccgtcatagggacacctacccaattcaacactgaaatagtgtcctgtctgacaacgtgacaggtgcatgggtattgctttgaataattctatgacgacaattggcggttgcgtccttaagagtatcggatcaagcggtgcaattggtggaagcccgacaagatatgctttgatcactttctcgccattatctgcaagaccgttcagatatcttgtgagttggagcacgtctttagtcttcagcggcgttttcttgcattcgacgattacaatgccgtcgcacgtctcaaaatcaatgtcaatgcgtccccccctgatcgtgcgttctgtccggccggagttaaacaggtccttgtccaatagataaggatggtaccggataagtgtctgtatttgtttctccagcatcgatctctcggtctggttcaatagtgttctgacaatttaacttgctgaatttgtgacacaagttggtccaaagcctttctatttctcgagactaggccactgcctgtccttggggccgtaaaaccatttgcgtctgccagcaaagtgaggtctttggcagtcatagtgcccagagcatttctgattgaagccgcgtccaaactgcgcagctggtcgaaaaggtctctgcctctcttattcgggtccaactcgttcttcaggtctattaataatcctcccctagccacttgcttcaaaaattcagcacgagaccttctgttcgctcgtggcacagtaaatttcagttttagcctagtcctgcaaaacttctccatgaatttcggattcgcgatagtcctgccgtctccctccagcaaagcggcaacctcggcataggctggcaattgttccaaacgcaagtcttccgctttggcaaggaattttcccaaagccgtttccaaggatttcagaggtgcagcaaggtcactggatgtcccaagttttgggtatttttttaaaaactctgccgcttcgctcaattgcagtaccagattattcattagtcccccttgaacttgtctcgaatcaaaatagcaaggtttcggtaatcacccaacaggtccttgtttttcactcccttagcaaaaagaagaggtctgtactcaaaagaaccagtgcgaaagtccgctgcatgtctaatacttgcaggaaatacttcggcgtcgggagccgtcaatctctgcacctttaggtcttctaacttgcttctgagaacagtttccgaatacctgttcgctttttgttccgtcacgggcttattattgatcaatatcccggagatttccggctgctgttcaccagggcggtgctggtagtgagccccctgcgtcctgtgcttaaactcgcgaaccttgcgggctagtaaggatagaccgatagctgagagactatcaggattacatgggaccaagatatggtgggaggagaaaatggcacactgggtcactctatacaggttcggcggacaatcaatcaagatgaagtcgtatgcatttaagcatcccataatctcttcccaaaatcggatataaggcggatcgccagccatcggcactgcaccatcctcaaaatccataagttcgtagcaggaaggtagcaaatggagtttcgggacctggacaacgccatcttctttaatcgcatccttgaccagacagggcccgatagcgtgcttctttgttaagaggccataaacagtgcgtgtagggtcaccacgcgcccgggcatcccactggtccggtcccatgacactaatgctcgcattactttgtgggtccagatcgataagaagcacatgttcgcctagttggctggccaaagacgttgctaggtttaccgctaatgcggtcttccccactccgcctttgaaattgacgaagctgatgattctagcttccatttaaggcctttttcctcgatgcccgctataagtttatgtctaattgcggacggaggcagtcccagaaatttggaagatcacagagagtagaactgcattttactcttcgaggataacggcggcaagggtttctcttcggaaagtcctcgcaaaaaatggtgagcttgagatgcggtcagcctcaatctcttcaggtaaggactaacaaaaatgaaaattttgggatcaggtcttgagatgacagggcctcgtgactgaatagagtaatcgggggggcggctgaaaattcacggagtgacgtcaatgaagtcagccgatccctggcggaatcctggcgtgcccttggcgccctaccattacttacattcacctttgatgtgcctaaagctggtttccttgttcgagaacgaccccgcgaatcgcggggaggccggccgctaccggaattcgaattgggcgcccgtgttgagccacctttgatacaccgccagccaattggagtttttgccggaggggccgggaaccggctttttacacaaaaagcgggttcccggtggccttctcagcgcccctttccagttcgatataacgttaaactgtcttggcgttctcgaggagcgctctactttttttccgccggggcagctagggcctttatgcccatcagttctatcagcttgttgatatctgtggtcttgaggttcattccgccctccgacatcggcaacaacacgatctttttgccctggagcgcctcggcaatcctcagttttaccaaggcctctccgccagacccggtaagggccttgttcatttttcggataccttcggcctgtgcaactccttcggctttgatagcctgggccaagagcgactgtttttcaaaataggcgtcagcctcgatcttggctctccgatactcaccatcgacgttggccaccaacttgttaacctcacccttcgcgtcttcgagctttcgcttgtactcttccaaggccgcgtgctgggccgatctgttcttttcgactcgttggtccgcaaccttcttgtcttcaatggccttctggtattccggattgaatcggtaatctttagtcagaacacgctccacgataatgcccatagggccgagtatctcctgtagcacttctttagcgttctgcgctttggcttcccttttgtccgccacgtagaattcctcagtcttcagttctccgaaaatgtctctgggtttactccttgccacggtcctcacgaccttctcccggagcattcggtcgtttttggctacgtactggagaatatacggcgccttgctgggatcgatccggtaagcgataatcacgtccagtcctatatcgtttccgtcaatggtcttgaagagcagatcatcgcgcgcttttcgatctccacgctttgggtctaaggtcatttcctggttctgcagtttggtgtcaaatgtgtgccagtcattgacaaaaggtaagaaaaaataggttgagcccggcggatagaccttatcttcaacgcccttctgggtgaaaattccgaacttgaccgtccgtacgccgacttcggtggagccggttgtgcgcaggacacatcctgtggacatcaagcagattgcaacagtaagcgccggtaatgagaaaaaacgtctcatggctggccccctttgcgtatatcaaacagattcagggtcttgccgaggttcagtggattgacgccattggggccgtcgcttggcagaataaccgtttgcaaccccttgtacacgtcagccatttttaatccgaccatacgctcggcgccctcgccttccatagcctcattcttgagtttgacacgttcggcctctgcaagccttaccatcaggtcggcttcagcttttttctttcgggcgtacagatctctttcggcccttttcttggtgacgtacgcctgcccctcttccattttaacccctacgattgcttctccctcctgtacgatcttcttcaagatagcctcttccatggaagcccgcgcttctgcctgatttttgaagaccaactggtccttgagttttttctcttcgatgttcttctgaatttcgctactgtaaatgaaatagcgcaccatgacttgttcgatgttgatccccttcggattcaattcccggttcaatatctccttggcggcgtcggctttcttaactcgccgcgggctgttgtaaaattcttccgtggtcagctccccaagcgtcacctttagcacgggttcggctttgggaataattccattgtcttcgaacagggtccccggaccgatcatggtaaaaaccaggtatgggtcggaaatccgataaattatggagacatcgacgttaacaaaaaagccgtcggacgtttgaatgtgggccgccttttctcgtcgtgaagagagcgccgccgtttggggagtgttggtcagttccaatacctggactcccttcgggagccggtgcatctcatgcatgcccggaactatgaaatacaaaccgggtccatatacctctttttgtaccccgcggtgagttccgagtcgcaccagcttgatgccgaattcgtcaggggcaacatagaccagacaaagtccatacaagatgatgataacggcgaggatcgctatcacgacctttcctttgaaagggaattttggaagggtgtagctgctcctgaatttctcaagccgaactgagagcgccttctgtggttcgtccatcagtctcctcctccatcagttggttgttgcgaattcggatctccttttattgtattctgtgacctcgggatcagccacgaatgcgccgacgatcaagtatagctaaaattcatgggaagaaataagcggtttttttcccccggtccaaagcgcccatgccgtctatatgacaacctttgcgtgccctgcatgtcaatgtttttttatccctttgtgtgtttccgctgtcaatcgatacagcaatttcgattgatggcgctggattccttgtgcaattgtgtgtaagctcggtcataacaattgtgtaaatgggggaggcaaatgaaaaagaacgggctagggctgtggatcttctcattggctgtcatatctttcggctccatatctgatgcgcaatcgcaggatgttttcagagaactggatcaggtcaagagagaggtgtctgcgctgagaaatgaagttaatgacctgaagaaccaattttattcgttaagagaggcgatattaagatcagtggcttctcaagatcaaagagcgtcaagacgagcgctgcccaaaggcgagcctgcgaaaaagcaggaagcgcccgtggatgaaaagcaactaacagactcgatatgccaggccgtaggtaagttctttgcggaagtcgacgtggctttacggatgagtgactcagccgcggcggacgacagaatgaggggagcctttcataaactaaattcaacattgcaagattattcaaggcttcacagggtttcgaaactccttggcatttatgagggcttggcttgggatacttatgtagcagtcgagttatccggaagcgtacaaggaaatgaggactttattagaaccataaataagcataagcaaaagtacaatgagacatgcccgaagagataggacatacgctccagaagatgtgattctggcgttaaagtagctctgcctgttcaaagtgattattttcaaaattgaagccggatagacaggcaggtttagccatgacgacagaatcgagttcttttagggcccaacaagatagtgatgtgattattaaacgatttcatcctattgtggctgaattcgggttcacaaaacccgtatgggattatgactcggaatcggacattgttcgagtacagttcgagaattccgggctgggtaacgctcttcagatcgaccataatttccggaacgattcttacagcgccaattactgccgcctgaagggtgactggcaaatgtgtatcgaaggaaagcctcagagactaggcatgtttaaagcgaatttgtcgcgttggatacgacaaaattgtgaagaatgccgaaccgagagggaagagcaaagtgaaaccgaattttagaacctggcctcgggttttatttactgcttgacaaaaagacctttctctttacagatttattaattgagtaattgtatatgaaccttaaactcatcaccgtgcgctaagcgggtgaggcgcgtgtttcctattcttgggacttgccgcggctctcgctcgataacaaggttccgcgagagttttttgttcttaacgattcatttattttccctgaaatttcccgttttcagggcagagacgtctgcgaatggctgaaccgcctgagccaaatcggttatttgcgggtttcagtagagggctctcttgcgaccagataaatgccgcagttcaaagtggctggcgctggcgccataaccgtgggagatgttgtcttcatggcaaattcaatcctgaccggcacatcttcggtggtcgaaaaatgagaacagaagggaggcaaagccttgcatgaattgaaatacgacgaggctgtttgcgagaaatgcgaaagtgtggactgtctggtgaagtgccgatacatggggctggatttgaaatcagccaaggaagagaggctgcggctgattcgaggtgagagcagcagggcgctcaaggattgcataacctgttatgcgtgcgaagaatactgccctcatggcaatcatcctttctacctgctggtggaccgtcaagaacaatccggaatttggcctgtccccatcccattgaccaagcaacaaatcaaaatgatggcgccgaaggggaggataacccgagagaaggttcacccgccggttttgaacatgtgctactttcccatgctcaagggatgcattcaggggaagcttttcgatggggtatccacaatcgtcggaagcgacatcttttgcaacataatgtggctacattttgccaagaactcgactatccgagagcgcctgcctcaaatgatcgacaacatatggcaatactatcttaaagatagcgggaccgatgaactgatctgctatcacgatgaatgctacgggacctacacgcaacttgcgcccgcattcgacattgatgtgccgttcaaatcgattcatctgttcgagtttctgacaaagagacttgaggaattaaaggaccaggtccgccctctcggcatgaaagtggcttatcagcggccatgttcaaataggcttgtcccggatactcagcgctgggttgacgagattttcaagcgtatcggcgttcacagggtagatcgtgaatacgatagagagaatgcgctctgctgcggaggagtcctaaggcttcaacagcgagacgacctggccgacgacctggttaacagaaatctcaatgacatgttggctgctggagcgaacgtttgcgtgttcaactgtcctgcttgctttttcacgatgggtcaggccgccgcggagcgtggtctgatgcccatactcatgagcgatctgtgtcgggccgcccttggcgaaaaattgacaggggtgttctgatggaagaaatctacaaagaactcgcggcaatcgtaggcgaacggtacgtttcaaatcaacctgaagagaagttcatctactccagagacccagggacaatggagccgtccgatccggattttgttgtcatgcccaatagcacagaggaggttcagcagatactccttctggccaaccgcaaaagccttccagtagtcccaatgggtggtggtcttgttctttcgggccttaccaggcccctgaagggcgggattgtcgttgatatgaagaggatgaaccgtattatcgaggttaatgagaaaagtcgttacgcaattgtcgaggccgggacgtctcagggcatgctccaggcgtatctgaagaagcatcatcccaacctcaagcattccgtgcccgacgccccgcccattgccactgttggcgggaatgttctcattcatggttcggggcatctgtctcacgcggccggttttcactcggaaatgctcaacggaatggaggtcgtcctgcccacgggagagattgctcggctggggtcttgctcaaccagcccttattggttttcgcgggctcctctcccggacttggtcgggctgttcttgggttgggccgggacaacggggattgcaaccaaactggcaataaagctatttcccaaccgagctttgaatgatgtggccgttttcgtggtcgaagacgctgaactggcccccgacataattcatcgaatcacaggggttgggcttgccgaggacgtgaccgcctggatgacaccgaagccggactgggctgaaggctttgttcatataaacatcaactactctgcggatagcaaagatgagcttgcctggaagaagaacctacttcgcgctcccctcaagaaatatatggacgagaagatcgggggttttatgatgctcccggcgccaatgaaaaagccctttctcgaagccccggcgtcgcaactgacccgcttcgcggacaccaggaagggagggggattcgagtacgttggggccatcatgcctgttgcgcttttccccagagcccatcaagtcggcctggagatagccgaaagatgcggaacaacttattccacaggagccaggattctgggcgcggggcactgcatgatgttcttctacgcgtatcctttcaaccgagccgacgcttcagatgtaaaacgggcccaggttgctctggaagaaacgaaccgcgcagcgcttgaaatgggcggtattccctggaaagcggaagctccggcccaaaaggagattatcaagaggatggacgagaacacctttgaccttatgaaccgcattcgcggaatcttggaccccaataggatcatgaaccccggcaactgggaggcggactgatggagcattctgaaattcttcaccgatgttttcggtgcggatattgcaaattcccgtccaattacattgacttgaactgcccgtcctacttgaacgcccgttttgagacctattcaccgggagggcgaatgtggctcttacgcgcttggctgcaaggagaaataaagacgagtccacgatttgcggaaattttgtattcgtgcgccgcctgcggaaactgtgtcgaacactgtgtgtttcccaaattcaaggacgatctcttgaatgcgtttatcgccggtcgcgaagaacttgtgacgacaggcgctgtgccgccggctgtcagagactattttaagagcatccacttacacggcaacccttacaaggcgcccgaggccgaccgcgggaaatgggccgaggggcttggcctggagccatattcggggcacgagtatctgctatatatcggatgcgtaggctctttcgacgaacgcggtcaaaacatggcccggtcagttgccggactcttaagcaacctcggaatatcattcgggatattaggtcgagaagagttttgcgacggcaacgatgtcagagccatgggggagagaggattgtttgaacatatagcgcgaatgaacatccgcaagtatcaagatctgggagtcaagaagatcgtcacactttcgccacatgcttatcatgctttcaagaacgaatacccggggctcggaggcaattttgaagcgctccactatagccagcttctggcgcctgtaatcagaaaggctccgttcaagaggtcggaaggcccgacaagagtaacttttcacgacccttgttacctgggaagacacaacaaggaatacagagcgcccagaaagatcctgaccgcggcgccaggcgttcaattgaaagaaatggagcgatctgagaatgatgccctctgttgcggtggaggaggcggaaacatgttcactgacatattgggtggcgggcctgacagtccggcgcgagtaagagtccgcgaagccgcccgcactggggctcaagtcttggccgtggcttgcccgggttgttcgaggatgctcagcgacgctgtcgccgcggaatctttgcaggaggttcttgaagttgtggacctcgcagagttcgttaacagaaggcttgcctttcattgaggccgtgtgttatccgggcttttcgggttcaaaaagcaaaatgaacctaactacggccgttcagcattttgtatcgacatcttatgaaatcatgttgtatatctttgcgcgacgacatttggggccgcttgcaagagtagatcggcaaaataactgaactcaggaattcagagatattccaagggggtgtcttatgtttagaatatcaattttgttggtggcatttgttttggctttctcgatggtaacacatacatacggcgcttccgaaaccgataccatcaaaacatctcagggggatctcaaaataaccttcgttgggcacggcaccctcatgttcgagtatgggggcaaggtcatccatgtggatccgtggggaaagcttgccgactactcaaaactccccaaagcggatttgattcttatcacgcacgaacatcaagatcacctggatctaggtaccattaagaaaatcaaaacggacaaaacagttgtgatcttaaccaaaaattgcattagcaagggagcaaccggcgaggttatgagcaacggagatacgaaaacagtagccggaatcaagatagaagctgtgccggcttataatctggtccacaaacgaccggaatccggtcagccatttcatcccaaaggcgaaggcaacggctacgtcctcacatttggcgccaaaagggtatacgtggccggtgataccgaaaacacccctgaaataaaagccctgaaaggaatcgacatagccttcttgcccatgaatttgccctataccatgacgcccgagatggtggctgacgccgccaaggcgttcaagcccaaaattctctatccgtaccacaccggggacacggacctctccaagcttacagctctgatgaaaggcgtcgacggagtggaagtcagactgcgcaaaatgaaataatacgggagcgttttagaaagatattccagggggaccttttttgcagaaaaagggttccccggcgccctccccaacaaaatcttgcattgttgtacgttaaaccgcgtggcagcccagcggcgggcttgctgatgagcaatattactggtccctctcatacgcggcggtggaatagagatcggggtagagtttcttggcgcaatccgggcagatgctgtgcgtaaaatcagcttcggtgtgatctcggacatatacttcgacctgagtccaataaccgctgtcatcccgaatcttcttgcatgaagcgcagataggaagaaggccgcttaaggtcttcacttttttaagcgcgtcctgaagttcgtccacgagttctcccagtttctcttccgttttctttctctcatcgatctccagtttcaatcgctcgttagcattcatcaatgctgccgttctcgacctgactctttcttccaacttgtcacgagccgccctgagcaccgcttcggattcttttcgctgagtaatatcttgtcgcatagtccagaggccgacgagatatccatttttgacgttgcctaccaatgtgatctcataataccgattctttccattcccggagggttctttggtttcaaaggatcgtatcgggaaacaattggcgccccatgaacggtaaagtcgctcaaaattgcctttaaacggcagtaattcactcagaggggtcccctttagtctgtctataattcgatgaccgtgcattcttgcaaattctcggtttccgcccaccaatttagcttctgatagtaaggacagagcgtcttccggcagagcacggacaggaatgggacggcccaaaatgaattccgctattccgatcgggaaaacctgcactagctgctgatatttttcactgatgatgagttgctttttctcagcggtcagatcttctattagagcaagaaccatcctctccgtcttgaaccgtacggaacgcaaatgaatgcggcaccatagcgttctgccgctcaccaatagagaactctcgaacacatgcgtctttcggtcgtgcaaaaccttgctcagcgctgacaagacctcggctttgtccgttgggcctgtaaataaagaagaaaaaggagagccggatatatgagccgattcatcctctattttcaagaaggccttgttgaaaaagactatgttaaaagacccgtccacaagaactgtaggaataggaatggattccaataacttaccgaatgagacatccctaatccatcgcaaatcatgactgcccgaatcagtaagctcacgtgggaacagcgggtcaatttcgatactaagagtcgtaatttcaggtctctgcattaaggccggctcagaagcatgagcccgcgatccgtgttcataggcgatgacttcggtatcggttgacatcagagcattctccttgcgcaatgcacaacggaatgtggaaaatctatggttcagatctactcagagcggccttggatcaaacgtgcccaaatttttttagaattttccgtaagctccttgaaattatgatgcccgcttacaggatcgctcgaatcgcccccccggaaattgcgctctcttccatttcgtaaacacagaaacaatacacagcaagcccgttttgacggctcaaaacatatagacacccgatgaaggtttcggttttataactcaacatagcgcaggaaatcaatcccccaagaaatcgggcaaaacaggcggttttccacagaaacaggtgatgacggactcgacagaatcccgcctgcccgaaattgcgatttttctaagaaactcccctgcttcaggcgtgcggaaccagctttctccgtagcgcttttcgagaaaaccgcgcagcacatgcgcggcagcccatgcattcaggtaatctagagcataaaaatcgggctccatgtctatcaaataggcctcgggttcatacatgaatccggtggccttgttaagatgattgcaatacggttgtgaattctttatgtcgcctttttcgtagaattccttttcagctaagaattttcctatatagcgcctgataagacatagtcgcttcgagcgaaagagccggatcaacacgtccgcatccggcggggacatagacgccacttcggtcaaccacaagcgattgtcaataagctccatgaaaagaaaagcaaaagtttcgtcaagagcgggcgaacggtaaagtcgcctgtactctatcggcagattcggatcgaaatggctcaagaagaaagcgtgacccatttcgtgcatgagggcttccacatcgatcaatccacccaccggtttcatgaggacaaagatccggcccgggatctctacccctatacagatgccgtccggattcttggccggatcacctgaagtatcgaggatgacatcattacgcgatgacaaatccaacccaagcggcttgaatgttttcagggcaagctcgttgagacgagaagccggaaaaattccatcgaatcggctgatacgaaggagatgcaatgcgtggtatcggctgagattttcgaaggaccgcccgatcttttccgagacccaaggagttattcgccgcaaataagtttcagcggtgtcatccaggtactgctcaaagattcgggcgtagcccgcaaaagagaccccctttttcgcctcgtaatattttgtgtaattatcaaagccaaatttctcggttacagctcgtatagagagttcggtcatgccgagaagtatcggatttataatccctttcaaatatatggtcatctcttttcggatttcttctcttttattaaaatccgactgagcttgaagccagtttactacttccagggcaggaattttctcagatcccacgtgcattctgcctcgttccatgtagaatctcagcatgtcgccgagcgaagccgtctcttgcacgagggccaggtccatgcaaccgaacagtatccgctcgatccgcgccttctcatcagctgtgtcagccttcaccaaggcttccctcaagaaggtctcagtgccttcggcgccaggaagtggatgcaactgaaggatgtcactggtcttgagagctgacggagtcccctgaagctgatccacagatagtttggctagatcgcgatgaattgcgtcgatctgttcaacaattttttctaccgttaactgattcaagatattgcctttcgggatttgattggtctcaagttatccgtcaattagagcttatgaggcggtaatttgcaagtgcacgaatgctcacttgacatggcaattgcgggattctaagttgacttcatgccaccacaacttatgagcgttatcggaatatttatcatcctggcattttgtttcgccatttcccgagaccggcgacgtatcagttggagattggtattctggggtctggccctgcaatactttttcgcgttcctaatattgaaaacctggcctgaccagatcttcgcgacggcgcaagcaatttttaacggaattgacttcttttccaggcaaggcgccaagtttctgttcggttcgctcacagaaaaccaggattttgtcatcctgagcatgggttcggtcataattttcgtcagctcaatgatggcgatactgaattatctgagggtgcttcccgctatcatgtatgcgctggcccgtctgatgcaatggacgatgcgcacgtccggagctgaaacgctgtccgttgccatgcagatcctgatgggcatcgaagctgtcaccggcttgaagatggttatcggtcggatgactcgttcggagcttttcacggtcatgacgtcttttatggccaatctcgcgggatcggtaatggctgtgtatgtcggagtgtacggcgccagcgcaggccacattttggctgccagcgtgatgagcgctcccggcgctctgatgctgtcgaaaataatgattcccgaaaccgaggctccggagaccggcgaaaagatagaatggaatgtcttattaccgcctgaaaaggggatcgtcgaggcggcggccaacggggctatggacgggctgaaattggctgcgtcaattgcctgcatcctgttggcgtttgtttccataatccacatgctcaatgcgttcctcggaattttcggtacttctttcggacacttgggtggctatttgttcgctccggtcgcttacatccttggcgtcccgtgggaagactgcatgaaggcaggcaacttgttggccacgaaaaccgtcttcaatgaatggctcgcttacagccgcatgaaagagatggtcgatgccggagaattgtcaagcagagctgtgatgatagtgacatatgcgctatgtaattttgcgaattttggtagcttagccattcttattggcggtatgtcagcgctcgcgccggaacgcaaagaagaaataacacacttgggaatgctggcgctgttatcgggcctcctctcaggattcatgaccgcagccgtcgccggaaccctaagctcaggctgagtctggggagaagtaagagttactcaggaggaaaactcttttgcaaaagagttttcctcctgaaacctcctttcagaaaactcttatatggctgcggtgaagtgaggaagtgtactagtgaatcggagcaatacggcttaatgttcaataagtttagagttttttgggaagggttcgggaaacccttttttgcacaaaaaagggtttcccgtgagattttatcttctcttccctcctacctcccccgcaaatttcagcgcatacatttggagcttactaacaagtgcaacttttcgtgcgcattctgtcctgactgtgtgatgacgcgggaccgcgggatcatggaagaggacctcgcgcgatccgctctggatcagattgcggacctggaccttgcggaaaaggtaaccttccacgtgatgggagaacccctgctgcatccacgctttttcgagattctggaccacgcggcgagtcgcaagctcgcggtgggtctgactacgaatggcgcgttgctgactccgtcgatcgttcagcgattggcggagagagacctttatcaaatagacatttcgctgcaaacgccggatcgagagagtttcctcgccacccgggggactcgcatggatttcgacaaatacatagatagattgctggagctgcttgcggcttgcgcggctcggcctgagcctccgatctttaagatacgaatgatgacaacccgctttgcgtccgagttccgtgagaaacggggaatccccaattttatgggcagttcagacaaactgcgcgaaaccgttctccaatggaccgagcttgtccatcagcggctcgggattcggccggtagagcgggaagagctgatcaagagagtcaacaagataagcatacacggttggaatgtgatcgagatcagccccaaggtattcatcgaaacctacatactcaccgattggggaaatgcgttcgcgggcgatgaaatcgtagaaaaccgccacggatattgcttcggcatgagggaccatttcgcgattctatattccggagacgtggcgctttgctgcgtggatttcgacggcaaaacagcggtaggcaatctgaaagactcttctctgctcgacatcctcaagggcccggagttggagcgcattgtcaagggcttccgtcgaggtcttctgctggacccacattgccgccgttgcctcgggagcggctcccgcctcggctcctggatcaaacccgccgcgtcaattatcggattgaagctgttgaagccgttcttctaccggaaatacaagttgtttgattagagctcggcttacagcgcaggtcccttctccctgaccgatgcctatcgctcgtcaccaattgaaggcttgtccccgtgaaaacggggaccggggtccagtcggctttcaagattcggctttagtgaaatgatgacagaccggtaatcatctagatcagaaaaggtttatcgcactaggtccgtttgtggaagaagaaatgactttcagaaagtggactgccagggggaaaacccttttgcaaaagggttttccccctggaccctctttccgaaaactcctaaatggttgcagagtcgccgtgagacagtgataagcttgtcacccgcacacgactgaaaactcatatttaggagtttttgccggagagggtggggggaatccggctttttgcaaaaagcgggttcccccgcatttttcgcttcttttccgccctcgctgcggagcaaaataaacaatccttcgccgaataacaatcaatctcctggatcaaaaattccaagcctgctcattaacttgttttttggttcctatctaaatggatttgtggtataggaagctatcctactcataattcttttcagcgccattcgagtgcattttcggggtccgtgctctgcttcgcagaccaagacggatccgtaagaaaaggggggaaatcagcatgacgtccccgcaatttcctcactcagcccccaattcaagattggagcgcatacatggagtacaacctgcttgagaaggagtggattcccgttctgtggaacgatgggaagttcggtcgtgtcggcatcaggacagcattaacggaggcgggccgtatccgccagatagccgcgagcaacccgatggacaacgtagcgctgctgcgacttctccttgcggtgctgtggtggtgtaagtcaaacctgaccgacgaggaacgaaacacgctggaaagtgccgacggcatcaaagatgattggctcgaaaagatggatctacacaaggagaagttcgatttgctcggcgatccctaccgcttctatcaggatcgacaacttttggacgacattctgaaggccaagcagagtgactgggacaagaaacaagaaaaacgcaaaagctcgaaaccatccaagactcctcgcccagcggcattgacagacgatgattaccgtccgattggcgacctactccaggagcttccgaccgagacccagatcgcacatttccgacacgtccgagacgggaactatggcctctgcccgtcctgctgtgcgataggcatagtccgtctctccgcttttgccaatgcctacgggcatggcaagtacactgcagccgttaacggtcccacaccagcgtatgcgattccagagggatggactcttttgcaaacgcttatgctgaattggcctgaaaagatcactataaggcgtgaacccccgtggatatggaaccaaccacctagccaggaggaattggatgaaataaccgtattcgcttggcggtctcgtcgcctttggctgggtaaccgcggcagcctggatgagccttgcgcgtactgtggcgagcgagcgcatcttatcaggaaaatggcctttagcgggaactggaggccacctatccaaactaaaggaacgcagaagaagttctggaatcaggacccccacctcattctcgagcagatgtcaagtaagaacaagggagcggaggattctgacgacgaagacaaagatcaagagactaaggtgcttagtgagtcttcgacgagcactagcaggacagttactaccctgggatttcccattccagcttctcgtgtcacggcccacacgcgattctggagacgagcacactcagccatcctatcgcacgctcatccccgtcgtttccgcaccatgcccctgcggatcaacattgccgggcctgcggcgaacaaagggctgtaccaggatgccaccaatatttctttgcctgcgaattcagccgattcggaggcgcaagcgagagttgtcctggatttgatagctgggatcacaagccaattgatcaagcttctgagacagagtacgccaaacaaggatcgccagcatcccaatcgacgagctgctcttgatgccttgtcccctgcccttgaaaagcgcttaagtcaagtcttctataattttgcaaagagtccgacatcagcgtcaggggtcgcacaagttcctaccgaatcatggtgctctgaattgatccagcaattgactccaatcattgatgcggtggtagtgacatccactcccgggtctcccctgcgccgccgcgaagccgcggaattggcaagaacgctacttgatcgagaaatccggaacttggttaaggaaatacaaaaacagatcgcattcgccaagaataaacaaacataggactactacagaaggggaaggggatgactcgaactgaagaattcattggacggctccaagcgctcaaggaaggtgaccgctcgcgactacgcaagctcgcgggaaaacccttggacgagtcagtacagggctttgatctgttcaccggcctctggtggccgttacggcgaaacagtccacgagcgccagagcgccgaagcgcctggctggtggcgattctttatggcgccttcccgttgccggacgtgcggcatgaggagaaccagctagcgcggttgctaggagggcgcgagaaggccatggcaaacgatttcgaccgcgaacgattccgcctacggtttgacgtcctgctgcaattacagctgtcccgcttggaacctcaccttggctgggctttgtccgtcatacacaaagcggtcggtcagaaccacgtcaacggacttgattgggttcgactgctggatgatcttcggctctgggtaacaggagttgatagccaagatagagaccagaagcgtagcgagcgtgacatacgcgatatctgggccgaggattacttgaatgctgttcaccaatccgaaaggaggaaataaacatgctcattgaaattcacatgatccagaaccatagcccgtcgaacctgaatcgggacgatttgggcgcgcccaagacgtgcattttcggcggtgtcacgcgggctcgaatttccagccagtgcctcaagcgtagcatacgcaatccagccaacccggatgacgctcacaaacataatggcgcgtcgttcgccgaagccctcgcggggcacacaggctggcggaccaaattctttcctcatttagttggcgagcagctcaaggcacaggaaaagctcggtattgtgcagaccgagcgaatcccagaggatgaatgggccgccattgtagccgcctgcacagtagtcgcccagaaagccggcagggaaactaaagaagagactgcaaaggaagacgccgatccccgctatgcgacgaagcagcttatttttctcagtccgcgtcatgcggctgagtttgtcaagaagcttaccaagcttcgcggatcagacatagagagctacaactactttcaagatcctcgagtggtctttaccacgctgctggaagaggaactgggcaagaccgtgcccgatgacgaatatcgcaagagggcagctaagaatggatggctaattgtcaaatatccgcatcggtggcaaaccctaaatgaatgggttagcaaacaggcgattaggccatccgacagcgatgagacaaagtcagagggtgacaacactgaaaccccgcaacgtaaggagagaccgggtcaagagcaagccaagttcttggcgcagactctaagtgacatgatatcacaggcacagggtgacaaggctactagagagctccttgacgatcttctgaaggccaaggcacaaaaaaacaagaaatggcgaggaagatatttggaaggtccaatcgaagatgaacgcaagaaaccagatcactatcaagactttcagcgagagctgcggtctgcgactggtcccacagctgttgacattgctctttttggctgcatgaccacatctgactatttcgaagatgtcgaggcagccatgcaagttgctcacgcgatttccacccacgcagtggtcaatgagagcgattactggacggcagtggacgacttggccagaacccaagccagtgcgcatctcggcgagacgatattcaattccgcgtgcttttacaagtacttctgcctcgattgggatcaatttgtgcgcaaccaagcaagacgacagtgaagacatgctggagtggaagaagaaccacaacgactggtctgacaaactcaagccgaacgccgagaaacttgccgcgtgcacagttgggtatttcatccgcgctgccgccctgagcacgcccagcggaaagcagaacagcttcgctgccaacaacgagccgtgtggcattctcgtcgagataaagaaagacgcgaagataccgaccaactacgccaacgcgttcgccgagcccgtcgagcggattggtaaaccggatgacgatgcggccgacgagaaaagcatcgaaggacgcagcgtcgcttgtttggcggaccacgtgcgtgcggtcaggaatgcttacggcatcgaatcaagattgctctggtacagccctaagctctggcgattccctctccagtattgggagcggtccacggatggcaagaaaaccaatgcgaagctcctgacaggagatcgattcgagttcctgggcggggaaggcggacagccgaaaagcttggtcaacgcagttgtggaagctattggcttcgaatggtcgaagattatacacgtcggcaagagctcaacaaaggagtctccaagatgagcggcagcgacaatacaaccttgttcttgcgcctggagggtccacttcaggcttggggtgacaattcgaagtacgtcgtacgccgaacactggaagccccaacgaaatccggcatcgtcgggttgatctgttgcgctatggggctcaatcgtcaagaaaccgttcgggaacccatcgcgtcgaccgccttgcgaacgctggccgaacgacttgtgccggaaaaggatgtcgatgacaaaaagatcgaccggacagtcctacggcttttaaacaagctgcaaatgggcgtccgcatcgatcgagccggggtgcggtggtgggattatcacaccgtcggcgccaaggtcggattgctacaggctaaaggaggtatcaagcgcacaggtggatcaaacggaccgattgaaacgctcatcagccgccgagagtacctgtgtgacgcaagcttcttagtcgcgcttcgaggcgacggaggccctatcagtgaagtggccaacgcgttggcgaagccaaagtggtctctttttctgggacgcaggtcctgccccccatgtgtaccgatactcgtcacgaaaagaaataatggcaaccgcaaagccgacatagaagacttcaagagcctagaattggcgttggagtcgcgggcctggtacccgcgcactaagagggacacgccacgcgatgaaaaacggaaaccgctgaagaagttagccttaaattgccttgtcgaatggccaccgcgcaacggtgaaatcgcccccgccgatgccgaggtctggtacgatgcgccagcatcgttcaaccccccggtccatgaacctcggctagtgcagcgcaagcacattcaagttctggtcggcgtcccaatccagaataggacgctgcctccaccgcgtccgcgggccgactacaacaacacggaatacaagaaacgccgccagcagcgcttggagtctgattacggcctctgcgttttttgcaagtcgcctgccacgacggtgcaacacgttacgtatcgccgggcaggcggcaatgaagaaccggaagatctgcgtgggctctgtcggctctgccacgactctgtgaccatgatcgaatacggcctgggtatgggtatggatcggattaacccggaagagccgtgctggcgcagccagatcattcgcaaacgccaggaaataatcgatttccgctcgctggaaacccgacgtcgacacctgaaacccgaggaggtggaatgatgtatctttcaacgctgctcattaacgtcggcaacaaccccgaccgaccgaggccgggccgattgtggctacgcaatcgctaccgggttcaccaacgactcgcgatggcctttccagccgatgaacgaaaagatagcgatcctggattcctaacaccttatgagcccggacactttcccgaacaacgtcacatggccgatgcattttgctatctgcctgaaagatgtgaaaccgcggctgatgctgctcatctggcgcaggtccacacccagcgcagcgccggtgctggattcttgtttcgtgtggacccgatgccaggtgggcgagcaatgattttggttctttcccatctgaaacccgattggcactacgcatttgggctgattccgggaggagccgatttactgaccggatcacccatcggaaatgccggctatctcttggctgctccgcctgacgaaccgcggcctcttcagatctcattgagtttgggtgcgaggtttcgtttccgcctcacggccaatccgaccaaaaaaacaggtacgcctgcgaaacacgaacgcataatgatggaggaacagggaacaaaagatcctaagagaaatgggcgacgcgttccggttcgtcccgaagcttacggtcaatggcttgtcacccgaagcgaaatccatggatttgggcttgtagagcctcttgaagacacccttcttactgaggccggatatgtgtacgtcaacaaaactcacgattccggcaaaggccaacgtctgcgaagcgtgaactacgagggtcttttggaaattgtcgacgtggagcggttccgaagtgccctcctctccggcattggccctgcgaaggcgttcggatttgggcttctctctatagcgcctgttaactcctgatccaaggagaggcatatgagaattcaagatctgcacatcttgccgaaattcagggattgttggagctatctgtacgtcgagcactgcatcatcgaacaggaagacaaggccatcgcgatcatggacgcgagcgggaaggttccggtcccgtgcgccacgctttgtctgctgatgctcggaccgggcacgaaaatcactcacgcggcgatcacggcgctcgctgataacggttgtctggtctactggtgcggcgaagagggcgtccgattctatgcgtgcggaaatgggaaaactcgaaacgcggataatctcatgcggcaagccaaactctgggctgacagccgctcacgcctggatgtggtcatgaagatgtatcggatgcgcttcgatgagacgctggatgaatcgctcgaattgccgcaaatacgcgggaaagaaggcatccgagtgcgagaagcctatgctcgggccagccgtgagacaggagttgaatggaagggacgctcatatagtcgagattcctggcattcctcagacccggtgaatagagcgctctccgccgcaaacagttgcctgtacggcatttgccaggccgcgattctggcgctgggcctgtcgcctgcgctcgggttcatccacacgggcaaaatgctgtcgtttgtttacgatgtggccgatctgtacaagactgatgtgtccatacctgtggcctttcgagtggtgtccgaagagtctgatcatccggagaccagggctcgtaaaggttgtcgggacatattcagagaccgacaaatgctcaagaagatggtctccgacattcagtttgtcctggaccttcagaaggacaagcgtttggaccagagctgccttttcgattctgacgcggcgctgccgggagcgctgtgggacccggttgaaggctcggtggacggaggtcaaaatttcggcgtgttggccacggatggagacggaaatggtagtcctgatacttgagaaggtcccgacgggcctgagaggtgagctttcgcgctggatgctcgaaccgaaggccggagtgttcgtgggcagcatgtccgctatggtccgtgatcggttatgggagaaggtttgcaaggattgccggggcgggagttgcgtgatgattcatgattcaaataaagagcaggggtttgccattagaacggaaggcgaggccaggcgcggagtagaagacttcgagggtctttttctgatccgagtgccgtaatgacgctagtttcgtcagtattgtccccacgcacgtgggggtgaaccaggctggtgagtagttcccagtagggcagtttctattgtccccacgtacgtgggggtgaaccagtgcagaaggctgtgggccatgtcctggaagaattgtccccacgcacgtgggggtgaaccgtcgatccgataccatcgagcgagctgtacgcgattgtccccacgcacgtgggggtgaaccgactctccgtcctcgagcatctgagtcgctgtttctaggcgccgtttccggcgggtctccagagcgaagtcaggctgcgccgttcgtagcggaggagatccgccggaaacgtagaggcgtctcgctgcctaccacaacaaccttttatgccatgtagggatcaggcgagatgaggaatttcacagctgcagtggaaaggcgcgccgatagcgggttgtggttggttacgcgccaggatttccgggagcgcactcgcaagccgtgaccttggatgaacttaatgaaaatctcagggaagtcatagagacgcttctagaagagggtggaccccggaatatatagatcaaaaagttacgagcgtcccctaatcttggacgaaccagtcacgtggttcgcccgcctcttctccatgaggctgaattaacctcctaacaatgcgaatatggtatcttcatcgaaaaggacgggtcctccacctggcggccctccgatttccgcatgcccccaccgcaaatcgcggcatccttgaattccggtgaactgcaaacaacgcgttttacgtcctctttgtgaaatgacacaaatcgggtgaaatcatcatccaggttgccctgcacggggcttggctcgtgctgacggcgtcgtatatcgtgctcgtccaagaattttttcatgggtcggtcctctcttatcgtctgaatttgtcttgaaagcccataatttcaagtccattttgctgagctttcaatatattcggatgcaaaatcagcgcgggggattcgcgattcaagatttctcgcgcagaggaccctggtttgatgataattagtattggagttttgggggagagagtgtggacttttattacagaaaaagaggtccctcggaacatctttcaattaccagcgcttccgatacagtcaatttctctgtgcgcctgccgcgagcccgaaccgcctctatttccatggcggccatctctcgataaaataccgatctatcaattttcgcttcaggattttgtccgctaaaggtttcctcgaacttgttgcatcctccgctttgcgcttcagaaccgtccggtcgcgtaaagacatgtggtatcccggctaatcggcagatcatgggccggtattcatacagtatgcacgcgcccgcgaaattcagggcgcagacagcggtcctgtaacgatcgccgtgaggcgcttcgcgcttggcgtcaacaatccaccgggatcttgtcagaatctcggattgcagagaaggttccagcatcttgaaaccgaatcttacataagagatctcgatgaaagtatgaagggttaggtccacggagcagcaaatgacaccattacagccctcacaggtcaagccaatcttttccgcggccgcggcataggcggaatcaattttgcgataaagctccctgatacgaggtaccaaattttccccagtgaacattaattgcagctccgtcggacaataagggcgtttcaaaaagtagaggcgcttcgcgaagtaggggcggttcgcgaaccgcccctactctccgtcttacatcgttttggatctcgatcactgccagcttatggcctcttccgggcacgtatcgatagcctcctggatttggtcctcggagcaagcggtttggcttgtcacatgggccttttccgtttcctccttcagctcgaaacagtcttcggctatggccgcgcatgtaccgcagccggtgcatttttcttcgtcgacagctactgtctttgccatagtctctcctttcgatccggttgcgcgattttcgcgcgcagaattcagcgtgttgatcatgtgaccattacatcttcccgttttttcagtcaacccctattgttaggtaccgctgggtcctttagctggacagggtgaaagtaaatgaaccaaacgtgagacaattgtggggcaggctttccagcctgccttttcttaagtgttcgtgacggcaggctggaaagcctgccccacaaaagcagtttgcacggtgacagacaggtctgattcttcctgaaaattttgagatgcgcgtgcgcagacttttttgctatagtggcgctaatcgaggatttgcttgctttggcgctgaatgttatatttctttttgcgtaaccgggaaccgcggggaagcttatgttcattataggaaactttatttcagcagtggccggagtgctggacattgtgctcacgatttatatgtggatagtcataatagctgcgctcatttcatgggtgaaccccgatccgtataatcctatagttcgctttctatacagcgtgaccgagccggttttcggtatggtgaggcgtcgccttcctttccctcctatgggcattgatttttcaccgctgatagtccttttggccatactcttcctgcagttgttcctcgtgaaaacattgcatcaaatagccgtgagtttgcagtaagaacatattcaataagctttggggattgcatgtggggcaggctttccagcctgccgtttcttaagtgtttatgatggcaggctggaaagcctgccccacaatctaaagaatgctccggcatgtatatcgaagaacaagaaggcggcgtaatcctcacggtaaaggtgattccgggctcgtcgaggaacgcgctcatacagggcgccggcgacaagttagtcataaagctgacctctccacccgttgaaggtaaggcaaacaaacaactgatgaaattcctgagcaagaaattgggagtcccgccttcgtcgatcagcatcatgcgcggaggcgcgtcgcgggagaagattttgttcatagccggcgccgatggagcggcggtgaggaagaaactggaatcagagtggaaatagttgatagaggagaggtctgttgtggcccggttccaagagtcgacggcgctttcagtccccctttatgaaagggggatacagggggattttatgaggcttccttacagcaaaggactcaaaccttttgcgagggaacttcgcaagaacatgaccgacgcggaaaggcgcgtatggggcagaattcgaagaaagcaactgaatagccgtcaattctacagacagaagaacattggcaactatatagtggacttctactgtcccgcagcaaagttgattgtagaaattgatggtggacaacattattcggaagacgggcttcggaaagacaaggacagagataaccgtctgacgagtctagggcttagaatcttgcggttcagtgacagagaagtcttcgaaaacattgaaggggtcctcgaaactatttgtgagtatttgtgattgaaaatcctcctgtacttaaacattaaagcaaaaatccccctgtatccccctttataaaagggggacaaagccgcctttaaaaagtgggacttttcaaatcctccctttgctaaaggggcgcctcgtcatagccccccttagtaaaggggggtatggggggatttgtccctaacgctggaaaaacgctcacttagaataaggactttgaattctttccgcgtggtctgccttctctgcggtgatggtttttctatccgcctatccgacattttttcttccctccgaaacttttctcaggtatgcttcacgaaaattccatctcagtggaaactaaagagacggctttgcatcctctaaatctccctttgttaaagggggatttaggtggcttttcaatatgttgaaacaaatccccccgtaccccccttttagaaaaggggggaaagtggaggggccttggcgcatggggatttgaaaagtccccctttgttaaaggacgacttaaggggtttatcaatatggccgtgtgtgggtcttacataggaacgaaggcagtgttcgagttccgcaatttaggctgcgttttgggacgcagatttttcttgacactgcctgtcggctgatgttacaaggatgtaaccaaagaagtctgtaaaagacgaaaaggctgtgataggccgcacgggaatgaggccaaagcgccccttgatctctaacggatccaggagattgaggggggcagggcttgtacgcggcaaaggttattgacagaagtctgaactgccttcgggcgatgttttgatgattctatgtggattgggaggaagagatgaaaaaagttaggatggttttgttggcagggctgctgatcgcagcgctttgcgcgcccgcccacgcatgggaattcgccatgacgggtaactatgagtgggattatttctaccattcccagggacccaatgggttcttcggcgcgcagggtgtgctgaacccggcgctcgcaggtaccgcattgaattggtggggcgcgaatttctgggcaggcgccagactgcttagtggcgaccagttggggcttgtcaccgggttggacgcgaacgcccagttcatgaggcagacgttcaatcctgagatacgcgtcaaccccgccgtcaggctcaggggccagtatattataggctcctggcagcaatacagcggcggtcctgcggcttttggaggcaacctggcccatgcgagttcattctatttgaatcagcagacgggctccgccattaccaggccgatagacaccggtttctggaacctgtggtgggcgactgcccaaactccttggggcattcttgttatcggcaaaaggccgtttgcatttggcacgggctcgatggccgacggcgagcacacggtgtgctcggaaagtttagccatcgtcgcgccgtacggcccgctgcgtatcggagtctttgcttatccttggagacaaaacgtctttattgacagtcaacgaaacctcacaggcgccggcgtaaatcagctcgggcaaatcgccacgaatacgagcggcggagggggccccaagttgtgggatacgagtggtgtcaggctgcaattgccgcagatgggcgcattcgttacgtactctaacggtcctctggatgcgggaataagctacgagcatttccagaaccataatgggcctgggatgtcggctgccaatcaatctatagcggccatcggcgtacccacgatcgacgcgtcgatcgaggacggcctgctctttgcgaagtacaacaacggcagatttttctttaacggtcagttggcctggtggcggtggatgaatcgcttccagcctccgcctattggtcagcggacggcttccgctctcaccgctctcggcctcggcgatccttatcagccgaccaacacagagggatgggaatttgataccgagttcggtttgctgtgcggccccagcaaggtcagcttcctttatgcctttttccccggtccggatcggcgaaacggcatctggatcagccgcagcgactggaataacatcgctctcggtcatgtgcccggcaactgggccctattcctgccgtacagctacctgatgggttatacgtacggttccggtctgcagttcgtgaatggtcgcggcgaaggcggcttcactgacgcaaccgttgtggcctcgagactcgattacgcagtggcggccaacctgaatttcagcgcgtcattcatatgggcgtggaggaattcgggcgcctggccgtggggcaccttgagcatcacaggtggtaatgccgccgccaatgcggcgctgccgttcgggctgccaaacttggccccggtagtaggaataccatttgccggactcggagttggtccccagaacgcaggagctgtcagggctccgaacatcccggacaacaacctgggttgggaagtcactacaggtgtggactggaagctgctcgagggattgaccatgaacctgaggggcgcatattggcagcctggtgagtggttcaagtttgcttgcgttgacaaggcccttgttacgacagtagttggtacgacgctcgttccagcccttggggacggagccgccatcggctcagcttgggccgtgaatcccgcgaaaacgattgacccgatctgggccttcaccggggccttgaatgtagatttctaatcaataatcaagataaaccgcaaaaaacccggagggctaaggccttccgggttttttttcgtccgatggtctttgttccgacttttgttaaaacagagggaagaccgtatgcttcaaaatgactctttgtggtctgaaggatgtgaactcccccttttctaaagggggatacagggggatttatgcgtcttccctacaacaaagaactcaaacattttgccagggaactccggaagaatatgactgacgcggaaaggcgcgtatggatgcgaatcagactgaagcaactgaagggccgtcaattttacaggcagaagaacattggaaactacattgtggatttttactgcccagcagcaaggctgatcattgaaatcgacggtggccaacattactcgaaagacgggcttcggagggataatgttagagatgcgtatttggcaagtcttgggttcagaaccatcaggtttactgaccgagaggtttttgagaacattgagggggttctcgaaacgatttgtgagtatttgtaatcaaaatccccctgtatccccctttagaaaagggggacttattacgccctatttcaaaggaaggcatgggggattttgaatcgcttcttggcgcctgagcgatggtggtccagtgcccgccattatgctggcacgtcgacggagtcgagcccggggttgccagcggtctgtcctctgagtgaagcgctgttcatatctgaaaatgtgagccgaaacgaggccacgcactgctggacaagccagcagtggcgcccaaccagtggcatggccaattaatgttgggtattgttagccgctcttcaaagcctgtggcgacggctggtcgaggggaaagaacacggccggaagcgttggtgtgtgccactgctggcttgtccagcagtgcgacacctggcctccggccggacaggatgtggggagctgcggccgaggtctagaggtcgtcgaaatcgaattcaacctcgccgtcgcaaaaatcgtcttccaagtcgagggaggataacaaatcggcggatcggccctccagagggtcctcaaagtcagcgagcgcatcggccagggattcgtcgtccattcggccgatataataattaatattgtgtgagtgaggcatgcgaactcctcccggtttgggtttggcgccatcgcttggcaactgaaaatactaaaacataacaaaagactattgtcaatacttaaagtaatacattaggaaaatgatggagccaaacaccgagggaggtagcgccggctggaaaatccccctaaatccccctttatagaaggggacatctgaaatcccccctttactaaaaggttcgggcagattttgggccgtgtggcgccctcgcaatgacagagaactctcctccgcgctttccgcgttctctgtgatgaagaattgatatccgctcgcgggaggggcaggaggccggtcctactcttggaggtttcccctggagaggatcaatcggaaaagtttaggggcgatggtacgagagtgttgaggattgaaattgtcatccatctctcggatttcatcgagctttacaggtcttttgaaagctctgtaccaatgaaatttgatcacgagcgcgtttcctgatttcggaggagtcccgccggtaggtggggcgcctgtgtcatcaatctcctgctcgcttacatgaggcatgtcatccccgagcttcttcacatcctccatgtaccaatctccaacccgcgcgtgaccgacggcgccgattctattcacgtagaacaacattgacaaacccttacggataccggccgcgccggctgggtcgccaacagctatggcgccttgtggcagaaatgtcggccttgtcattgatgatattccagctccgaagagggtatcctggcgatcatctgtgattggcagctcgacaatttgtatggcccttttcttctcaaaatggaacagaaggggcctttcatgtcgagcgtaaatctgtaggggataaaagagattttccaactcgtgccattccaggactcttgcgggaggatgaacgattatatcccggcccaacctggtgatcctatgccagaaaccgaaactgaagggtggcctgcattccgccctgaccctgtagctgaatccttccgcttcgttcctcaattcatagcccaatccgacgagcacctgccgaagaaaatcgatgatctcagaatgatgaatggcacggtatagaaagtgcttacagaaccttagatcgggcttgtggtcaacgccacaatcggacgcaatcccttcaaacatgaaaccgcaagcgcggaagcattccgcgaacccggaagcgactgtctccggtatgcgcgtgcttgctcttttaatgcccatttccgcccactcggttatttggcgccgcaaaaagcctgtggccgcaatccgatcagacggctcagggccgattccgaaggccagtatcctaacgtgatcagaggattcttgcttccacacgctaacacatttcacgaccttttcgatttccgctatttcgcaatttaggttttgtggcccatcagagacgcaattttccacgagatcaagtatactggcttcattatcggcccatggccggaggagatcggtaatatttgccaaatcgctattcagagcgggccggagaatcactttcatcatgatccttgcgctaaagaatgatgaatgccataaaaagctgggaggcggaaatcccgccgggaaacttaaacagttgtcgaaaattctgtccgaatgaagcaggccatcggcggtcatcgaccgtcattcccgcttccgcaggaatgacgaaacctcactctcgcaatcggacaaaacttttggcaattgcactagaccaagccctgccttatggtttgtcgaggacagggttcccgaattaacaatgcaatctcatgatattgaaaaagaagggaaagttcaacagttaagatggtaaactttctgacgtcatatcttgtggttggctccaagggaatgttgggcgctcagttgctcaagctgcttgcagaatcgcgcattgagagcgcgggagtagacattgaggaagtcgacatcacgcgattacctgccgtgctgaacgccattgaggcgctaaggccccgcatgataatcaattgtgcggcaattacagatgtggagggctgtgagtcggcccccgatctcgcttttgccgtgaacgcgcaaggccctgaacacatcgccaaagcttgcctgaagttcggttgttcgatgcttcacatgagcacggattatgtatttgacggccttaagggcggttcgtatcgagaggatgacccgatcaatcctctggggatttacgccaaatccaaagcggagggcgaggcgcgcgttcgggagcttctgccggaaacccattgcatagtaagaactcagtggctttatgggcttcacgggcgaaatttcgtcgaagccatcctgaaccaggcccggcaagagaatatcctgcatgtggtaaatgatcagcacggttcgcccacatacgcttacgatcttgcggaggccctgataaaactctgcgagatggaggcccgtgggacttttcacgtaaccaattcaggacagacgacctggcacggtttcgcgtccgccataacaaaaaaagcaggtttgggtaacgtggaagttctgccaatgagtacttcggaactgaacagacccgctccgcgtcccttattttccgcgctggacaataagagatacattgagcttaccggcgcgccgctcagacagtgggaggaggcgttgagcgaatacttgaggctgagatcaggtgggtaatgctttgaggcgtatctattcggccacgtgagggaagcagaccgtgtataaagttgtcattgcaaggaattaatggtggaacaggcttccaaaatccccccatacccccctttacaaaggggggcttgaaatcccccttttttaaagggggatacagggggatttcaaatgaccggcaagatgccggtggggccagcaatccaccaaacatggagattgcttcccccgcttttcagcgggggcgccatgacatgtggcggaccctcctcacataaccaacgaaacttaaatatgcatgaacaaaatatcaatgtgaaggtggctcctacaatgggaatgacaataacggaaaagattctggcagcgcacgcgagcctggagtcggtcaaaccgggagagcttatagaagcgcgtatagatctggcgctggccaatgacatcactcttcctctcgcattgggcccgtttcgggaagcagagggaacgcgggttttcgaccccgagaaagtggtggtggcgctggatcattttaatcctgccaaagacattcaatcggcggaaatgcttgctgaagcccgtcgattcgcccgggaggccggcctggctcatttttatgatattggggaaatggggatcgaacacgtgctgcttcccgagaaggggctggttcttcccggacagctcataataggcgcggacagccatacttgcacttatggcgcgctcgctgcgttttcgaccggagtgggcagtacggattttgctgcggctatgctcaccggggaatgctggttcaaggtccccgaaaccatgcgctttgagttgaccggtaaaccaggcgcctgggtggggggaaaggatcttattctccacattatcggagagattggcgtggacggcgccttgtacaaggccatggaattttcaggccccggagtccggaacctggggatgtctgatcgatttaccgtcactaatatggccgtggaagctggagcaaagaacggagtttttcctttcgacgacattacacgagcttttgttgcggatcatagttcgaagaagtatgtggtctatgcctcggatgatgatgcgaattatgtcgaaacacggcgaatagatcttgaccgaatagaaccactggtagccctgccgttctcgccggacaatgttcgtccggtttcagaagtaaaagggatgcgactcgaccaggtggtaatagggtcgtgcactaacggacgaatcgaagatcttcgaattgcggcttcaatactaagaggcaggaaagttgcgaagggcgtgagattaatagtcatcccggggacgccgactattatgctccaagccatgtctgaagggatagcgcaagacatacttcacgcgggtggagcaatttctacgcccacgtgcggcccatgcctgggcggtcatatggggattctggcgcgtggagagcgcgccgtttctaccacgaaccggaattttgtaggtcgaatggggcatcccgaaagtgaggtattgctggcgtcgcccgctgtagcggctgccagcgcggtggctggagttctgatggaccctggagacttatgaaaaagtaactattcgctcacgcgaggcgcggctttgtcattacgaggagtgaatggcgccacaggtgtccccgcctgtccgtcagagatgaccggcaagatggaactgtctcagacttgcggcctaggggatttacaatgtaggggcgcttcgagaagcgccctgatttcgggcggttcacgaccgcccctacaaacgatgtccagaaccacgtgttctgagacagttcaagatgccggtcccacaggcacttcccaaagcaaggagattgcttcgctccgctcgcaatggcaggtgaagcatggacactctccctgcgtaattgaagaatactaaaaaaaaatgttgcaacgcattttttttctgctatggtgaaacatcgcagtgaggccaaagtgaggcaatcgcgggaaaaaaatgacttgacttccccgaattgttctgataatcaacatgtcaatcagtttttatttgtctatgattccaaatgcggttccccggttttaggctggaggggcctaataaaaggaggatttgggtatggttaaaaagatgcttgttgtgctaagcgcggtggccttggccgtaaccatggtcggcgtgggatgcgcgtttaatccccttatggggggcatggcactttccggcgacatgattatgattcctatgaaggtgaagagcagctataccagggtgtccagcggcacggccggcggggacagcaccttcttcatggatggctgcgagcagtacaacggcggcttccgtccctggctcggatggaaggggaccacgtgcgcgatgaaagttcaagttattccgcccaagtgtgttgctcctgcttacggcggccctgtggcttggggcgctccacctagcttggcccccggcggcaaactggtcagcaacatcgaatcaactaagatcgtttcgccgggctgtgaaccttgtgtaaggcctggcctacagtatgaaatgattaagaagcaggtagtgaaataacactgcgctgctaaccatacacctgaaaaaggatcgggtcgccccgatccttttttgtttttgacggctgccggagcaaacagaccaaaatgattcggcctaatcttcccggtggaacctgaatatttcggccacgaaagagttctgccacgtgcgggaaagcggcgtttcacccgccactgcggggaataacgggggaaaggtcttccagcctgcttactcgggattaatggaaagatgccggtcattcgcaattccctttcctgaagagcgggagattgcttcgctgctgtggcaatgaccctttgctccgagtaatggaatccctactagcctacggaggctgacattggcaaattttccgtacgtcttaattctggattttggatcgcaatacacgcaacttattgcccgccgaattcgagaagcacgcgtctattgcgaaattcatccgtttaatcgtggaatggaagtagttcgaaggaataggcccgcagcaatcgttctgtcaggtggcccggcgagtatctacgatccgggggccccacaactggacccaggaatacttcagctcggcgcgcctgtgctgggcatatgttacggtttgcaggcaatagcgcatacgctgggaggcaaagttgagccagccacagaacgggaatacggacgtgccgcgcttgctcaaattaatcaggaatcagtgcttctacagggtatgtccagtgggaaccaggtctggatgagtcatggcgacaaagtggttcgccttcccccaaatttcaaaacttccgcggctactgcagatacgttcgccgctgccattgaaagcgatgatcacctcatcaccggcgtgcaattccatcccgaggtggcgcatacacacaacggaagcaggataattgcgaatttccttttttcgatcgcgaagcttaaacctgactggacaatggcttccttcatcgaagcctccgttactggtctgcggactcgaataggagattcgcatgtagtcgctgctctgtccggaggcgttgactcatccgtcatggccgcgcttcttcaccgagcaataggcgataaattgcaccccattttcgttgataacgggctgctgcgaaaagacgaagcggccgaagttgtctccacatttcgcgaacaactcggcatccaactccatcatgtcgatgccgttgatcgttttctggataaactgcgctcggtaacggacccggaattgaaaagaaagattattggtgaactattcataagagttttcgaacaagaagccctccgatttccgaatgttagattcttggcgcagggaactttgtatcctgacgtcatcgaaagtgtttccttcagaggagggccctcggtaaccataaaaagccatcacaatgtcggcggcctaccggaaaagatgcgcctggaattaatagaaccgctcagggaactgttcaaagatgaagtgaggacattagggactcaactcggcatcccggattcgattgtatggaggcaccccttccccggacccggcttggccgttcgcatacttggggaggtcaccagggagagagtagcgcttcttcaaaaggcggacgcgattgcaatggaagagattcgtaaggcgggtttatatagagacatttggcaagcgttccttgttttgttgccgatccagactgtcggcgtgatgggggacgaacggacctatgagcatgtagcggcgttaagagcagtcgaagcaactgacggcatgacggccgactggtttagaataccgccggacgtgctggccataatttcaaatcggatcataaacgaagtgcgcggcattaaccgggtcgtctatgatatatcttcaaaacctccgagtacgatagaatgggaataaccccttcgcctccctgaagattagcgaacccaaatagtcttaacaccgactctatacagcacagggatgccacggaaatatggcgccacaacaggaatctcgaagacctctgcggtaaatgattgtggaaactagggcctgccaccccacctctttataaacatttttagctcttccatcttttcaggcgggaagtcttccagaattctcttgaattcatcgtatcgaggatcatctctgagcggatggctctttggtatagtcttaattggatacggatccgtgcttctcattcagattctcctgtatcaaattttgatccgaggccgtcaaaatatggaaccgctaatagtccacttgatgaatcttgtcaatgggaaaagcgccggtgaaagccattaagtctaggttttctgctcgggccgtatctacagaaattccggaagatgctgtcatttcctaaatcctgaggtgagagagcggtgttgacctggcggcatagtcagggaatgctaacattctcctctttcgagacgttcaggtgtcctttctcctagacaacagggactatgtatcactgcctgaacctggtgtgggcatataataatgtaaattatgaattaattgtcataacatttttattttgacagataataccatatctgataattcgtaaatgagaatttgagccggggttgtggatgttttctatcatgtcaggacgctccagcgattcagtgaaattgcctaaccataccgtgctttacggtataattttgactgctcttggaatctttgtcctggtgggatcagcgacgcgactgtatgagctgcgcgaattttttcctctcaggctgcccgagcaggtaaatgagtttatcttgaattacgtgccgttcatcctaggcactttcattacgacggtggccgctctggccggattcatcgtaggtataaattggatcttgaacggtttcaggcagatgtcccggctgcacgttgtgcttcgatgggccggagattactaccaacctgaaagcgtctccctcggcctaaaggaagggaggctccgttcctacgacaagtctccttcgatactcttctcgttgttggctcggttctggggtaacgcgaggtttatttctgaaattcccgctgaaattgtccgatggaacgtaagatttctttggaaggcgttattcattgggatcgctatccatcttctgttccgtctattgaacttggccccgtcatatttatgtgggctcgggctgggaaccggttacgtggcgccttcaccgtaccctctctacaatttgcttgctgtggtgtgcgtccttcggattctgactgccttgagtctcactcctttaagaaagcctgttgttggacgagaaatggactcgatgatagtcgaagggagaggccatccttcgctctttttttccatactggaggaagggtctcgtgttttcgcccacaggggtttccccaacagaatttatcggtctaggcctgtggtttgtaacgatggtgagacgcttatcggcactctcatcgagagctttccggagcatgtgaggacctcctgccgtttcgcagcgctctttagcctgctacttggcgcgatgatgattctggtcgggtttctccaaattatttttatgcaataccccaccttttccgtaagttatgaggagtttttcagactctatcttctcagcttgcttgttgatattattatgaacgttgccatcattatctttggcaagagctttttggaacaggcccgttctttgatgtccatctatcggttcaagtccaatctcgtctatgttgaagccaaaggcgactttgacaagaagctgcccgacctgggaaaaatcgtatcaaaagaccggctttttgatcccttgtgccaatgcgcgttcaatgtgagatacttctctgctgaagccatatcggaatcggtaaatcctgaaggcgtaagggaactggtggggctcgaaacctcgggtcggctggccaaagacatcgggcgcctgaaatttctgccgtttcaagtaaagttcgtggatagatacccttcatcgtggattcagacagaggaagctcagaacgacttggaacaacaccttccggaagcctccgagaggccgatccgaaatgaaggtgaggcgatttcaccagatgttgcggcttcctcggagagttacggatgattgtgcagagcatagtttgtttttccttagcgaacatgattgttatggcggctgacgagcctcaaatgaagactgcagctctcgcgaccagcgcccgaaccgcggctatttcttcccatatgcgcttggagcgtgagaatcacgtcagagagttggaactcagacggctaagaagtgtagtctgtgcgctaggtggcaaacctcatcatgcgcccattttactgaaggctggcaaaaagttcgagattgatcctatttttctggcggcagtgactcatgtggaatccagttttaggcctcgggcacgctcgggcaaaggggcttgcggtatgatgcagcttcgtcccattgtgacaagggcttacggagtagctgatccgtgggatccgcgtcaaaacattatggggggagcggcatatttgcgtacttgtttccacagataccgcaagcattccaactcaacctttctcgctctggccgcctacaacatcgggccagggcctgcagagaagctgagcaaatcgccggccgccaaacggttcgtgaaaaaagtgctccttgtgtataatcgattcacaagcgagccaatccggataagtcgcagattttaggacaaactgttatgattgcgccgtctgcgctgttcgagtcgaatcctcataaagcgcctcgtcctgcgaaaaattgaggtgagcagatgagaccttggttaacgagaactttgctggttgccctgatggtcatgatttccggaacactgattctgagtttcgcggaggactatctggtaattaagaaaaagggtggcccaacccaaaaagtaccccttgattttcctcccgagcaaattgaatcatttcaagtggaatcctcagggccgagccacggcgcgccatcggtgaaggaacgaagtcccgctgcggaagatgaacaaactgttcaatcatctaaagagctggagaaacctgcgccaatgaggcggcctgaatcccgacctacccagataagcccaggggctccgtcgtcacagccgatggttctccggcaaaagcctgcgcccggcccgacgtacacggaacaagaattgaccaccccctcggtggaacagcaaggcccggctcagaagatgcccgaaagggcgcagccgcgtgcagaaacgccggctgcgcctgttaaaaggcctgttacaggtcctgtggccgcagtcgctcccggaggcaagggatctttttttgtaaatgtgtataagttgccggattctatcaaagccttgccggattatagcgcgcttcgtccgactgagtcattgacagcggatagagtcaatctcgacccaagcagagggcaaagtgaacctgcaggacttccggaaaacaccgacggactaggtctacgatttatgggtgtttttgaggtagccggcgagggcatctttaaatggagcgtgcaagcaaaagacggtgttcgactaaatattgatgacaaaactcttatagagaatgatgggattcacgacgcggccgtcaagacgggttacattcacttgggccaaggaacacattgcattgtcctggataacttcaactctaagagcgctcctttcttgagacttcttgtaacccctcccgtcggtcaggaacagattttctccattaagaacggtttggccgggtggaaagagcctgcaaagccctatgacgtgttctggggtcaggtttatttcgtgcccaaaggcgcctaccctcaaggaccggacttcagtcgattgagccctataggaaggatcatagctccggagttgaatatttcagggggggacggattcccgggactaccaggcagaaaggatatggtgggaatccgttacgagggatttttcaatgtccgcggtgcggggatttttgcatacaggctagtcgcggaccattttgctaggcttaccatcggcgcacataagattgcagaaatatcccaaagctcaagaggaggtcctcaggggaacgtgggttgggcttttctccaacagggaagttatccaataacattggatttcttccatccggaaggcccaccgcgcctgggattgtacgtcacagagcctacgaaagcggaggagatcttttcgccggcccagcccttggaaggatttacagcggaagagggaaaggtgaatctcatacctgcattcgtctatttcctcagtcccaatactaagaagctgccaaactataacaaactctcgccatccggaatgttcttcacgagagcaattgattatccacgggatcgaggccccagggaatttcccgggattcccaaaagggaagactggtttggaatacggttttacgtaaaattctcactcgaacagaaggaatcgggaccgtacactttccgtgtagtctgtgatgattccgcaaggctcatccttgacaaaaaaatggtcataaatgtggagagcaccgggaagaagtcggagcaaacaggaactgtaggtttggaggctgggagccacgagatgtttctggactactttcaggcgaccggccctgatggcatccagctttttctaaccccgccgggtggagaagaaaagattttcgcgtttcagtgacgccttaatgccattaagatggaaatcggccgcttccggaaaggaagcggctcattatttgccaatattcttcacccatccataaggatccggcttaagacctgtctgcatcccggtgatctcgtcaaaaagcttagcagacagttctcctgtcttgccatcggctacggtatagtcttttcctttatagcgaaacaggctcacaggagaaattaccgcagcggtccctgagccgaagatttctcgaagattcccattttcggccgcagccacaatctcctcaatggaaatagaccgttcagttaccttcatccctgtgtccgaagcaaggcgtaacaccgaatcccttgtaacaccgggcaaaatggtgccaattagggcaggcgttatgacttcatctttgatgcggaaaaaaatattcatcgtcccgacttcttctattgccattttgtcgacggcattcagccataacacttgtgtgaacccttccgcctgggccttttccgcggcaagaagcgacgcggcataattggccgcggtcttgacttcccccattcctcccctggaagcccgaacgtactcatcagtcactttgatctttacaggcgcaaaaccctccggataatacgcccccaccggggaaaggataatgaaaaacaggtattccttagagggtctcacacctaaatgaatgtctgtcgctattactgtcggtcgcacatacactgaggtgcccggagaacgaggaatccaatcccgatccattttaatcagtttgcacatctgctccataaaaagatccggatcgatagagggaatgcaaaggcgctcgcaagatctgttaaaccgtttgatgttcatgtccggacggaacagcaggatatcgtcctcattaggtccggcaaatgccttgagtccttcgaagacctgctgtccgtaatgaagcatcatggtagcggggtgaaggaccagatcttctaaaggcctaatttggggagtctgccaaccgcctttatcagccgagtaagcgattgtcagcatgtgatctgtgaatatgtctccaaacccgagcttgtcttcatcgtaacctcgggcgtcggacctgttacgtggaaccttgggcatggggcctcctgatgcagcctgtttcgacgaatactattgaataccagagggatttgttcgagtcaagcgcaggttttttcggaatgccggggccgcaaagccgccgcaaaggctccgcaacctacagaaaggccaacgaagaaaagcggccactgaaatggatttggcgggcctccgttcataatattctcatagtcccaacaaaaggatatgattacagtgccgccgccagtaatcatcaagatccaatcggtccatcgggccgtaaccggtttgcctttggattctctgcgcaacactatgactcctgcgaagatcattgtcaaagaaactattattggggccaatacggggccgacccacggaacgggaatcagaaaaagcaagtcccaggtcattaaacctggaggccaattaagaaataatttgagccacagatagaacgaaatgtcccacactccgaatgctacgacaaaatgggcccatgcttctcgacgattccgtccagccaaaatcccgatgctcatcagcatgatcagagtacataattctcgaccgagttcaatgagtaggcgcacccagtgctcattccccaaagctgttatttgctccaatgtaaggacgggaaattggaaacccccgttattaagtggataataaatggcgcgaaggtattctaccaccgcagcttccacaaagccgaaactaatcgcatacaagacgacggcggggagtttcttcaagattgtctttcaaggaagttgatgatttaccagtaatcgtcggatccgcagacttgttcgataaatcttgttcgcgaataggctgggcattcgttgcaggaaaaatcggaccagcgactcttgagggccgtgtccaagcattcgccataatggtcacaatctacttttcgatatggccggtccgtctctcgattacctttgaccaacataggtttgggttccatcctcccgattcaacctcccattttggttcctgctccatctcatccgagacggtgccggcaattgtgagaatttatccaattacgcatgttttcctaataatttcttgatatccggaaagacgccctaatttaagcccgaaaagaggccctacacccacttggcagcgcctaccttcacttgattgacatcaccaccttagatttcccacgaaaaaacaaattgttacggtatagactttttcatacccctcgaaacatgatttactaaactagtctggatccattgtcaaggggccgctcggcaaatcctccaaaaggtaatcattcatttatgcgggcttgccgaaaccactgttccggttctcaatagacaatcaaagcgcaacgtgttagtttaataaattctcaggtcggaaactcgctcggatccgcttatatcaacgcatgccggtggaaatgagcacggaaatagttgtccaactatcttatagcggggcgctggtcgccgaagtgacctacagggctggtcttcatgttgaagtccggatagaggaggagtttcagcacgaaagaatacgtttcaagctatcccattcccaaaacagagaactcgcaggaaattgggaagaagcgctggacatatatttcaatgagggcatctttgacacaaaggaccatatctttcgaggcgagatgcgtagggttggcagcgcacgagagcacaaatccctattccggcatgcggcatattcgcttttgaaggacctggaaatacacgggtatgatgtcaagatcagacacgagtagatcgcgtggaagagattctggtcccctcatcattcggaatgtccggaaataattggggaaacttgcctataaagcagtttccccgtagttcgcgtcggataacttttgttatccgagattggtagccaaaaagagcacagcacgattgcgctgcaccttcagacgaataaccttgttcgctttggctgcaacaacagcagcgttgaaggctgacacgtccgtgacaggtttgtcgtccacttccaggattacgtcgcctgccctgagtcccattttggcgccggtcccatcagatttcatgtcctttatccggacaccttcaccttccttcagtcccagtgactccgcagccccaccaggcacgctttcgatatctatcccaagctcactcgatgtttccgcggcaggagtttgtttaggcgctgccgaggcaatcgccttttctgttcgctcggctatttttacattcagatctatcgtttttttgtctctgaagacagtcaacttcgtcgaggtatccggtttttctttgcccacaagatttttcagatgcgagtgatcttttaccggctgatcgttaaattttatgatgatatcaccggctttgattccagctttttcggccgggcttccgggaatgacttgagataccaaggcgccgtcggtgctagttcttccgaaggatttggccagcgactcgtcgaccgattgaatgttcactcccaatagacctctgcgaacctttccatcttttatcagatcgtccatgatcagtttcgccgaattagagggaatggcaaaaccaataccttgatatcctccgctccgggacgctatggctgtatttatcccgatcacctctccggagatattcaccagcggtccaccggagttcccagggttgatggcagcatcggtctgtatgaaatcttcataatcgagaatacccatattggtgcgaccttgagcgctaacgatcccggaggtaaccgtctgacttagaccaaacggattaccaactgcaactacgatttcaccaacgcgcaatttggaagaatcccctattttggcaacagggaggtctttggcgtcaattttgattacggctatgtcgctttccggatcaatccctttaactttggcggaaaatgtccgcttgtcgcctaaggtaacctctatttcatcagcatcctttacaacgtgggagttggtcacgatgtatccatccttggagactatgacacctgatcccacaccaaagggccgggaacgtctgtcttcacctccgtcttttttgaatcgtttgtataactcatctccgaagaattcacgaaaagggaacgggtgattcttaaagaattgctcgaagtctccccccgtgggacctgatagcccttttttggaactcttaatattaacaactgtgggagttactttctccgctacttgcacaaaagattcacccaactgttttaaggcagggggagcatcggtttgggccgcggctatcggcgcgccagtggtaacaaccatcgtcaatcccgcgatcatcggaattaatgtggacatcaaaaaacctttttgcatagagagttctccttctgacggttcattaatcagatttgacctgtgtcctgaaatttggttctcatcataagtattaaaagcctacggaagaaaaaccggcctagccggacaaatgttaccgcgcaaacatcttgtgcgtgccggaagctgattattgtatccgttagggcatgtcaatttcgaccaggagtttctgtaaccagaaaagttccaggttcggattcagcgtcaggtttgctacggtcagggtccgtgtgaattacgatccagcgccaaacgccagaaacatcgggggtgaattcaaaagaattccgacctcgaggaactttcaaaagcacataggtgcctgaaggcctaatgaacactatatagaaacctatctcactttcacgacctgagcaggtccagcggaattctccggatttacctaattcaacagacggcagggggactaacgctggcctgcatgtcgcgctctcatcggccccgatacttgggacagcgataaccactataagcgcgatgatagacgtgagtataataatcgaggacaactgttttcccgccggatttgacaaggctgtctcctcccggaccgtccgttctccgatccgcacggtaagccaccgcagtgaaccaaggctatctcttttcgagtggtccacagcaatttaggtgcgtcatgggtgtggaagctaacccaaagctataatctttgcaagacctatcaaggctggcagtgtctatccctggccttggccccttgattttcctaaagttaattgtataaaattatatcaaataagcaataaacttgatttttattcaaacatgtattataaccgagctggcactgctcccacgaggtgacactatggacgccgcacagacttctcatgagaaacgaaccatcaatgtcaaagattttcttgaggatttccactcggatctcagtgatcagcatctgctgaaaaaatataatcttaccgaaagcggactcgagacattttaccaaatgctcgaggagcggggcatcctcgagccagatcaactccgggctcgtcaatgtggtcaacatcaaagcgctcaggttccattagatctcacggacgagaagtcctcatatatttgcccgcgctgtttggcttcacatgaaacaatgtttgacatatgccccagttgcggggtttccttccacgagttaataagtcaggaaaaaagcgtaaccgcttcaccctttaatgaagatgaaaatcgaaagattcgcgataaaactttcgaagatgaagaaactaaagaatatagcgcggtgggggctgattcgcattcccctctaatttcaaaaaatccctcgacagactcaatgcaagatatttttgctcatgatcgcattcctaaattcccatcatttgaggactccctggaagaaatagtttcaggggttcctttggagcctgctccaaccgaagttcatgcctcacaggcgccttgcgtctgttgtgagagtcaggccgaggctggaattcgtaacatttatgatcggaagagagctttgcaagcgctcatattcgcagggatctctttcgccgccggtttcttgggaatagtgtctctgagcctgtttgaggggcaatccttggccaggctcgcggtgttcttctgcacggtcgctgtgatgcttgtcggtgtaatattatccacaactggggcctttttactcctggccagagaaaaagtttatatttgtccgacatgtcatagagcatacccgaggatttgatccatagttttctgtatccctcgtcacattctttctttatcgtcgaatcggtagagacgctcgtcaaatacggcctcggatacgcatttccaccatttgtattgtgggcaagcgcttctttatgatagagggatgcagtcttcgtattatgacaagggattggagaatttggccatgaattcgcctcttgagcagcaacctcttatcaagacacaggaatccactgaggcagagaaagaactcgcagacgagaagcccagcttgaatacactgtttcccaaggacgagcgagacctcgatgctctctttcctgagcccgaggtgaagcaattattcattgacgtagctgcaaatttgaaacgcgtaggtcgcttcgtcagccgcatggaacaggacctcacctttaattcaaggctcaaaaaagataaatcaatgcgaagctgagttgcttctgcagggttctagagaattaagtgtcttctgagttcttgcttgcgcaagggcgcggagacgagtcatggatctggggcgagtatggaaagccaactaataagaaccatgtttcgaaaactgttagaggctttgcgcttcaacaaagctcctgctcaaagagaaatcgccgatcgcagtgaaagcagacgaaaggaagcattcattgtggacgtggacggtcttaagattcggggtgatatactcttcccggtggcgcgtccgtctcgcctttatccggccctgatcatttgccatgggatccccggcagtggcgccccgcggcctgcggacgatcctggatacgaaggattggctgatgactttgcctccttaggaataatcgcggtgatattcaatttcagaggctgtgggatttcggacgggaacttcgagatgatgggctgggcacgcgatctggaagcagtgctggaccgaatacttaataccccgtacgtagatccgacccgcttgatgctgttggggtttagtggaggaggagccgcagctatcaaagtagctgccgattcaccggacgtttacagcctggcggttgtgggaacaccatcgcatttcggcgccttcgaaaaggacccggatgaaatcatagtcgatttcaaaacgaggggtatcatccgagatccctcgtttccatctgatctcaatcgctggatggacgaattccgacagatcgaacctcgcagattgatagctcacttcaaaggaaagcatattttgattgtccatggggacgaagacgaactcatccccgtggaccaggcccaggaattattcagcttggcgccggcgggcatgaccgagttatctataattccgggaggggttcaccgcttgcgccttgatccccgctgtgtggatattctaaagaattggttcttgaagaccctcggctggagcgtataggcatcccagcgctcgtcttagatcttcctaattcagtattcagtcttaaacctggtaaaacttcatcctaggaagctcaacggcagtaagtttgttgccgtagacagctcccgtgtcaataccgactttaccgggagtaacgaaaggtgtttccagcgctgtgtgcccgaacacaattctcttgttccaatcatatgttgagtaaatgaattcctctcttatccagagaagatcctcctcagattgctgctccaaagggactccgtctctaagcccggcgtggacaaagatgtaatcatcagtttcatagaaaaggaccagcgagagaagaaactccagatgatcttcaggaatcacgaatgcctttcgacctatgccgccctcaacatagctcgcaatggtttcggctccgccattggcgacataaagcatttgatccttttgctggatataatagtccagaagcattttttcatgattccccttaaggaaaatgatatccccacccatcttcttaagattaaccatgaattcaactacttcccgtgattgcgggccacgatcgatgtaatccccgataaacaacaaaaggtcaccattgtcccgattccacggcaaaactttcattaacgcgcaaagtttatcataggagccatggatgtctccgacggcgaatatttttctactcatggctaagtgattaagcctcctgcatatacattgctctcaacgttttcgcatgtcaacggacgatctcgatccttgtcttcgcataattcgcacagctattttcgaaagctgaagcccgcgtgactcttaatatgctttcaattgccttcaaacgccgttcgcacaaatatatcgcacattttgaggaaattgtatgaggattgcaatcttttgtcctatctgtcaacataaacatatgccaatcacaagcctacgaggaatggaaatgaagtccttggaatataggagataatgtgtacattcgacttgaagggcccgaacacctgttggtaaagacggcgccggggtccgatggcctgccgcaagagctgattttggcgaaactgggatctgaccctgagcttaatctcttcttttcggcggaacgcggacgccgcgagcagccgggtctatgggaaggagtgactgattttcatctgctccaagccctggagaattacaaacgtcgtttgggacacctcaaaccggcattggttgcggtcaccggcaaatattcagaaacaatccaagggcatagcctggagcccagagaataatgctttggaaaagaattcttctaacttccggattactgatcattgctctgatggcggccgtcctgttgtccctacgcttcttaccggaaacggagctgataagaaaaggggttcaggacaagctaaccgaattgaccggccgacagatcgtcataggctccattaaatttaccagttctttttccaacctgattaccttaaatttggacagaatagtggtaatgtcccacgacggaggagaagtcgcgtcggtggaccgcctgattctggcgccgtcactcaaggggttgctaaacagggaattgtctatcaagtcggccaccgttacgggattgcgagctagattcgagcgtaccgccgagggcacagtcaaagatccattagggcatgtggtcgctgccgggatttcgcaagtcacaaccgaagcgaaacatcccgtggacacaaaggcgtctgctagagcggaatcggacacgagtgaatcatctgcgcttgctcgaaaagaaggcgtgaaatggtctgtgagatctctggcccttgtggactgccgtatagattggatagaccggctggctgcgcctggaaaggctatttcgctgattgacatttcaggtcacttgacgcaacaaggggcgggtgagccggtttcggtcctaatcgcttcaagattggaccccgacattagcggaacagggctgatcagattagaaggtcagattttacctatagtcgatttttcaagcctggagggggccatactgtctttggcagtggagaaggcgcccgccgacattttgcgtccatattttccaacctggtggaccgcaggaagcgacattactcaattcacactgcaaggtcgaattcgatgggaaaaaggacaatcccctaaattttccttgaccacggaaatagtcccccgttccggtccgtccgccaaaattgactgccaaggagaattgatcgccgctgatgatttgtccgacgtccgacaactccgtatttcaggcgaaaccgacgcgctacccctaaaactgatagcgacgctgcgatcgatcggctttccatttgatccggaacaagttctcataaaggccaaaattaacggcgaatggaataggaaaggcccgtggcagctcagaggaactaccactctggaaaatgttgtggcgccaggcgcgctacccggaatcggccatcctgttcgagtcgatgctgaatttagaatggatcctgacaatcttttcctcgacaagaccgagttctgggaatccggacgtttggcttcgattattggaaagatcgaacagccgttttctgccgagcgagtgttggatctgtcaggcaacgcaataatccagtcacagtggttgcccggttttggggtcaaattcccgaaggctgttgatataagaggcccaatccctgttcaggcacgtgttagaggtcgatctgacgcagcgttaattgatttaaatggagacattaccaatgcggccgttcgatgggcgccacacctggaaaaactgcccggtaacgccgcgagcgtctcgctaaaaggaaaagtgaatgcggcgccggaaaagaaagattcacgggcgagatttaatggcgaagcccattttagaatcgccggggctcgagtgggcttggccgaccatgctccacggcttgaaaaatcgacaatccattttgattccaaagtgttggttaacggcaaaacaacagacctgaagaacgcctcgttaacattgaaaggcggaccggcttcaacagaaatgctgagcgccacggcaaatgtcctggggcttggttcgactcccaaattcaacggcagcgccgtggctcagttaaattcagacattatagcgctcctgggcctgcaaatgccgacaaacatggtgttgaagggaagctctcaactaaaagccggattttcaggtgacatcaaccacgtgagctggactttggacgcgcctttgaccaagcttgatatagctacggatcgttcattcagaaaaccggcgggtgtagcaggggatgtcaaagcctcaggcaaatggtccaaggattctttggcgctcgtgagcagccgattaacgctgcccggagtgtcggtcacggcggatggggacctgcgcgataggactggaaagctaaaagacctaaagattgaactcaagaaatctaacgcgaaggacattgctcggtttgttcccgcgacggaaggattcaagctttccgggcctgtggaggccactgttcatgttcgacccggtgataaaggaatggtggccggcagtgagattcgtcttctttcggtcgattgccgaccggccaaatccacttggggcttggaaaagcttcagggaaaaatcgaaatccaagggacgaatttggtggccgacgacattacgggaagagtcaacggcgcaatggaaggaccgttgaaaataagcgcggtattgaatcacttttcatcgcctggcgccatgctcggaactgtgtctcttcacatagggacgggccgatttaaagccgaacagttgagaaatactttaaataaggcgcggatccttattggctctttgcttaacccggggatccagaacaagggcagcgacttgatggaattcgagtctttaggaggagattttgaaataaaatcagggatcgtccacacactaaatcttcgattgaaaggcccggaatatactgccgtcgcgataggcaatcttcgactggatagcctggccctcgacgcagtagccggactacatactgttacaaccgccggcgccgcattgggaaaaatccccggcgtccaaaaattcgtgaaaaaacatgaagatctgctaaaggccaccggattggaccaggagcttaagcgctttggaattcaaatccccaccgatcaagaaatgaagccagacacgcaaacgccggttaaaactcccgtcacggtgtttgtaaagctcaaagggccggcgtcatcgcctgaagcgattccggttttggaaacagctataaataaagaaattctcacacgcttgaaatctcttttatactaacgaaaagtcatttgcattcgttttcattcgactgaagaataaaacaggcgataaacctcgaaagccgggaatctaatcggccttttagcttgacactagcagtcgatttgcatagataattgatgtgtacaagtcttccctttgttcatcttcaagaaaaaatcacacattctcaacgaggaggaccccatgtcaaagaagtattgggacgagaagttcgaactcatgaacgaaagtaacatgaaggcattccagttggagaaacttaaagaaactctccaatgggcctacgatagagttccatattacaaacaggcctttgatgaaaaaggggtcaaaccgttggactttcaaaagcttgaagatctggcaaagttcccctttacggtcaaaaccgctcttcgggacaactacccttttggcttatgcgcagtgcctatatcggaagtagttcgcattcatgcgtcgtccggcacaaccggaaaacccattacgggcccgtacactgctcaagatatggaacagtggacagactgcatggctcgcggtctatgggctcaggaagtcaggccggacagtatcgctcagaatgcctatggtatgggactattcaccggggggctcggctttttacagggcgcaattcggatcggcgctgccgtagttccttcaggcgcgggcatgactgagcggcagatattattgatcaaggatttcggaactacagcgctgttttgcaccccatcttattgcctgacaattatagaacacgcggaaagaaccggtgtggatttaaagaaaaccaaactccgcacaggacacttcggagccgagccctggacggtggaaatgcgtaaagaaatcgaggctagaagtggaatacatgcgtatgagcactacggactcactgagttgatggggccaggcgtgtcattcacgtgcgagcattacaaaattcatgtcaatgaagatcatatttatcccgaaatagtagattttcaaacattagagccggttgaattgggcaaagaaggagagttggtcttcacttcactgcagcgtcgggctatgcccatgatccgatataggacacgcgacatctgcactctgcgccgagaaaaatgcgaatgtggtcgaactctcgttactatggataaaattttgggccggacggatgacatgatgatcatcggcggagttaatgtatttccctcgcaagtagaatcagttttgatggaattcgatgaagcggagccgctttaccagattcgcctcaggaaaaaaggctatcttgacgccatgatggtggaaaccgaagtgaaacccgctgtctatgaggcaggccaagccaaaatcgacgaacttgccaagagaatatcggccagaatccagcaagtcataggaataaatgtgcctgtatctattttaccgatcaattcgatcactaggagcgaaggaaaagccaaacgcatcattgacgagcggtaagaaacctgaacccggagtctgattccgaatctgtagtagtaggggcgggtttcaaacccgcccctaccgagttttccacgaatgccaaaattctttagcggtgcgcgaatactttggctcgccactcgtcctgcttggctctatccgtatggccgagtatttcgtggcatcggctacgcaaaaggtatacctctcctttatatggattgacctttgcggcccgatcaaggtcagccacggcctgcttgatatcgttcaggtcgaagtacaacttggcgcgttttagtctagcctcaaaatggttggggtcggcgctcagcgctcgagaatacgcttcgagagctcggtcaatttgagactcagccatatggatttcgcccatggtcacatatgcctcagcaaacgacggttcgattctcagggccaattcaattttatcgagagcgcccgctgtatcccctttcttgagcagcgcttcagccaaaacttggtacgctgttgggtcgttcggctccaaccggatagcttcatgcaaatcggctatagcccgatctagctgtttttcattgaaatagagactgcccctcagcaaccgggcctcttggctctcaggattcatctgaatggctctgtctagatccataagcgcccgatcccctcgcattaaatacttaaaaacttgggcgcgctttgtgaaaagccagggatcatccggccgtcgttccagcgccttgttcaaatcactgagggccggcagataactgccggtaaccatgtgcagcagcgcccggtttatgtaagaaagaggattgtcgggctctagcacgatggaccggccaagtttttcaagggcctccggatatctgcccatcgtcataaggaccgacgcatggttcataaataatattgaatccttggggtcggtttcctctgccttttgataatctttgagggccttttgaaaatcatttagcactcggtatgcatctgccctataccagtaaatttgcttcatatccggatcgatttccagggccttattgaaatcttcaagagccttggctggttgggaaacattcaggtaagcgaaccccctgcggaaaagagcctcagcattcctgggtcgaattttgaggagtcgttccatttcgtggatagtggagtcatacttcttctgttccacgtaaatggctgctcgcccgaaataagcgtcttcttcattcgggtccaacgcagtgcttctgtcaaagcacttcatagcttccggataattctccctgtaaaagcgcatcagtcccatttgtgaatatacaggcgcaggtttcgacgccacctttacagcgcgctggagagcctcgatcgcgccatccaaatcgccccttctcgcaagcaaattactctttgctatccaggcctcaagcaaatttggatcaatttccaaagctgcttcaaagtccttcagcgctgcctcatatccatgaatcctttcagtggcctgacccctcagcgtcaacgccatggcgtttcgggcatccttgcgaatcacttgatcaattatttcaatggctttgctgaattgaccttcatcaattaaccgtttcgcacgctccgttttggatgaaggcaaccaaccacatcccgagagcaagagaaatatggagcatagaattatgctgtggatcacacaaattcttttagttttcacttggaacattgtcattgatcaactgatatgagcgcaaagtggcccaaaaatctgacaagctttcggccccttccttattcaagcctaatttgagaaatcatttttgtcaaattacagcctgtcggacagttctatagaaaaaaagatttttaaatatagaccaatggagtttactattaaattcaaaatttatataattccaatattgagttgattgattggaggtttgcatgaatgccgtttcggaagccctgccctatgtgcagaattttttccaaatgaactttctcttcagcggcctcgaggtttcctccaccatgattcttactgcacgcgtgtttatgatggtggctttgggaggtggcctcttgtgggcgatcttcaaaataataatcaaattcctggactgcatccaaacattcttggctaatttgggccacatcccctgggtattctacctcctgccgctactgattatcccaggctccgcggacagtctggcagcgaaatggatagggtatgtccttctagtcttggctctgctgggtttttcatttcttggcgtaattgctctggttttgtggaagtacggagtggaccaggccctgcggttaataaacagactgaggcgctatccttcagatctctcgccgacacaatctcgtgaatcttctatgccgtcgggcaacattgtgggcagctttgcggattcgcctcaatctattcgcggctaattgtcgagccgggcgcctctctcgttttgaccgctcaaatatgctatatgaacatcacagatttgctaagagagggcatccgtgttcggaatatccatgtgggaaattgtgcttattttggtggttgctttaatcctgcttggcccaaagcaactcacagaaacagcccgagtcctgggaaaagtgtacagggaaattcagaagatggcttttgatgtccgcaattcgatagattttgatttggagccaccttcacagccgccaagccatcccaaacccgaagaagaaacagaccgtaaggtcgtggatgataaagcccttttacccccacagggagaaaaaaccgggccggatttttacgctgaactcctggaaagttccagggaagaagaaaaatctgagaccggcgaatcaagttctgaaatccttgaaaaatccgaatcacagcctgaaaaagagaaagagccttccaccaccgacaaatcatgagaaatctcctaattctcctaagtcccagatataagaagctacgccatcggattgagaagcccggggctgagagaaaacgcttggtcataatcggcttattggtggtgggtctgtgggcggttctttacgtggtctgcctgaaggctttgacctattttaccgcagaagagatgttcggaataatagcagccaccaagctcctttccatgatgttggtcactcttgcctttgtagctgtgataagcaatttgatcaccagtttttcgacgtttttcttatccgaagacctggaattgatcatggcgtcgccggcgcctagttgttcgatttacacggtccgattcattgagactctggttgagtcatcctggatggttctgctgtttgggttccccgtttttctcgcatacggccgagttttttccgcgccctggagcttctatgcgctgagtctggccggcttcttctgtctgttgatgatgatcactgccgcggccgtatttttggtccagaaccttgtgagatctttccccgtaaagaggcttcgggatctatttgtatttataggcttaatgatttttgtggcgatttatctgctcttcagaatgctgcgtcctgaggactttctcaatcccgagggattcgcgtcggtaatggactacctctccattatgtcggaatcttcttcgcccttattaccgactacgtggcttatggcgacccttcggccttatattacgggaaacggtttcggagagattcctcttttccttggtcttctcatatcaggagcagtggtagctttcaggctgggggggcacagtcatgaatggattcattttcaaggttattctcgtgccatggaatcccgcggagcccgtttcagtaaaagcaggctggtcaacctgttcggccgactgctgggccgtttcatggatcgaccaaccgtaaatcttgtaatcaaggaaagcctgcttatggccagggattggggccgcctgagtcaattatttctgcttctcgctctgatactggtctacctatataacttcagtgtgctgcccactctcgattctcctgatcttgccatgttcctgaagagttccatcgcctttcttaacattgggctggccggtttcgtactctcgtcgcttggtgtaagattcctttttcccgcgatttccggagaaggcagggccttttggattttaaaggggtcgccgatcagcttacggaaaatcctgtgggtgaaattctttttctacttggcgcctatgtttatccttggactttttctcgtgacaatgacgaatcacctgctcggaatggggcttttcatttccatagtctcaacgatcacgatcgggtttctgacagtgggaataacgtcactggccgtaaacatgggggtcatccacgcagacttaaaacaatcggatccgagtagggcattcagcggcgttgggggtcttttaaccatgatttattccgcgcttgctgtaaccgccgtgatcctactcgaagtgttccccgtctacaggatcgtaactgcggaattttatcgccgaagcttcaccagtttggattacgtgtcgattgtagtttgtttcgcggcggctcttgccgtggcgatgtatctcatcattcagccgcttcgaatgggcatgaaacgcatcactgaattggaaatatgagagattaggtcacacaatggaaagaagcgacgtatcaataccctgcggaacattgactctcgagggagtgttggaagcgcccgagatggctaaggcgccgttgcccggagcggtcatctgccatccgcatcctctgtacggcggaaacatgcacaacagtgtggtcaaggctgtacggaatgctctgattgacgaaggacttgcatgtctgagattcaatttcagaggtaccgggggcagttggggtgagcacggaaatggaatcgacgagttggaagacgtgctggccgccgtggatttccttgaagcaagatcggaagtcgacgggagaaaactggttctcgcaggctattctttcggctgctgggtcggactgaaagctgctgcgcgtgatgctcgacttggattactcataggaatttcgccccccgtcgatgagtacgatttcgattttctcaaacaggaaactcgacccaagctgctcatcacgggcgatcgcgattttgtctgctcaaaagaaaaattccggaaacttctcgatgaaattcccgaacctaagaagggagtaataattccgggagcggaccattttcacgccggcaatgaggacgtcattgttgacgagaccaaagcattcctggcccaataccagttcgatgaaagagatgattagatggggtttgcagcaagctcagtttcgattgtcagatatcgagtccgtggcgaaatagagggctctttttgggacgcagtggacgaaggcgtcaaaagaggggcttttcgcgaaattgaaaccgcgtctgacgagattggcatgggatgggcctcgatggaggatttcaccgacaccacattccgatcttcatatgtccgaggcaattatgtggcggtctctctgcgtgtcgacaatgtccgagtcccgccgcgggtgctcgaaatccagttcaaaaaggaagctcgaaagataatcgaacaaacaggggcgcatagattatcagccgctcaaagccgagacctcaaagagcatcttaaagaatcgctcaagaaacaggttttcccatccattcaggtttacgatctcatttgggatacggccaaagcggtagtctatttcggaagtcaggcgccaaaggcgcgtgaacgaatcgaacaacatttcaagaaatgtttcggcctgactttggttccgctcataccgttcatacgagctgaagaaatcttggccgaaaacccgggaagacaacgtctcgagtctttgaagccgtctatcatggccccgtgatcccaaagccggtcaaacagccatttcaccgcagagaacgcagaggccgcagagaagaaattagataacgaactattgacttagcacggctgacgtgcagacgacccttgacaacgtcattcccgtgtcaatgggaatccagaattctcctcgcgaaagcggggatctagtggttgtctcgttaccccgttgaaaaacgaggtccagtctggttcccggctttcgccgggaaaatatctggattcctgctttcgcaggaatgacagcacaaaagccggcgattaggtggcgctgagttaaggtcacaatcctccagatagttgttctccgcgtcctctgggctctcagcggtgaggtccctgatttctagcaaaaggcggttggctatgaattttttggatatacttcgagaaaaggcttttttggggcgggagttcttgacctggctctggttcaagtctgaacaaacaggcggccgaattgagcttcccggacagaaagtgattgaggtgatcttcctggaccgaatgactctggacctttccgacgcggaaactccgcagacagtcgctctaaaaggcgagcattcggagcttcgagaaggtttagccgctctaaaggaaggcaagaaaatcgaggaggctcgtatctccataaggtccggaagtgatgattttacgatggtggcgaaggccacctggttttctttcggctcatttaggactcccagagtgctccctccagaagaatcggaggaaggcatcgaaggagcgttcctggaaaaggtctctcttattgaggaaggaatggaagcgctggactcgcttttcgaatacttcgtcaagctccggatttccgatgaatgggagacaactgaactgcccgcgctgcggcattgggtaggttcggctggtgtttagatgcgtgaactctgcattgcaatgcttttgtggccgccactacgtttgccggcttcccgtgtgagactgccgcgtaccgtattagaaaggaggagagactatgaaagggctgaagattctcatggcccttgtggccatcactctcttcgccgttcctgactgggcctgctcccaggttttggtggtctgccgcagattcatagcagacaagggctgccacaagtgttctgattatttttatgtcaactcagaagatgaggctcaacagcggtgcggcaaattgggcggggacccattctatttccctggagtgggaaggatgtccttctggatgagaggccattgttcctgtgaaggcatcgaccctgcgccgtgatagcgcattttccatctctgacgcgatgttcatctaattggacaaagtgaatcggggtccaattgaggattccaattaaggcgagaatagtctgccgaggatagacgcatgatatctgctcgcgaagaaggacaactctgggcacaagccgttgtcttcctggaacagggccgtccgggtgacttggaccacactcgcgcagtggtggctaatggaagaatcctgttggcgaaggaaggcggaaaccctcgggtggttattcctgcgcttatcttgcacgatgtcggctggggccgagtcgatttctccgatttcattaacgctcctgcagaagcgaaaagggacgtagaaagtgtgcatatgcacatgcggtacggcgcgcaaattgcctctgatattctcagcaatatccgatgggatgatgaggccattcggaagatcacttcgataatcgctgttcatgacattccggaaaaggtgctagcgctggatgatctggacgccacactggtctttgaagccgattggttggacaagtatgtgccggaaagacagaacaggtatttcgatgtggtaccgaaccggacagagcttaaggaaatcaaagagtacttcaaagcaaacagatcacggtggttccgaaccaggacttcgcgcgaattgctggatcagatcatctccaggcggaagaaagcttgagcatgctccggcgccatttgaaatggctcgagaattccctccatccccagccggatttctttggtaaactgttaatttcggcttgactggcgacctcagacggcagagaataaggcttcagattctgaagacgtcgtcagaaggatagacgaatgaatccttcaacgctgcccgagggcaatggagagcttgcaaggcttccccgtaaagagcgagaaaatctgcggcaacgcgaagagatactcgatactgcgcttagactgttctcggaaaaaggctatcacaacgtctccatgcaggagatcgcaaagcaagcggagttcggagtcggaactatatataaatttttctctaataagcaggacttgtacagaattcttatcatggaaacggcggaaaaatggcaacgagctgtttttcaagccctagaacaggaacgggatccttttcaggccataaaagaatacattgccgtccaacgggaactgttttttgccaatctgcccgtcgttcgcctgtattattccgaaaccaaaggggcgtgctacagcatgaggcccggttttgaccaagacctcctcaagcttcgcgatgaacgcatcaagaaattgggctctgtttttgaggcgggcatcaaggagagagttttccgggacctcgatcctaatcacatgtcgctggcgctccacggaattatcgacgcttttctttaccggatgatggaagatcctgcgcgattccgaaaacgggatgagctgtcagacgctgccgagatttttctcggaggagtcatgaacaagtgacaaggactaatggccagaaattaggtcatccgcaacctttaatcatcgatctttacgaggtctctgatgcaacccactaaaacggtctgtgaagcgctcaaatggagtttggtcctgatggctctgccaggcagtctgctgctggatggctgcgaccgccggaagcaatctgcgtcgcctcctgttccggaagtggctacggtgacaatccagccgcaggaactcgcgctgacgaccgaattgccggggcgcacctgtccgcacctcgtatcggagatccgacctcaggtcaatggcatcattcagaagcgcatgtttacagaaggttccgatgtgaaggccggtcaggtgttgtatcagatcgaacccgctccctttcaggcagccttcgacagtgcgagggctgcccttatgaaatcagaggccaatctgagagtgactcggttaaagttcgaacgttataagggattactcgccgaaaaagcggtcagccaacaggattacgacgatagagaggctgcgctgaagcaggctgaggccgacattgaatattgcaaggcagcggttgacactgctcgcatcagtttggattacacccgtgtgacaggtccgatatccgggcgcatcggcaagtccaacgtgacagatggcgccctcgtaacggcgcatcaagccttgcctttggccaccattcagcagctggaccccatctacgtcgatgtgccccaatcgactaccgaacttctaagactaagacgtcgcctggcagacggccgcttcaatcaaaacgggacgaaccagaaaaaagtcaaactcatcctggcggacggtacagcatatcctcaagaaggaacgcttcaattccgtgacatcacggttgacccggcaaccgggtccgtgatcctgcgggtcgtcgttcccaatcctgagggacttttgctgccgggtatgttcgtccgggccgccatagaggaagggatcgctgaacaggccattctcgttccccaacagggcgtgagccgtactccaaagggaaatcccttcgcgcttgtcgtgagtaatgccgggacggtcgagcaacggatgcttgggctcggtcgcgccatcggcgacaattggctcgtctcttccggcctctccgccggagaccgagtgattgtcgaaggaagtttgaacgtgcgcccaggttcaacggtaaaggccgtttccttgatttcgaatagcccgaaggcctgcgtggaagtcgaaaatgccaagcgcccgctacaatctaattaacggaggaccgtggtgttatccaacttctttcttgaccgcccggtcttcgcgtgggtcatagccatcatcatcatgctggcaggcgggcttgcgattcacaatttgcccatctcccagtatccgcccatcgcccctccgtccatcgccatcgacgccttttaccccggggcatccgctcagacagtggaggacagtatagtccagatcatcgagcagaagatgaccggattcgacaaactattgtacatgtcagcaacgagtgatgcctccggcaccgggaggatcgagcttacctttgccccaggcgccgatcccgatcttgcctgggcccaggtacagaataagctccaacttgccatggccagcctgcccgacgtagtccaacgccagggcgtcaaggtcagcaaatcaactagaaactggctaatcattgtcggtctcacctcggaagacgacagtatggaccaggacgacctcgcggactacgctcagtctagtgtccagcaggtgctggcccgggtgccgggagtaggtgaagtggaaaccttcagtttccagtattccatgcgagtctggctcgacccggaacggctgaccgattaccacctgaccgtggaagatgtcacccgaagtcttcaagcttacaacgtggaggtttccgcgggccaattcggcggggcgccggctgccaaaggtcaacggttgaatgcctcggtcatcgtccaaaacctgctcaagacaccggaggaattcggcgccataccgttacgcaccaatcctgacgggtctgtcgtacgcgtgcgcgacataggtcggacagaactgggcaccgagaaatacgggaccaataacctgtataacggccggccggccacgtccttagccatccggttggcgcccggagccaatgcagtggagaccgccgatgctgtcaaagccaagatgaaggagctttccaggtactttccgacaggcatgaaggtcgtttatcccttggacacaactcctttcgtgaaggtggccataaaagaggtggtcaagaccctgttcgaggctattttgctggtcttccttgtcatgtatcttttccttggaaacatacgggctaccctgattccgaccatcgcggtgccggtggtgctcctggggacgttcgcgattctggggcttttcgggttctcgatcaacatgctgactatgttcgcgatggtcttggcaattggtcttcttgtggacgatgctatcgtggtggtggagaacgtggaacggatcatgtccgaggagggactcggacccaaggaagcaacccgaaagtccatgagagaaattacaagcgcattgaacggaataggtcttgttctctcggcggttttcggcccaatggcattcttcggtggctctaccggcgtgatttatcggcagttctccgtgacattgatcgcagctatgctgctctccgtggtggtggcccttatcttgaccccggttctgtgcgcgtcgcttctcaagccgatgccaaagggccatgaagcggctgaaattgccttttttctattccggccttttttacggtggttcgacagaatctttctcaggacgagagatatgtaccaggctctggtcggccacatcattttcagcaagctccgctacattttcatctacgttctgattgcggtaacgctgggattcctcttccatcgaatgcccacagcatatcttccaaatgaggatcagggcgtcatgttcatccaggtgacgctgccttccggatcgaccttggagcagaccgaccaagttatgactcaaatccgaaaccattttcttgtggatgaaaaagaagtggtgaaatcctgcttcacgcttgccggcaggggattttccggaggcgggcagaatgttgggctgggatttgtacatctcaaggactgggacctgcgccagtcggcggacatgaaagttgatgccgtggtaaagcgcgccatggccaagttttcgaagatccgcaacgcaagggtattcgcgtttccgcctccggcggtcatggaactcggtcgcgctggtggctttgatttccaattgcaagatcggagcggcctcgggcacgaaacactgatggcagcccgcaaccaattactcggtatggcttcccaggattcaagattgctccgtgtacgcccggccggattggaagatgtgccgcaataccgggtcgatgttgattgggaaaagggtggcgcgctgggggtttctatcgactcaatccacacgaccatatccgcggcgttcggcggcgcctatgtaaacgatttcatccaggggggacgagtcaagcgggtttatgttcaggccgacgccccgtatcgcatgctcccaaatgacctggaacggctctatgttcgaaataaagccgggacgatgacgcctttcgcatccttcgccacgggccactggatttacggccccccactgctggagcgtttcaatagctttccgtcgttaagcatttggggcgaaccggtaacggggaagagttcaggggaggcgatgcaggccatggaggagatcgccccaaagctgcccaagggcatcggttttgattggaccggaatctcctaccaggagcgtatggcaaaatcacaagggccgattctctacgccttttccattattgccatttttctctgcctagctgccctttatgagagctggactatcccattttcggtaatgtttatgttgccgctgggtgtcatcgggggagtggtggcttcatcgcttcggggatttcccaatgatgtttattttcagatcggactcctcaccgtgttagggttgacgaccaagaacgcgatcttgatcgtccagtttgccaaaacgaaaatggaagagggagcagagttgattccggccaccttggaaggggcgaaattgagatttcgtccgatcataatgacatctcttgctttcggtttcggggtccttcctctgacaatggccaacggggccggggccggggcgcaaacggccatcgggacaggagtcctgggagggatgcttgccgctaccttcctggcgacccccttcattccgctcttttatgttttgatttgccggatgtctgagagaacaaagcgcggccagactgaagcggcagagtcggctggcgcgaatccttaaaatagtcataggcgtctgggtgacgaaagcaggttttctatttcgccgaaccttgtggtttatgagtctgtcgcccagcgaactgcaataatggttggcgtgtgcatcactcccctagcggcgccacactttcttgatcagtccctgatgatttatcatcgaaaagcatgtgtgattcaatctcaaagcaagctccacattcgtcacagacatgggcggcagggaaattgtgaaattcgtccaaggacaccgtggcattgcattctgggcattcgatcttcatggtctgtacctctcttagtaatttagtgattcgttctgaactgactggagctgtccttatgttagttatactaatgctaataggccggacctgtcaactcttgtcaagttatatcgctataaatcagccaattactcgtccaagtgacaccggcatgaattaatttaaactaattgcggctatacttaccctctgcgaaaccgcgcaaagttcacgaacgcgggatatacccacgggcagatagatggaggtttgaggcgggagcgctgtgtcgaaaccaaagccacctgtgactaagtcgtccgaatcgaactgcgcaggatctgtctctgaataagttcctctccgtcggatgctgtcaggctatgttggagcagtgccgtaccggcgtattatgtttgacaggaactgccggagagagatacgctcaaaaactccatacgattgtcgctgccgagcaggatggttccagatcggccgccgttgagtcgcttcgggcgatgcggaagtcgaaggggcagatgaccacaggtccatcaaagcggaggccccagagggggtatgttgtggcagcgtaactaggatgacaaggcatacggaaatacaggcaaggtattcttgtgataactcgcctcagccgctacacttttttggtcactaacctgcttctggtaatatcttctacatcatgtgcttgggaatttagtattgattccgctttgttaaattttcgcttcgtctatgcttcccaggcagggtcgcagggattcttcgggcctttcaacacggacatgagttcacagggagctgattttgcctccctcaatggctggttccgacgaaggatgctctcagggtccaccgccgtcacctcatcgacacgcctcgtgatgttccccctcctgagattaaaccaggctgtctggctggcaggtacttacagggtagcgccacaaattccacaaaacgtggatccgttcttagctccggacgctgaaccaggcttctcacgcggaacatggaccaggttgtggatgacggtaaacactcccttgggcacgatctattatggaaaaagaggcttccagcagggatgtggtctccaattcagcagcgcggaagttgccgaagatgtcatagatgtcaccacgaggactgtgcagatattccaacttgaaaccgtccatggtcccttcactgtgggcgcgggattatatccgtggaggcgaggcagcttactgtactggaacctcgacgatcagaatacggcaagaacagcccatgtattaagctacgtgaggtacgccaatggacccatcgatgcgggtattggggggttctattgggtgtttgacgaaggccctgaaagccagttgagtacccaaaaacgggcctctgttccaccagccactacgtccggaaccgaaggctggatttatttcaaatatactaacggccgcctattcttaaatgccgaagccgactggtattatcggaccatacgatatcaatcttcgcaggatgggaccttttacggcgcccctgccgccccttacgcaggaggaggaagtctctttgcgccaaagtatgttgagtcatggcgatacatgttggaatttggctgtttttccggacccataaaagccagcgttctcttgtgccacatgcccggacctgacagaagacacggaatcctcatagacaggcaacctttcatccaggaaccggcaagaagcgcttacggagttttctatccttattgcctcatgatggccaaatattacagggccggagttgattcatatcttgatatgtccgcttcggatgtggttgcagggcagcttaactacatggtggccagcaaccttgacattgtcacttcgattatgatggcgcgaagagcgtctcatggatacggctatggttacataaggcctgatctcgacaagtccggagccgtgaattttgaccaccgaggaaatttttcagttccggcgccatcgataccttataacgatctgggctgggaattaaatcttggaataggatggaagctcctggaaaactggcagctcagtcttcgtggagcgtactggcagccgggaaaatggttcaacttcgcctgtatcgacaaatccgtgtccaactgggataatccttcaccgctcaacaattggggaacaaaccctaaccgggtcatagcgcctattatgggcgttgaactctacctcaacaccaagctttgaactctccctgaagagtactgatgagcgtccgattgcgtaagtgacgttccgtcattcctgcttccgcgggaatgacggcaggtgaacccgatgttctgcctcattcggacataattatagacacttgttataatgcaattcacggggaacaagttccgcaaaagtcccgcgctgacaatgctgaaaaagaaaatcccgctgcggctcatttccaaccgagcgggatgatttatcttttttggctccccgagtaggactcgaacctacaacctagtggttaacagtcacttccagaaatggaaacactaatacttccagagtcttattaggacgaaaccgttgcaagaaccagcacgaaccacgacgacacatcaccgatggacacaaaatggccacactggtctaaccaggtaaggtggcccagaagatcaggttcgtgactgggggccttctggtgtcagtggaaacgggatctattccaagaacgactctaccatccgtcctttgatcctaaagcaccccttgtactcctgcggaagctctcgctgattactcaaattctctccaacgtcgagcatcaccacctaaaaattggtcgcgaatagaacttttattcagagtcggagattggtgcggcagagttccgctccatttgaaaagacccaaggagaatcatccttatgaaagaaatacaaatttcactggaagagtttgacctggaagcattgctggaaacgacagtccaattcctcaaggaacaggtgtccccggaagtggaccctacctatgggatagtctgggttcaaagcaatgacgacgttcccgtcttcggtcccgaatccggatgggatgtcccgtctggactcaaaaaagaaggaaaaatcgtcttctttccgttcgcccgtgcagatgccgatgggaccttcacgtgtgcagacggaaacacatacggggcagcacctgacgacgaggagtctgatgactacatgctgatcggcatggaagatagcattggctttttggtccaggtgaaggacggcacggtcatcataaactcagcgattcatgcgggtggagcctgccccggccccccaccgagtatagatctgtctccagactgcggtgtcctggaaaagcctatggagaaattcattaaagatttagtacggtctgatagatcggacattgaacctctcatccaagacgagctatgttcccggtcctgggaatttacgacctgggagacaacgcgagagctttccggagaagatttagattggctgagcgccgaaagaatttttctcttggatcacagagtcgctgcaataatggaaacgaagactccgggcgctggcctgccgagtgcgttggaacgtgcagtatattactcgctgagctatcaagaaagaaccggcaacatagcaccgcttgccgtcgtgagagaccaaggccaatactcttgtctcgacattagagcgaacgcagttccgttgaatctaagtaggttccccactccaagacagctctacgagtctcttcatccagagacagaggagtttcaaggaacgcttcggtgttaccagcgagacgcggtatcccagattctcctttgcgttttctcaggccgtcgcaggatgtaccttcaaatggctggcggcactggaaaaaccataacagccgcagcagcgattgcgagactgcattccgccggactgatacagaagagtctattcttagtggacagagatgctttggctgatcaggcagtaaaaaaactcactgaccacctggtagggcgcttcaatattggacgagccgagggggctgagaaagataaggattacgatattctagtatccacggtgcagcacttggccactgggttacgatatagtggctacgatccttctcatttcgacttgatcatcattgacgagtgtcacagatcatatttcggggcttggttgcccgccttagatcacttctccgagggcggggcgattctcattggactcaccgcaacaccgtccgatagagagaccctcagcactgatgcctttttcaccgatgagggacagtatccaggtcctatcttccgttacaccacaagccagggagagaccaatcctgaagtgctggaatgggaccgactggctccatgcgagcatcacgccatctacaccgacgtggatttagaaaaagtggaagaactcggctttgactttgagcctgaccagttggggaaggcggttaatgttccgcaacgcaatcagctggttgcacagacatatttcgagaccgttctcgaaaatgggtatccagtgaagactatcgcatttgcctcatcaattgctcacgcaaaggatctgacccgtgcactcatagaggaatataaccggcgaaataacctcccactggaccacccaggcgcagagaaattcattatggcggttcaccatgagacgcccaacgctctcacgatcatcgagcaattccaagagatcatggactcttcggagcggaaggccatcatagatcaggccatgaggaacccggacatgggttctcgttctattgtgctggtcggagtcggaatgctcgatacaggcatcgatgttcctgatttggaggtacttctcatggctcgacccaccatgtcgaagatactttacgcccaaatgaagggacgtggtgcgagaaaatgcagggcaactgaaaaggcttcatacaaactcatagacttcatcgatctgcacagcatgcggtatgtggtgaccaatgacacgctactccgggaacacgagaccatcttcggaatgggcgtagccgctcagggagaagagcaggtaagaaaagctgaaggactcttcgtccgccagggccatactaagacgcttgtctacatcccggctccaaattcctttttagaattggcttctcctgaattctttggggcactgcaccgccgcctggagggtcaactcaagagacgcttggccaaagagctgctcaggtttcgatttgctcacgcgttgctgatttggcggtacttacagggaagccacaccatagacggggtttttcttactgccacaggttttgacctgatgtcacttcaagagctgtacggtatgccaggaggaacgttggaagacatcgtgtcattggcaagtcgagagctcggtttgcctttgtgatgcggggggacggctgcctggttacatcagatattatttactatttcatgaaatattgcgaaacggggatgcttaaccatggccgcctcaagaatgtggctcaggatggatttgacggcttctgagaacgaatctcgtgtgaaatgaaaaggcaatggaaggggaccaattagtagagatttgggggaatggccttttccctacacaagaggtcagaccaatgaacgcacgcaaaaagccatatgaagataatgaacaggcgatggaccttctgcgttcctacgggaaggaattcctcgtctttgacccggacgaccagccaaacgtctttacagaggccgaggagagattccctccggcccgagggggcagggtgaatccgaagcagatgaagaattggcgccatcttccacgcatgctgcaatttttgcgagaacgatatggcctctttaactccggtcgtctaattacagattgccccctgttcatcatcaagcgacggaaatcagacgacgctaaggagttcagaaggagttttcaggtaacgatctctaaaggcctcgtcaggttcggatgtcgtcgggcgcacttctgcgagcgcaagggctgtcaggcccacaataaagcttttttggacatatacgacctgatctgttggcttgatggaaataaagaccttaaccacgctagaaagcttatcactgactatttcgatgtggagattggcaactttccgaaatcatccggcactccagcccagggaaaacaaactgaaggcgctgagtggttgagatatgcggttccaaagaaagatttggaaagactatttggtcttccgcactcaggccggggcgctccgcaaagatttgctgctaaggcggtcgaagtcatcacgggagcgtcagaggttccttacgatggacacaacgctgacacgggcgatacgatcctgttcagccgaagtttcccgtgggaaaccaggctcaaggaattcagtccagctgcccggctgttcatttggttgcactggaagcaggctgagacccaacggaaactcatgctgagtaatgaggaaatcggcaaagcactgggaatccctactaggaccgtaatcgagcatgcccgaaggctcttaaaggcagggtatattgaggtttctcaaggagacaactcgaagaagtcctggtcggccaaataccgctctgaggctgggcaaacttgatgtcgtggatatttccttatatcggtcggttacgcggaatctacgtaccttgaaaagggtttttctagtatccatgaaccggttttcccgaactccacctacatatattagcccccgaccagggtcgggtggacccgtccatgccggaggcgtgggcggtgcccaggttaatctttaagaagaaggattaggaattgtagagttatggagtacggccctggaatagagagtagagtaataaatcgggaagtagatctgcggctattagtcggttccctgcatgcaaagtcattcgctatcagtcctcctatcgaggttgacaactcgttcatgatgggcttggctaatgctgatttaagcgaaggtacatgtatccatcttcctgtatcggctctttcggaggtggctacgcttctgtttaccggcagaaacagagatacacatatatatgtacattcacttaaacagcttataaattggttttataaacataatatcctaattgctaatgattatttccaggatgtgtccatcgccgcgtacctgttaaagcctccagagaaagacaagggcgaggattggcaggagttccggctgagttcgatggtacgtgatcacctcggccgggagtatccttttctgccaaggcagcttgaacaagatggatatcccgatgctctctacaatcgattaatggaagacgcttgctccgtgtgggaactcgggaagatactgattcgtcagcttcagacagatcctctactctttcgcctgtactgtgatgtggaaatgcctcttattcctgtgctggctgagatggaaagagacggtattggagttgacttgcccaagatcctccaggcttggccccgagtcgaagcggcgtgcatgctcctttgcgaacagctcaccgagtcatacggacaaacgataaatccattttctgagattcaggtaagggatttcctaatacggacatgcgggataccgctcaaaaaaaccgactcggctgatgatgacctcttgaaaggtctcagcacacggcattcccttatccacaagatcctcgcttggcgcaggctgcatcgggtgatcagattcttcaagagcatcggcgataaggatcgctgctatccaacttggtggcagactcgtacttccacgggccgcatcgtctgcactgatcctgctctgcaaagtctgcctaaagcctttcggcggtacctggtgcccggcgaaggtcgaaagttcatcaaggctgattattccgcttttcagcttcgtttgctggcccacctgtctcaagataagtctctggttaagatgttccaaaccggccgcgacccgcatgaggaaaccaagatgaggctcgaaagcaaaggaatactgatcacacgggcaaaggccaaagcagtcaattttgctatctgttacggaggaaccgcctggagtattcagggcgctttgggttgcgagctttccacagcgcaccggatcgtgagagaactttcatcaatctaccccggcattggcagatatctcgacagcgttgcggaagcccttaataatgtaccggctgcccatcggcacgtgaaatctatttatgggcgaaggcgctgtttttaccacgaggggccattgactgaccgggaaaaaagacaggccaagaatgcagtggtgcagatgcttgaggccgatgtcttcaaaattacgctgttggaactttatcgtgcctttcgggtcgaggatctgtccgttaagatagtcttgcttctccatgacggaatctggtttacatgcccagcaaagcgcgtgactgtcacgcgagttgctgaagagatcaagaaaatcatggagaattctgtgaaattatcagttccactcaaagtggagttgagttgactggatgaagctgaattgaacatcttgctattctcccgggtcgtcgacgctgtcgcgtggcagaaacttattaccttcaccgggacaggcgaccggctcaaccaaccacaataatgacctatttgatatctcaaccgattccggtcgtgtcattgcctgaaatacatgcgatggttaccaaagaattggccctatggggggcgcgtagggttatggccgattgtctatgttcggcgatgcctgacagtctcaccttcatttggagtgaagtcgacacacgagctgcttgcatgaggaaccctttctctcgcttttgacatgcctcggatttgctgtattgcctgaacagacgaggacctggaggccattctcaagaagatggagggcaccgatggcagatcatttgcctcgaactcatggcttgtcgaaggtggcccgccgcactgatgtactttactgattgcagccctggttccattctctgctctgctcgcggtgaaaatggccgtctcaccaaaagtggtctaggcaatagatttgaccatgttgatatttctttcgtcagatccgctcgcgtcccccgaatacctccgttagcagccgaaataatagacgaggaataaatctttcgtcccattgccaagagcttgagatcgggccttacaccaaagttaaggggaaatccgatgaaaaacttcatcaactttatattcaagtctactattaagatcatcatagtactgatcataaccgccttacttaaatcaaacgctgatgcagcagtgtctaccggcataaactatatgtcaaccatcggggtcataatagtgatcatttgggatggggcgacctcattctcagagtgaatcttgccccattttcgccgaatgctctgacgagggcgatgactatggtgtccccgccggtcttaggctggcgcaagttttgggaatgaagctcacttggaaaaaagcaatagcaaattggatgcactgaaactcactagcgaacgagatccacgtctcttttggcaccctttatcttgttgtgaggtgaactgatcgtaaatcgcgggctccgcaatattgtctggggagtcccttgttttgataggagggagtcatgaaaaaaatgttgtctttggctgctatattgttagcggctttcgtcctttcggcgactgccggcttcggccagtctagggatgagggcatccgtctgttcaaggaggcccaggcaatacaggataaggcgcaaaaccacacagatctgcagtcagcagcccagagatacgaacaggcccttgcgatctttgagcgcttaggggatcgctatggaatcggcgtgaccgcgaacaacctgggcggactctgcacggattgcggccagtacgacaaggccgtgctatatttggagaagtctatcgctgcaaagagagacctgaaagatcgacgcggagaagcgagtaccctggcaaatttgggcaacgttttcctttccttgcagcaacatgaaaaggcgcttgtacattatgagaagtcgcttgcagtatgccgagaattcaaagatcgaaagcttgaagcgctttgcctggacaatcttggagtagtctatagacagctggggaaatttgacaaggcaatcgaatatcacaaagaggcgcttgcgataggcaaagaggttaaagattatagcagagaggccaacgcactggcaaatctgggcgacattttccatttgcgggaccaaaatgatcaggcgatcaaatactacgaaaactctctaatcatagctaaggaactcaagaaccgcaaaggcgaatcaatgtgcctgcataaccttggtttaattttcaaggaacaaggccagcgtgacaaggcgatggaatattatgaaaaatctctagctctagctaaggagctcaagaatcggaagggtgaggcaacctgcctaaacagcctaagcctaatatttagggagcgccatcagtatgacaaagcgatggaatccagcgaaaagtctttagccatagctagggacctcagagacagaaagggcgaagcattatgcctaaacaatctaggactgattttttccgatttgagcgacgatgacaaagcggcgcaatattacgaaaagtccttagcaatatccagcgacctcaaagatcgagcgctggaatccaagacattaaacaacctgggcatagtctgtgaggaacgagatcaggatgacaaggcggaagactactacaagagatctcttgacatcaagatagagctcaaagatcgcaagggtcaagggtccaacctgaacaacctgggtttaatctattacaagcggcgacagcatgacaaggcgatggaatattgcgaaaaggcccttacgatagccagggagttcaaagatccatacgttgaagcgctggtccttaataatctgggtatagtgtataacgctcgaaagcagaatgataaggccacggagtgttacgaaaagtctattgccattaagagacagctcaaggaccgacggggggaaggggattcccttacaaacctgggaaacgtctgcaaggatcgaggtcaattctacaaggcaagggaatattatgagaaatctctggctattaggacggagaccaaagatcgcaagggtgagggccgtacgctaaatagcttgggcctaatatgctggaataaagcacagtatgacaaggccatggaatactgtgagaagtctttgggcatagcccgggaactcaaagatcggaaaggggaagcgcagaccctgaataacatgggcctggtctattggaagaagcgccagtatgatcaagcgtctcaattcttcacgaactccctcgcaattgctcgggagataaaggacttgaccggagaggagaaggccgctgagaacctcgcaaaggtgcgcgaggcgaaaaaccgatattacaccattgttacaatagttgtgtgtggacttgtatcgctggttgccatcgcggttcgcaaaagacgccggaggcgggattcgtcgaattttgggcggctggacgaagtgtttaaagacgtatccggtgggcagcttacagggccagatttgataaagaaatatgaaatcaccgaggacacccttcgccggtactgcgatcatttcatgtttagcaaaaaaatcaacgaatcagattacctccgcatcgtcggtgagccgtttgtgtttcagtcggatcactgaactgatgatctgaacacagaatacgatgcgctaagtcgcgatgcaactgccatgaggaaggggatctgccgaagattcttgaaatgaatgagaaatgcggtttccgccattcgttttgtgactggacaacagtgcggttctatcattaactttgttggtgctcgagactcacttgtgctacattgcattcgttctccatgaataaatatccttgtttccacaatcttttatgggttttagaattccaacgaataaggctggcagctgcgagctgctgcaggagcgagagaacgtcatgagacacaaaccttgcggatacgcggccttcacactttgcttgggtactctattgctgaacagccaaaacagctatggccaagctgtgtctcccagcaggatttaccaatcggccaaacccgccacagtcatagtcctcagtcacgccaaatttgaattttcggttcctgacgtcagtctcgatacgaagtctttgtcacaggcagttacatctcgcctaaaagaacgacccggggaacgagatcctgaaaagctcaggatcgcccttttgtatgagctctcggccaagccagggacgtactttcaaagacagggccaactgaggaccctgcaaggaagcgaacgccgcaccagtggttcaggtttcttggcgcactctagcggctacattgtgaccaatgcgcacatagttcaagaaagcaacgagaatatcgaagcgattctggctaaacgggttttcagggacaatttggatgccgccctgaagatcatggatcgaacttttcctgagctggttaagctgagcgcaacggaacgtgaggccctgtccgcgggcttgcgaactgcatatgcccggttttgccggttacaggggcgatgttccaccaagagagaagtcaaggtagttatgtctcccgatctatccggaaagatcgaacgcatgaaactggtttcggcagaagtcgttgtagccggacggggttggccgggtaaagatgttgctatcttgaagatccccggaaacggctacccgacagttccacttggagatgaagcaagaatcaatgtaggggatcagatctttgttataggttatccgggagcagccagcagcactgctttttccgagaccagccgctcagaagccacaatgaccagcggtttaataagcgccaagaaggcagtgcgtgaaggattcaccgcgcttcagactcaggcccctatttcaggtggaaacagcggaggtcctatctttagcgggagaggcgaggttatcggaattgctacggcaaccggcctggaccgagcaactggacacagagccgaaggtattcattttatagtgcctgccactgtcatcaaggaatacttgaatcgtgccaatgtaaaatgatgtatgaagaattgttacgaggacggaatcgggtcttggactccttgtcacgtgtgcctcaatttgattcgccggaggtaaaatccggcgaatcaaattacccgagctagattagcctgcgactctttatctgcttcttctattgatcttacgcgagctgggtccagaatccgggtagaccgtgcgccagtcgcgaggatcttgaatctcaccgtaaggcattttaaccggccgcaggggaccggaacgacgctgagtattccaatacggatttcggttgtcagggacttgcggtggtgtgtcgcttatacaatacgcaaactcacaaccaagcccccctaagaacaaacctacaaacagaattacagtgcccaaaagtctcttcttcatgattttaccctcctattcactctattttcgagcattttgctcgcattcacgcttcatcttgaagcattcgcccttcatggaagtgccatacatcgccaagcaatcttcgtaaatcttgttgcagtctctaggctgaattgcatcgccagctttgtcgcactccttgagaatggccttgacgctgtcgtacccgtcaatgtttttcacaccccggaaaacagtcctgtacgtttcgtttattttcgttaagtctctgagagcagcttcgcacatctctgttgcgtgatatttcttggggttgataaagctcctcaccggagtcccctccttgcttttcagatatgatgcgagactttcctgacagtctgccatctggccaattatgttgcctagatggagttcatgagtgcttgcgatgctcgggttttccttctgctttatatacgctatcagtgcttgtttcctctcttcgcacttttttctgaatgcctgaggagaggtgttccgagccactgtagggatggaacggaacagactgtcaaggttgttccgcacggtctgcaaaacatcttctgctaccgcggggctttgataaagaaagagtattgcgcatgcgctgaggctaatggcaagagttgtcgatttgtgtgtgcccatgattctcctcggatggtggccctcggctttcggacggcggacacgagggcctcacgtcattgcatcatgattcaagacgcacccaaagcttttcccattggtcaagcgttttcacgaatctttccagctctttcggaagcgtcggcgccttcctgagttttgcccaacttctcataaacaagggccaaattttccagggcgatggccgtcagctgaggatctgccagtgtagaattctgtagtaacacgagggccaacttataccgtttctcagccgcaacataattgccctcgctgtaatcacttatgccctccgcgatcagcttggccggtgacgggtcctgagcaggcgcaggctgtggcgtggagactggctcgcgtacacgctcgattatcacgggagcgggctcaaccggttcctcgaccggcgctggttcaacttgtgcggggccgtcgccgccgatctgaatattgatggtcgggccactgctttcgcccgccggcggcgcgggcggggtgatgttttggatagtcttgttttcttgtttcacgctcgatataagatttttcttggactggtctatgattgaagtattaccggacccttgttgtgttactgtcgcggaggtattatcactggttttgcctggcttaccgggattcttgactggatcaccgggagattgaacttgactgcctggctgtttcccaccaggtccgttgagcaggcggtcgccagcggtcttgcttgtagtggtaatattgcctgggcctggaccgttcgccagcttagttgggccaggcggtgtagaaatcggaggcttgcccgtttgtattgtttgggattgatttcccggtcctatctgaatcgtttgagactggttcttggagccggcctgaactgtctgagattgattcgcggacccagtctgaacagtttgcgattgattgcctgtccttgtttgggacattgggtattggtttcccattctagcccatgctacattgcggtccccatgagcatcactagatggtttcgatgtcttgcgatcagcatgccactgatttgatcgaccttctccctggcaaccattgcagccgatgcgaccctcatgccatgtgtttgactctcgttttgctgtctgagactgattcctggtgcctagctgaccggattggggcttatttctactgtctgtttgccctgtttgagcctgatttcgactcccgttctgaaccgtctgggattggttgccgctgcccctttgcaatgtttgactctgattgttgccaccggtttgtacggtctgagcctgattacgatttccactctgtactgtctgagattgattgaccgttcccctttgaagtgtttgtgactggttgcgggtaccgatctgaatcgtttgtgactgattgctattccagcgctgcgttatttgagcttgattgcgaccacctccgataataggcttagttgtctgccccacctgaaacccattgctcatgctcgtctgaactagattggccagccttgggtgctcggttgccctattgggattactgccggcaatcggtccacttgattgcgctgcacgtgcaggagccatgttagcgtgcctctgtagaatcatggagtgtccactcgaaaatcccgggggcagcggcctggaggcaccctgagtcacgggagaaggctttaagccatggatctgagccggagatggggtcccggggcgctgatgcgccagacctggctgcacaggctgccgaggcattgaaaccaacggcctgcttgtagtggagggtgatgtgacgacaggacccctaacaagaggtcgtgggatgggacgtggcggttgcacaggggtttgagaaatactaggccatctgtgcactgcgggtctggccaccgaagggggtcttcgtacaggattacgagaaatgcttggcggccgatatgttggagggcgagagatccttgaaggtgaatgtcgctggatcggcatagatattcgtggtgcggtcctaaccactggcctggagatgctcggagcagagcgcatgggcacccggaatcctcctccacccctgcgtgccttcggtattagaagctgctcgctatctgcatcagtagtggacaacgctcctggcatcagcttggtttcttgatctgtgacccactcggcccaagctgttgcagagcagatcattagggcaccaatcagtgcgctgagcatcgtcaacgccgttgagttcctcccattattaatcatggctgaccacctctttgatgaatcattcatgggttgtatctttttccgttttcagcgatatcctcaagagcgaccggcgaccagaagttgtcataccgaagattttgatcttcatggttcctacttctacttccccgatctggttatttatctcgtactcaccttttcatttctaaagcattggtacttaaggtttagagaatccattggggaaaggattgtggctcaccgacaaaaccgtgtttccgtccggacgacgttccatggtagtgccatcggagaacactctcttgttcggctggccttctggcgaacgagcacccggcgaattccacatcatttcctcgagtgcacttttagtaggtagtagccccgggatattccaggagccgggagacgaagcggaggcggggccaggacttgtcgtggatccagaattgggactcgacgtagagccgggagacgaacttgacatggtatcacgatacttatcagaccaaaaggtgtcatctttgggcgcactgatgggcggcgtgttgggagcagaggagccgacagacggtcccacccttgaaccgtctggcattacggtcggtatgggttcaagagtcggtgcggacgtgtagccaggcaatgagaccgatgtggtgctactggagaaagcacggtacgggatagacaaaacggtgttttcatctgaaagccgttccatcgtcgtgccatcagaaagtattctcttgttgggctggccctctggcgaacgagcgccaggagaattccacttcatatcttccggtgtgcttctagtgggcagcaacccactcaggaacgaattatcctgtacctgcggacgagttctgggatcatcgacttggtttctcacgttggtatttgttagagaagatggctcgggcagttttggagcggggatgggctttacaatgctggatgtttccgtggggacattaatgtttgatgcccctgagcccgtcgctcccgttcccggagatgtaacagacggggcttgaccattcccaggctgactttgattcgtggaactggagaattggctgttgcttgagaccttcccggtaggtacagtcgattgcagagcacggggaccgggttgagcacctgaggaatcattcagccacctgtagacttgagtacctctggttccatcgcgtgtttcaactggcactgccgcatattgataaccctggtccgaccacatcggtttcttgatagaccctgccggcgcgacgcctaggttttccgcatttagaggcatgggtacggctggatgattgggtgaaacgtaccaatcgccagtcttcgtcaaggacgtcgtctggaaatctggttttgctgccagtgtgctttgaacggaagacccacgtttcactatgctttcgcttgaacctgcttgcgtgttaggtgaagtcggccatttgacgaaacctccatcaagctgttcattccatccgtcacgaatcagtgctcttctatctgctgtgcttagatttttcgtcatcgagctagttaggacggccggagacgagctagtattagggcccgtctgcaaaactgttggtccgctagctggtttcgaattgccgggattcgatctcgtgcctgaaggcattacacttggcgcaaacattgcgctagacggagcggttagactatccggtttcggtgctcgcatgccttgaaccgaaggttcggtcgtttccactttattgccagcgaagttctgactggcttgggcctgattgatgtttcctgtttgcgatgtttgagattgggtagtcgtcgtagtctgggctctgttctgcccaccctgcgccgatgtgtcgttggtagaaccggatatttttgttgttgcgaccttattccctacggactggctcgtttgggcctgagtcgtactggctatttgagaagtctgagggtgattgccaccaccgttctgcactgtctgagccagattgcgatttccgttctgaactttctgggattgattcgcggctctactctgactctgaacagtctgcgattgatttgctgatgcggcccggatcgtttggaccttattgccagggagattctgaatggtttgagcctgattgacttttcctgtttgcgatgttgaggattgactgttcgctccggtttggattttgttcagagcagcctgcggagaaccggatatttttgatgcttgaaccttgttcccgacaggttggccggtttgggtcttgttcacattggttatctgagaaatctgtgattgattactaccttgagcaatccgcgattgattgttggatgcggtccggaccgtttgaaacttatttccggcgaaattctgagtggtttgggccgtctgattgactgctcctgtttggggttttggctgggcacttgtggcagtctggactctattttgtcctccgtgccacaaattcgataggccaccatttgttggtgttgtttcgattttgttccccaaaggctgtccattttgaactttgttccaaactcccgtttgagaagcctgagaccgactgctgctatcattccgagtagtccgcggttgattagcgtatccggtttggattttctgaaactgatttcctatgccattttgaatttgttgagcttgaatgcctgccccatggtgacgccccagaaattgattgcccatccggttctgcaatttattatgcccaccatgccacaaattcgacctggaataagtgtcatgaaatggttttgatagtttccgatcggcatgccacaaatttggatttggccacgaatgagcgccatagaatggcttggacattttccggtcagagtgccaggcgttcgctctatgtctctggccaaaaaaatcttgcgagatccttcgctgaccaggattgaatgagccaaagtggcgtctttgactctgtgagaagatttgtggattaaccctttgaaccggcatagccatacgctggttaacgcgcatgggcatgttgaatccccttccgaatctgcgtgctttgggcaccaggagtgaatcgtcatgctcaccacttgttaacggtgcggccagtatttcatcgatgccatagtgcgtctcccactgtgcacaaacaggcgcggaacagatcatcagaaaacccgccaggacggcgaaggtcatcaa

SEQ ID NO: 955 - DNA, 103393 bp, Artificial Sequence
  Synthetic Oligonucleotide
  misc_feature (1)..(15827): n is a, c, g, or t
nnnnnnnnnnnnnnnnnnnnnnnnnnnnnnnnnnnnnnnnnnnnnnnnnnnnnnnnnnnnnnnnnnnnnnnnnnnnnnnnnnnnnnnnnnnnnnnnnnnnnnnnnnnnnnnnnnnnnnnnnnnnnnnnnnnnnnnnnnnnnnnnnnnnnnnnnnnnnnnnnnnnnnnnnnnnnnnnnnnnnnnnnnnnnnnnnnnnnnnnnnnnnnnnnnnnnnnnnnnnnnnnnnnnnnnnnnnnnnnnnnnnnnnnnnnnnnnnnnnnnnnnnnnnnnnnnnnnnnnnnnnnnnnnnnnnnnnnnnnnnnnnnnnnnnnnnnnnnnnnnnnnnnnnnnnnnnnnnnnnnnnnnnnnnnnnnnnnnnnnnnnnnnnnnnnnnnnnnnnnnnnnnnnnnnnnnnnnnnnnnnnnnnnnnnnnnnnnnnnnnnnnnnnnnnnnnnnnnnnnnnnnnnnnnnnnnnnnnnnnnnnnnnnnnnnnnnnnnnnnnnnnnnnnnnnnnnnnnnnnnnnnnnnnnnnnnnnnnnnnnnnnnnnnnnnnnnnnnnnnnnnnnnnnnnnnnnnnnnnnnnnnnnnnnnnnnnnnnnnnnnnnnnnnnnnnnnnnnnnnnnnnnnnnnnnnnnnnnnnnnnnnnnnnnnnnnnnnnnnnnnnnnnnnnnnnnnnnnnnnnnnnnnnnnnnnnnnnnnnnnnnnnnnnnnnnnnnnnnnnnnnnnnnnnnnnnnnnnnnnnnnnnnnnnnnnnnnnnnnnnnnnnnnnnnnnnnnnnnnnnnnnnnnnnnnnnnnnnnnnnnnnnnnnnnnnnnnnnnnnnnnnnnnnnnnnnnnnnnnnnnnnnnnnnnnnnnnnnnnnnnnnnnnnnnnnnnnnnnnnnnnnnnnnnnnnnnnnnnnnnnnnnnnnnnnnnnnnnnnnnnnnnnnnnnnnnnnnnnnnnnnnnnnnnnnnnnnnnnnnnnnnnnnnnnnnnnnnnnnnnnnnnnnnnnnnnnnnnnnnnnnnnnnnnnnnnnnnnnnnnnnnnnnnnnnnnnnnnnnnnnnnnnnnnnnnnnnnnnnnnnnnnnnnnnnnnnnnnnnnnnnnnnnnnnnnnnnnnnnnnnnnnnnnnnnnnnnnnnnnnnnnnnnnnnnnnnnnnnnnnnnnnnnnnnnnnnnnnnnnnnnnnnnnnnnnnnnnnnnnnnnnnnnnnnnnnnnnnnnnnnnnnnnnnnnnnnnnnnnnnnnnnnnnnnnnnnnnnnnnnnnnnnnnnnnnnnnnnnnnnnnnnnnnnnnnnnnnnnnnnnnnnnnnnnnnnnnnnnnnnnnnnnnnnnnnnnnnnnnnnnnnnnnnnnnnnnnnnnnnnnnnnnnnnnnnnnnnnnnnnnnnnnnnnnnnnnnnnnnnnnnnnnnnnnnnnnnnnnnnnnnnnnnnnnnnnnnnnnnnnnnnnnnnnnnnnnnnnnnnnnnnnnnnnnnnnnnnnnnnnnnnnnnnnnnnnnnnnnnnnnnnnnnnnnnnnnnnnnnnnnnnnnnnnnnnnnnnnnnnnnnnnnnnnnnnnnnnnnnnnnnnnnnnnnnnnnnnnnnnnnnnnnnnnnnnnnnnnnnnnnnnnnnnnnnnnnnnnnnnnnnnnnnnnnnnnnnnnnnnnnnnnnnnnnnnnnnnnnnnnnnnnnnnnnnnnnnnnnnnnnnnnnnnnnnnnnnnnnnnnnnnnnnnnnnnnnnnnnnnnnnnnnnnnnnnnnnnnnnnnnnnnnnnnnnnnnnnnnnnnnnnnnnnnnnnnnnnnnnnnnnnnnnnnnnnnnnnnnnnnnnnnnnnnnnnnnnnnnnnnnnnnnnnnnnnnnnnnnnnnnnnnnnnnnnnnnnnnnnnnnnnnnnnnnnnnnnnnnnnnnnnnnnnnnnnnnnnnnnnnnnnnnnnnnnnnnnnnnnnnnnnnnnnnnnnnnnnnnnnnnnnnnnnnnnnnnnnnnnnnnnnnnnnnnnnnnnnnnnnnnnnnnnnnnnnnnnnnnnnnnnnnnnnnnnnnnnnnnnnnnnnnnnnnnnnnnnnnnnnnnnnnnnnnnnnnnnnnnnnnnnnnnnnnnnnnnnnnnnnnnnnnnnnnnnnnnnnnnnnnnnnnnnnnnnnnnnnnnnnnnnnnnnnnnnnnnnnnnnnnnnnnnnnnnnnnnnnnnnnnnnnnnnnnnnnnnnnnnnnnnnnnnnnnnnnnnnnnnnnnnnnnnnnnnnnnnnnnnnnnnnnnnnnnnnnnnnnnnnnnnnnnnnnnnnnnnnnnnnnnnnnnnnnnnnnnnnnnnnnnnnnnnnnnnnnnnnnnnnnnnnnnnnnnnnnnnnnnnnnnnnnnnnnnnnnnnnnnnnnnnnnnnnnnnnnnnnnnnnnnnnnnnnnnnnnnnnnnnnnnnnnnnnnnnnnnnnnnnnnnnnnnnnnnnnnnnnnnnnnnnnnnnnnnnnnnnnnnnnnnnnnnnnnnnnnnnnnnnnnnnnnnnnnnnnnnnnnnnnnnnnnnnnnnnnnnnnnnnnnnnnnnnnnnnnnnnnnnnnnnnnnnnnnnnnnnnnnnnnnnnnnnnnnnnnnnnnnnnnnnnnnnnnnnnnnnnnnnnnnnnnnnnnnnnnnnnnnnnnnnnnnnnnnnnnnnnnnnnnnnnnnnnnnnnnnnnnnnnnnnnnnnnnnnnnnnnnnnnnnnnnnnnnnnnnnnnnnnnnnnnnnnnnnnnnnnnnnnnnnnnnnnnnnnnnnnnnnnnnnnnnnnnnnnnnnnnnnnnnnnnnnnnnnnnnnnnnnnnnnnnnnnnnnnnnnnnnnnnnnnnnnnnnnnnnnnnnnnnnnnnnnnnnnnnnnnnnnnnnnnnnnnnnnnnnnnnnnnnnnnnnnnnnnnnnnnnnnnnnnnnnnnnnnnnnnnnnnnnnnnnnnnnnnnnnnnnnnnnnnnnnnnnnnnnnnnnnnnnnnnnnnnnnnnnnnnnnnnnnnnnnnnnnnnnnnnnnnnnnnnnnnnnnnnnnnnnnnnnnnnnnnnnnnnnnnnnnnnnnnnnnnnnnnnnnnnnnnnnnnnnnnnnnnnnnnnnnnnnnnnnnnnnnnnnnnnnnnnnnnnnnnnnnnnnnnnnnnnnnnnnnnnnnnnnnnnnnnnnnnnnnnnnnnnnnnnnnnnnnnnnnnnnnnnnnnnnnnnnnnnnnnnnnnnnnnnnnnnnnnnnnnnnnnnnnnnnnnnnnnnnnnnnnnnnnnnnnnnnnnnnnnnnnnnnnnnnnnnnnnnnnnnnnnnnnnnnnnnnnnnnnnnnnnnnnnnnnnnnnnnnnnnnnnnnnnnnnnnnnnnnnnnnnnnnnnnnnnnnnnnnnnnnnnnnnnnnnnnnnnnnnnnnnnnnnnnnnnnnnnnnnnnnnnnnnnnnnnnnnnnnnnnnnnnnnnnnnnnnnnnnnnnnnnnnnnnnnnnnnnnnnnnnnnnnnnnnnnnnnnnnnnnnnnnnnnnnnnnnnnnnnnnnnnnnnnnnnnnnnnnnnnnnnnnnnnnnnnnnnnnnnnnnnnnnnnnnnnnnnnnnnnnnnnnnnnnnnnnnnnnnnnnnnnnnnnnnnnnnnnnnnnnnnnnnnnnnnnnnnnnnnnnnnnnnnnnnnnnnnnnnnnnnnnnnnnnnnnnnnnnnnnnnnnnnnnnnnnnnnnnnnnnnnnnnnnnnnnnnnnnnnnnnnnnnnnnnnnnnnnnnnnnnnnnnnnnnnnnnnnnnnnnnnnnnnnnnnnnnnnnnnnnnnnnnnnnnnnnnnnnnnnnnnnnnnnnnnnnnnnnnnnnnnnnnnnnnnnnnnnnnnnnnnnnnnnnnnnnnnnnnnnnnnnnnnnnnnnnnnnnnnnnnnnnnnnnnnnnnnnnnnnnnnnnnnnnnnnnnnnnnnnnnnnnnnnnnnnnnnnnnnnnnnnnnnnnnnnnnnnnnnnnnnnnnnnnnnnnnnnnnnnnnnnnnnnnnnnnnnnnnnnnnnnnnnnnnnnnnnnnnnnnnnnnnnnnnnnnnnnnnnnnnnnnnnnnnnnnnnnnnnnnnnnnnnnnnnnnnnnnnnnnnnnnnnnnnnnnnnnnnnnnnnnnnnnnnnnnnnnnnnnnnnnnnnnnnnnnnnnnnnnnnnnnnnnnnnnnnnnnnnnnnnnnnnnnnnnnnnnnnnnnnnnnnnnnnnnnnnnnnnnnnnnnnnnnnnnnnnnnnnnnnnnnnnnnnnnnnnnnnnnnnnnnnnnnnnnnnnnnnnnnnnnnnnnnnnnnnnnnnnnnnnnnnnnnnnnnnnnnnnnnnnnnnnnnnnnnnnnnnnnnnnnnnnnnnnnnnnnnnnnnnnnnnnnnnnnnnnnnnnnnnnnnnnnnnnnnnnnnnnnnnnnnnnnnnnnnnnnnnnnnnnnnnnnnnnnnnnnnnnnnnnnnnnnnnnnnnnnnnnnnnnnnnnnnnnnnnnnnnnnnnnnnnnnnnnnnnnnnnnnnnnnnnnnnnnnnnnnnnnnnnnnnnnnnnnnnnnnnnnnnnnnnnnnnnnnnnnnnnnnnnnnnnnnnnnnnnnnnnnnnnnnnnnnnnnnnnnnnnnnnnnnnnnnnnnnnnnnnnnnnnnnnnnnnnnnnnnnnnnnnnnnnnnnnnnnnnnnnnnnnnnnnnnnnnnnnnnnnnnnnnnnnnnnnnnnnnnnnnnnnnnnnnnnnnnnnnnnnnnnnnnnnnnnnnnnnnnnnnnnnnnnnnnnnnnnnnnnnnnnnnnnnnnnnnnnnnnnnnnnnnnnnnnnnnnnnnnnnnnnnnnnnnnnnnnnnnnnnnnnnnnnnnnnnnnnnnnnnnnnnnnnnnnnnnnnnnnnnnnnnnnnnnnnnnnnnnnnnnnnnnnnnnnnnnnnnnnnnnnnnnnnnnnnnnnnnnnnnnnnnnnnnnnnnnnnnnnnnnnnnnnnnnnnnnnnnnnnnnnnnnnnnnnnnnnnnnnnnnnnnnnnnnnnnnnnnnnnnnnnnnnnnnnnnnnnnnnnnnnnnnnnnnnnnnnnnnnnnnnnnnnnnnnnnnnnnnnnnnnnnnnnnnnnnnnnnnnnnnnnnnnnnnnnnnnnnnnnnnnnnnnnnnnnnnnnnnnnnnnnnnnnnnnnnnnnnnnnnnnnnnnnnnnnnnnnnnnnnnnnnnnnnnnnnnnnnnnnnnnnnnnnnnnnnnnnnnnnnnnnnnnnnnnnnnnnnnnnnnnnnnnnnnnnnnnnnnnnnnnnnnnnnnnnnnnnnnnnnnnnnnnnnnnnnnnnnnnnnnnnnnnnnnnnnnnnnnnnnnnnnnnnnnnnnnnnnnnnnnnnnnnnnnnnnnnnnnnnnnnnnnnnnnnnnnnnnnnnnnnnnnnnnnnnnnnnnnnnnnnnnnnnnnnnnnnnnnnnnnnnnnnnnnnnnnnnnnnnnnnnnnnnnnnnnnnnnnnnnnnnnnnnnnnnnnnnnnnnnnnnnnnnnnnnnnnnnnnnnnnnnnnnnnnnnnnnnnnnnnnnnnnnnnnnnnnnnnnnnnnnnnnnnnnnnnnnnnnnnnnnnnnnnnnnnnnnnnnnnnnnnnnnnnnnnnnnnnnnnnnnnnnnnnnnnnnnnnnnnnnnnnnnnnnnnnnnnnnnnnnnnnnnnnnnnnnnnnnnnnnnnnnnnnnnnnnnnnnnnnnnnnnnnnnnnnnnnnnnnnnnnnnnnnnnnnnnnnnnnnnnnnnnnnnnnnnnnnnnnnnnnnnnnnnnnnnnnnnnnnnnnnnnnnnnnnnnnnnnnnnnnnnnnnnnnnnnnnnnnnnnnnnnnnnnnnnnnnnnnnnnnnnnnnnnnnnnnnnnnnnnnnnnnnnnnnnnnnnnnnnnnnnnnnnnnnnnnnnnnnnnnnnnnnnnnnnnnnnnnnnnnnnnnnnnnnnnnnnnnnnnnnnnnnnnnnnnnnnnnnnnnnnnnnnnnnnnnnnnnnnnnnnnnnnnnnnnnnnnnnnnnnnnnnnnnnnnnnnnnnnnnnnnnnnnnnnnnnnnnnnnnnnnnnnnnnnnnnnnnnnnnnnnnnnnnnnnnnnnnnnnnnnnnnnnnnnnnnnnnnnnnnnnnnnnnnnnnnnnnnnnnnnnnnnnnnnnnnnnnnnnnnnnnnnnnnnnnnnnnnnnnnnnnnnnnnnnnnnnnnnnnnnnnnnnnnnnnnnnnnnnnnnnnnnnnnnnnnnnnnnnnnnnnnnnnnnnnnnnnnnnnnnnnnnnnnnnnnnnnnnnnnnnnnnnnnnnnnnnnnnnnnnnnnnnnnnnnnnnnnnnnnnnnnnnnnnnnnnnnnnnnnnnnnnnnnnnnnnnnnnnnnnnnnnnnnnnnnnnnnnnnnnnnnnnnnnnnnnnnnnnnnnnnnnnnnnnnnnnnnnnnnnnnnnnnnnnnnnnnnnnnnnnnnnnnnnnnnnnnnnnnnnnnnnnnnnnnnnnnnnnnnnnnnnnnnnnnnnnnnnnnnnnnnnnnnnnnnnnnnnnnnnnnnnnnnnnnnnnnnnnnnnnnnnnnnnnnnnnnnnnnnnnnnnnnnnnnnnnnnnnnnnnnnnnnnnnnnnnnnnnnnnnnnnnnnnnnnnnnnnnnnnnnnnnnnnnnnnnnnnnnnnnnnnnnnnnnnnnnnnnnnnnnnnnnnnnnnnnnnnnnnnnnnnnnnnnnnnnnnnnnnnnnnnnnnnnnnnnnnnnnnnnnnnnnnnnnnnnnnnnnnnnnnnnnnnnnnnnnnnnnnnnnnnnnnnnnnnnnnnnnnnnnnnnnnnnnnnnnnnnnnnnnnnnnnnnnnnnnnnnnnnnnnnnnnnnnnnnnnnnnnnnnnnnnnnnnnnnnnnnnnnnnnnnnnnnnnnnnnnnnnnnnnnnnnnnnnnnnnnnnnnnnnnnnnnnnnnnnnnnnnnnnnnnnnnnnnnnnnnnnnnnnnnnnnnnnnnnnnnnnnnnnnnnnnnnnnnnnnnnnnnnnnnnnnnnnnnnnnnnnnnnnnnnnnnnnnnnnnnnnnnnnnnnnnnnnnnnnnnnnnnnnnnnnnnnnnnnnnnnnnnnnnnnnnnnnnnnnnnnnnnnnnnnnnnnnnnnnnnnnnnnnnnnnnnnnnnnnnnnnnnnnnnnnnnnnnnnnnnnnnnnnnnnnnnnnnnnnnnnnnnnnnnnnnnnnnnnnnnnnnnnnnnnnnnnnnnnnnnnnnnnnnnnnnnnnnnnnnnnnnnnnnnnnnnnnnnnnnnnnnnnnnnnnnnnnnnnnnnnnnnnnnnnnnnnnnnnnnnnnnnnnnnnnnnnnnnnnnnnnnnnnnnnnnnnnnnnnnnnnnnnnnnnnnnnnnnnnnnnnnnnnnnnnnnnnnnnnnnnnnnnnnnnnnnnnnnnnnnnnnnnnnnnnnnnnnnnnnnnnnnnnnnnnnnnnnnnnnnnnnnnnnnnnnnnnnnnnnnnnnnnnnnnnnnnnnnnnnnnnnnnnnnnnnnnnnnnnnnnnnnnnnnnnnnnnnnnnnnnnnnnnnnnnnnnnnnnnnnnnnnnnnnnnnnnnnnnnnnnnnnnnnnnnnnnnnnnnnnnnnnnnnnnnnnnnnnnnnnnnnnnnnnnnnnnnnnnnnnnnnnnnnnnnnnnnnnnnnnnnnnnnnnnnnnnnnnnnnnnnnnnnnnnnnnnnnnnnnnnnnnnnnnnnnnnnnnnnnnnnnnnnnnnnnnnnnnnnnnnnnnnnnnnnnnnnnnnnnnnnnnnnnnnnnnnnnnnnnnnnnnnnnnnnnnnnnnnnnnnnnnnnnnnnnnnnnnnnnnnnnnnnnnnnnnnnnnnnnnnnnnnnnnnnnnnnnnnnnnnnnnnnnnnnnnnnnnnnnnnnnnnnnnnnnnnnnnnnnnnnnnnnnnnnnnnnnnnnnnnnnnnnnnnnnnnnnnnnnnnnnnnnnnnnnnnnnnnnnnnnnnnnnnnnnnnnnnnnnnnnnnnnnnnnnnnnnnnnnnnnnnnnnnnnnnnnnnnnnnnnnnnnnnnnnnnnnnnnnnnnnnnnnnnnnnnnnnnnnnnnnnnnnnnnnnnnnnnnnnnnnnnnnnnnnnnnnnnnnnnnnnnnnnnnnnnnnnnnnnnnnnnnnnnnnnnnnnnnnnnnnnnnnnnnnnnnnnnnnnnnnnnnnnnnnnnnnnnnnnnnnnnnnnnnnnnnnnnnnnnnnnnnnnnnnnnnnnnnnnnnnnnnnnnnnnnnnnnnnnnnnnnnnnnnnnnnnnnnnnnnnnnnnnnnnnnnnnnnnnnnnnnnnnnnnnnnnnnnnnnnnnnnnnnnnnnnnnnnnnnnnnnnnnnnnnnnnnnnnnnnnnnnnnnnnnnnnnnnnnnnnnnnnnnnnnnnnnnnnnnnnnnnnnnnnnnnnnnnnnnnnnnnnnnnnnnnnnnnnnnnnnnnnnnnnnnnnnnnnnnnnnnnnnnnnnnnnnnnnnnnnnnnnnnnnnnnnnnnnnnnnnnnnnnnnnnnnnnnnnnnnnnnnnnnnnnnnnnnnnnnnnnnnnnnnnnnnnnnnnnnnnnnnnnnnnnnnnnnnnnnnnnnnnnnnnnnnnnnnnnnnnnnnnnnnnnnnnnnnnnnnnnnnnnnnnnnnnnnnnnnnnnnnnnnnnnnnnnnnnnnnnnnnnnnnnnnnnnnnnnnnnnnnnnnnnnnnnnnnnnnnnnnnnnnnnnnnnnnnnnnnnnnnnnnnnnnnnnnnnnnnnnnnnnnnnnnnnnnnnnnnnnnnnnnnnnnnnnnnnnnnnnnnnnnnnnnnnnnnnnnnnnnnnnnnnnnnnnnnnnnnnnnnnnnnnnnnnnnnnnnnnnnnnnnnnnnnnnnnnnnnnnnnnnnnnnnnnnnnnnnnnnnnnnnnnnnnnnnnnnnnnnnnnnnnnnnnnnnnnnnnnnnnnnnnnnnnnnnnnnnnnnnnnnnnnnnnnnnnnnnnnnnnnnnnnnnnnnnnnnnnnnnnnnnnnnnnnnnnnnnnnnnnnnnnnnnnnnnnnnnnnnnnnnnnnnnnnnnnnnnnnnnnnnnnnnnnnnnnnnnnnnnnnnnnnnnnnnnnnnnnnnnnnnnnnnnnnnnnnnnnnnnnnnnnnnnnnnnnnnnnnnnnnnnnnnnnnnnnnnnnnnnnnnnnnnnnnnnnnnnnnnnnnnnnnnnnnnnnnnnnnnnnnnnnnnnnnnnnnnnnnnnnnnnnnnnnnnnnnnnnnnnnnnnnnnnnnnnnnnnnnnnnnnnnnnnnnnnnnnnnnnnnnnnnnnnnnnnnnnnnnnnnnnnnnnnnnnnnnnnnnnnnnnnnnnnnnnnnnnnnnnnnnnnnnnnnnnnnnnnnnnnnnnnnnnnnnnnnnnnnnnnnnnnnnnnnnnnnnnnnnnnnnnnnnnnnnnnnnnnnnnnnnnnnnnnnnnnnnnnnnnnnnnnnnnnnnnnnnnnnnnnnnnnnnnnnnnnnnnnnnnnnnnnnnnnnnnnnnnnnnnnnnnnnnnnnnnnnnnnnnnnnnnnnnnnnnnnnnnnnnnnnnnnnnnnnnnnnnnnnnnnnnnnnnnnnnnnnnnnnnnnnnnnnnnnnnnnnnnnnnnnnnnnnnnnnnnnnnnnnnnnnnnnnnnnnnnnnnnnnnnnnnnnnnnnnnnnnnnnnnnnnnnnnnnnnnnnnnnnnnnnnnnnnnnnnnnnnnnnnnnnnnnnnnnnnnnnnnnnnnnnnnnnnnnnnnnnnnnnnnnnnnnnnnnnnnnnnnnnnnnnnnnnnnnnnnnnnnnnnnnnnnnnnnnnnnnnnnnnnnnnnnnnnnnnnnnnnnnnnnnnnnnnnnnnnnnnnnnnnnnnnnnnnnnnnnnnnnnnnnnnnnnnnnnnnnnnnnnnnnnnnnnnnnnnnnnnnnnnnnnnnnnnnnnnnnnnnnnnnnnnnnnnnnnnnnnnnnnnnnnnnnnnnnnnnnnnnnnnnnnnnnnnnnnnnnnnnnnnnnnnnnnnnnnnnnnnnnnnnnnnnnnnnnnnnnnnnnnnnnnnnnnnnnnnnnnnnnnnnnnnnnnnnnnnnnnnnnnnnnnnnnnnnnnnnnnnnnnnnnnnnnnnnnnnnnnnnnnnnnnnnnnnnnnnnnnnnnnnnnnnnnnnnnnnnnnnnnnnnnnnnnnnnnnnnnnnnnnnnnnnnnnnnnnnnnnnnnnnnnnnnnnnnnnnnnnnnnnnnnnnnnnnnnnnnnnnnnnnnnnnnnnnnnnnnnnnnnnnnnnnnnnnnnnnnnnnnnnnnnnnnnnnnnnnnnnnnnnnnnnnnnnnnnnnnnnnnnnnnnnnnnnnnnnnnnnnnnnnnnnnnnnnnnnnnnnnnnnnnnnnnnnnnnnnnnnnnnnnnnnnnnnnnnnnnnnnnnnnnnnnnnnnnnnnnnnnnnnnnnnnnnnnnnnnnnnnnnnnnnnnnnnnnnnnnnnnnnnnnnnnnnnnnnnnnnnnnnnnnnnnnnnnnnnnnnnnnnnnnnnnnnnnnnnnnnnnnnnnnnnnnnnnnnnnnnnnnnnnnnnnnnnnnnnnnnnnnnnnnnnnnnnnnnnnnnnnnnnnnnnnnnnnnnnnnnnnnnnnnnnnnnnnnnnnnnnnnnnnnnnnnnnnnnnnnnnnnnnnnnnnnnnnnnnnnnnnnnnnnnnnnnnnnnnnnnnnnnnnnnnnnnnnnnnnnnnnnnnnnnnnnnnnnnnnnnnnnnnnnnnnnnnnnnnnnnnnnnnnnnnnnnnnnnnnnnnnnnnnnnnnnnnnnnnnnnnnnnnnnnnnnnnnnnnnnnnnnnnnnnnnnnnnnnnnnnnnnnnnnnnnnnnnnnnnnnnnnnnnnnnnnnnnnnnnnnnnnnnnnnnnnnnnnnnnnnnnnnnnnnnnnnnnnnnnnnnnnnnnnnnnnnnnnnnnnnnnnnnnnnnnnnnnnnnnnnnnnnnnnnnnnnnnnnnnnnnnnnnnnnnnnnnnnnnnnnnnnnnnnnnnnnnnnnnnnnnnnnnnnnnnnnnnnnnnnnnnnnnnnnnnnnnnnnnnnnnnnnnnnnnnnnnnnnnnnnnnnnnnnnnnnnnnnnnnnnnnnnnnnnnnnnnnnnnnnnnnnnnnnnnnnnnnnnnnnnnnnnnnnnnnnnnnnnnnnnnnnnnnnnnnnnnnnnnnnnnnnnnnnnnnnnnnnnnnnnnnnnnnnnnnnnnnnnnnnnnnnnnnnnnnnnnnnnnnnnnnnnnnnnnnnnnnnnnnnnnnnnnnnnnnnnnnnnnnnnnnnnnnnnnnnnnnnnnnnnnnnnnnnnnnnnnnnnnnnnnnnnnnnnnnnnnnnnnnnnnnnnnnnnnnnnnnnnnnnnnnnnnnnnnnnnnnnnnnnnnnnnnnnnnnnnnnnnnnnnnnnnnnnnnnnnnnnnnnnnnnnnnnnnnnnnnnnnnnnnnnnnnnnnnnnnnnnnnnnnnnnnnnnnnnnnnnnnnnnnnnnnnnnnnnnnnnnnnnnnnnnnnnnnnnnnnnnnnnnnnnnnnnnnnnnnnnnnnnnnnnnnnnnnnnnnnnnnnnnnnnnnnnnnnnnnnnnnnnnnnnnnnnnnnnnnnnnnnnnnnnnnnnnnnnnnnnnnnnnnnnnnnnnnnnnnnnnnnnnnnnnnnnnnnnnnnnnnnnnnnnnnnnnnnnnnnnnnnnnnnnnnnnnnnnnnnnnnnnnnnnnnnnnnnnnnnnnnnnnnnnnnnnnnnnnnnnnnnnnnnnnnnnnnnnnnnnnnnnnnnnnnnnnnnnnnnnnnnnnnnnnnnnnnnnnnnnnnnnnnnnnnnnnnnnnnnnnnnnnnnnnnnnnnnnnnnnnnnnnnnnnnnnnnnnnnnnnnnnnnnnnnnnnnnnnnnnnnnnnnnnnnnnnnnnnnnnnnnnnnnnnnnnnnnnnnnnnnnnnnnnnnnnnnnnnnnnnnnnnnnnnnnnnnnnnnnnnnnnnnnnnnnnnnnnnnnnnnnnnnnnnnnnnnnnnnnnnnnnnnnnnnnnnnnnnnnnnnnnnnnnnnnnnnnnnnnnnnnnnnnnnnnnnnnnnnnnnnnnnnnnnnnnnnnnnnnnnnnnnnnnnnnnnnnnnnnnnnnnnnnnnnnnnnnnnnnnnnnnnnnnnnnnnnnnnnnnnnnnnnnnnnnnnnnnnnnnnnnnnnnnnnnnnnnnnnnnnnnnnnnnnnnnnnnnnnnnnnnnnnnnnnnnnnnnnnnnnnnnnnnnnnnnnnnnnnnnnnnnnnnnnnnnnnnnnnnnnnnnnnnnnnnnnnnnnnnnnnnnnnnnnnnnnnnnnnnnnnnnnnnnnnnnnnnnnnnnnnnnnnnnnnnnnnnnnnnnnnnnnnnnnnnnnnnnnnnnnnnnnnnnnnnnnnnnnnnnnnnnnnnnnnnnnnnnnnnnnnnnnnnnnnnnnnnnnnnnnnnnnnnnnnnnnnnnnnnnnnnnnnnnnnnnnnnnnnnnnnnnnnnnnnnnnnnnnnnnnnnnnnnnnnnnnnnnnnnnnnnnnnnnnnnnnnnnnnnnnnnnnnnnnnnnnnnnnnnnnnnnnnnnnnnnnnnnnnnnnnnnnnnnnnnnnnnnnnnnnnnnnnnnnnnnnnnnnnnnnnnnnnnnnnnnnnnnnnnnnnnnnnnnnnnnnnnnnnnnnnnnnnnnnnnnnnnnnnnnnnnnnnnnnnnnnnnnnnnnnnnnnnnnnnnnnnnnnnnnnnnnnnnnnnnnnnnnnnnnnnnnnnnnnnnnnnnnnnnnnnnnnnnnnnnnnnnnnnnnnnnnnnnnnnnnnnnnnnnnnnnnnnnnnnnnnnnnnnnnnnnnnnnnnnnnnnnnnnnnnnnnnnnnnnnnnnnnnnnnnnnnnnnnnnnnnnnnnnnnnnnnnnnnnnnnnnnnnnnnnnnnnnnnnnnnnnnnnnnnnnnnnnnnnnnnnnnnnnnnnnnnnnnnnnnnnnnnnnnnnnnnnnnnnnnnnnnnnnnnnnnnnnnnnnnnnnnnnnnnnnnnnnnnnnnnnnnnnnnnnnnnnnnnnnnnnnnnnnnnnnnnnnnnnnnnnnnnnnnnnnnnnnnnnnnnnnnnnnnnnnnnnnnnnnnnnnnnnnnnnnnnnnnnnnnnnnnnnnnnnnnnnnnnnnnnnnnnnnnnnnnnnnnnnnnnnnnnnnnnnnnnnnnnnnnnnnnnnnnnnnnnnnnnnnnnnnnnnnnnnnnnnnnnnnnnnnnnnnnnnnnnnnnnnnnnnnnnnnnnnnnnnnnnnnnnnnnnnnnnnnnnnnnnnnnnnnnnnnnnnnnnnnnnnnnnnnnnnnnnnnnnnnnnnnnnnnnnnnnnnnnnnnnnnnnnnnnnnnnnnnnnnnnnnnnnnnnnnnnnnnnnnnnnnnnnnnnnnnnnnnnnnnnnnnnnnnnnnnnnnnnnnnnnnnnnnnnnnnnnnnnnnnnnnnnnnnnnnnnnnnnnnnnnnnnnnnnnnnnnnnnnnnnnnnnnnnnnnnnnnnnnnnnnnnnnnnnnnnnnnnnnnnnnnnnnnnnnnnnnnnnnnnnnnnnnnnnnnnnnnnnnnnnnnnnnnnnnnnnnnnnnnnnnnnnnnnnnnnnnnnnnnnnnnnnnnnnnnnnnnnnnnnnnnnnnnnnnnnnnnnnnnnnnnnnnnnnnnnnnnnnnnnnnnnnnnnnnnnnnnnnnnnnnnnnnnnnnnnnnnnnnnnnnnnnnnnnnnnnnnnnnnnnnnnnnnnnnnnnnnnnnnnnnnnnnnnnnnnnnnnnnnnnnnnnnnnnnnnnnnnnnnnnnnnnnnnnnnnnnnnnnnnnnnnnnnnnnnnnnnnnnnnnnnnnnnnnnnnnnnnnnnnnnnnnnnnnnnnnnnnnnnnnnnnnnnnnnnnnnnnnnnnnnnnnnnnnnnnnnnnnnnnnnnnnnnnnnnnnnnnnnnnnnnnnnnnnnnnnnnnnnnnnnnnnnnnnnnnnnnnnnnnnnnnnnnnnnnnnnnnnnnnnnnnnnnnnnnnnnnnnnnnnnnnnnnnnnnnnnnnnnnnnnnnnnnnnnnnnnnnnnnnnnnnnnnnnnnnnnnnnnnnnnnnnnnnnnnnnnnnnnnnnnnnnnnnnnnnnnnnnnnnnnnnnnnnnnnnnnnnnnnnnnnnnnnnnnnnnnnnnnnnnnnnnnnnnnnnnnnnnnnnnnnnnnnnnnnnnnnnnnnnnnnnnnnnnnnnnnnnnnnnnnnnnnnnnnnnnnnnnnnnnnnnnnnnnnnnnnnnnnnnnnnnnnnnnnnnnnnnnnnnnnnnnnnnnnnnnnnnnnnnnnnnnnnnnnnnnnnnnnnnnnnnnnnnnnnnnnnnnnnnnnnnnnnnnnnnnnnnnnnnnnnnnnnnnnnnnnnnnnnnnnnnnnnnnnnnnnnnnnnnnnnnnnnnnnnnnnnnnnnnnnnnnnnnnnnnnnnnnnnnnnnnnnnnnnnnnnnnnnnnnnnnnnnnnnnnnnnnnnnnnnnnnnnnnnnnnnnnnnnnnnnnnnnnnnnnnnnnnnnnnnnnnnnnnnnnnnnnnnnnnnnnnnnnnnnnnnnnnnnnnnnnnnnnnnnnnnnnnnnnnnnnnnnnnnnnnnnnnnnnnnnnnnnnnnnnnnnnnnnnnnnnnnnnnnnnnnnnnnnnnnnnnnnnnnnnnnnnnnnnnnnnnnnnnnnnnnnnnnnnnnnnnnnnnnnnnnnnnnnnnnnnnnnnnnnnnnnnnnnnnnnnnnnnnnnnnnnnnnnnnnnnnnnnnnnnnnnnnnnnnnnnnnnnnnnnnnnnnnnnnnnnnnnnnnnnnnnnnnnnnnnnnnnnnnnnnnnnnnnnnnnnnnnnnnnnnnnnnnnnnnnnnnnnnnnnnnnnnnnnnnnnnnnnnnnnnnnnnnnnnnnnnnnnnnnnnnnnnnnnnnnnnnnnnnnnnnnnnnnnnnnnnnnnnnnnnnnnnnnnnnnnnnnnnnnnnnnnnnnnnnnnnnnnnnnnnnnnnnnnnnnnnnnnnnnnnnnnnnnnnnnnnnnnnnnnnnnnnnnnnnnnnnnnnnnnnnnnnnnnnnnnnnnnnnnnnnnnnnnnnnnnnnnnnnnnnnnnnnnnnnnnnnnnnnnnnnnnnnnnnnnnnnnnnnnnnnnnnnnnnnnnnnnnnnnnnnnnnnnnnnnnnnnnnnnnnnnnnnnnnnnnnnnnnnnnnnnnnnnnnnnnnnnnnnnnnnnnnnnnnnnnnnnnnnnnnnnnnnnnnnnnnnnnnnnnnnnnnnnnnnnnnnnnnnnnnnnnnnnnnnnnnnnnnnnnnnnnnnnnnnnnnnnnnnnnnnnnnnnnnnnnnnnnnnnnnnnnnnnnnnnnnnnnnnnnnnnnnnnnnnnnnnnnnnnnnnnnnnnnnnnnnnnnnnnnnnnnnnnnnnnnnnnnnnnnnnnnnnnnnnnnnnnnnnnnnnnnnnnnnnnnnnnnnnnnnnnnnnnnnnnnnnnnnnnnnnnnnnnnnnnnnnnnnnnnnnnnnnnnnnnnnnnnnnnnnnnnnnnnnnnnnnnnnnnnnnnnnnnnnnnnnnnnnnnnnnnnnnnnnnnnnnnnnnnnnnnnnnnnnnnnnnnnnnnnnnnnnnnnnnnnnnnnnnnnnnnnnnnnnnnnnnnnnnnnnnnnnnnnnnnnnnnnnnnnnnnnnnnnnnnnnnnnnnnnnnnnnnnnnnnnnnnnnnnnnnnnnnnnnnnnnnnnnnnnnnnnnnnnnnnnnnnnnnnnnnnnnnnnnnnnnnnnnnnnnnnnnnnnnnnnnnnnnnnnnnnnnnnnnnnnnnnnnnnnnnnnnnnnnnnnnnnnnnnnnnnnnnnnnnnnnnnnnnnnnnnnnnnnnnnnnnnnnnnnnnnnnnnnnnnnnnnnnnnnnnnnnnnnnnnnnnnnnnnnnnnnnnnnnnnnnnnnnnnnnnnnnnnnnnnnnnnnnnnnnnnnnnnnnnnnnnnnnnnnnnnnnnnnnnnnnnnnnnnnnnnnnnnnnnnnnnnnnnnnnnnnnnnnnnnnnnnnnnnnnnnnnnnnnnnnnnnnnnnnnnnnnnnnnnnnnnnnnnnnnnnnnnnnnnnnnnnnnnnnnnnnnnnnnnnnnnnnnnnnnnnnnnnnnnnnnnnnnnnnnnnnnnnnnnnnnnnnnnnnnnnnnnnnnnnnnnnnnnnnnnnnnnnnnnnnnnnnnnnnnnnnnnnnnnnnnnnnnnnnnnnnnnnnnnnnnnnnnnnnnnnnnnnnnnnnnnnnatcacttacgttcagcttctccggagccgggatggcagctatcgcgtcagcctgccttccgtgatcgcggaagtatatactcccctggatgtcgcgcgtaagatggatcctgccgatctggaccgcctctatccgccccgcgcgctcaacaagctcccttacgggctcagcctgaaagcggagatcagcatgcagggcggggtgaaatcggtggattcgccctctcatccgatcagggtcgaaatgggggaagatattgtcagaattagcttttccagcggggaagtgcagatggaccgcgatctggtgctcaatatcgagcccgtccaagtcagcggaaagctggcctatttctgccctgacccgtttcaggaaggctggatcggctacgcggagttcatgccgaagctgcccgaaaaagcccgccagcccaagaacatcatctttatcatcgactgttccggctccatgagaggcagcagcatcgaatccgccaaaagcgctctgttgctgcttttagcctctctgcgtgagggcgaccgcttcaacatcatcgcctttggcagtgacttccactcccttttcacaagcttgaacagctacgatgacagtagcctggacaaagcccgcgcctgggtgcaggctttggacgccgatctgggcggcaccgagattctcagtcccctcaaacacgccttggaaaccgacccggaagacaccaagaacatcatcctgctcaccgacggagaagtgggaaacaacagccagatacaggattacgtgcgcaaagcccccaaccgtccccgcatcttcaccatcgggctgggacgcaacgccgacgaggaactgataaagtccctgccccggcttaccggcggcgaaagtgagttcgcctatcccggcgaaaggctggagcccgtcatcggcaggcatctggcacgcatggacaatcccgtcgtcaccagcctctgcctgaattggggcggacagagccgacaactggacagccagtgcatttgcctgatccccaacgaaccgctgtattttatggagcatctggataggcagccggaaggcaaagtaagcctggtggcaagcctggcggatggcactaccctctctctggaaagcggggagttgcagccctgtccccagtcccacggcggcttgccgcagctctacgccaaacaccggcttcagaacccgggccggacaccctccggttcgcggcaaagaatgagatccagccgtgacatagccacggaaatcgccgtcaaataccagatcctgagcgagtttaccagctttgtggtgagcgatccccgccgtaacgaatccctcaagggaggcatcgaactgcgccgggtgcctgtggtggccactttggcatatcatgcggaacggatatgtgcgtgcgcctatccccccacagaatcagtcatgttttataacacgctattggataaccagaactctctcagttctaaagaagatgatcctatccttagcaggttggtgcttacgcaaacggcaaacggctactgggataaatcccaattactgcgcctggtattgggaaacaataaaataaaatccaaagacgtcgccgatcggctcgctctgacaggcaagttcaaaccggcagtcgccaaaaggatcggcatcaccctggttgtggtctattacctggaatacttcgccatgatttcgagtgaggaatatcaaaccatgctggataaggctaaggagtggctggcaaaaaataaaatccagccagaacagtaccgggaaaagatttgcaggctgttcttagattagatatacctcgttccgggcaaacggaggctacaggcgtagtctccgttttttgcgccagggctgcgagccgccatcttatgccgctgtcgcgagaagctgctcccaccgtctggagtgcaaatccaggccccggtattcgttttggatggtgtcccaggcaagctgctggaggaggttagccgtggcggcgtcgatctgtggggggaaatacctgttgcccacagggttgacgttccagatgcgggccagcatcaggcaggctaccaagtaggtgccatagatgctggggtggtagttgtccgcttcatagagatttggcatgccggggatggaatcggcgttgtgccacgccactcctgccggcaccacgggggcatccagccaggctccgatgtagcggtaggcgtctctgatcggcacatacatttccgggttgttgcgccaggcccaggtcatgtagaaaccggtgagggcgcccgcctggtggatcagggtgttcagcgaatcggcatagctgtaaaagagttccggattcagcatggggcggctgctctgttcctggaggatcaccaggtcccaatctcccgtggcgatggtgctgagggtgttctgatcgtgataatggttttccagggtgtatccgccactggttctggcatccaccaccacattccattcgggatgcgccatgtcgatcagggcttgcaagtgagtatccaccccatcgttgaagtaggtgtggctgtttcccaccaggaggacgcggcggctgtcttcatagggaagcccccaccccacaaccacttccaggcctccgggaacaaactgcagggtgatgtgcaccgtggtggtctgagagggtgagaccagtccgctgccctggccggtggcgatcagggtgaggccgtcaaagacctgtacatcgatggcgtaaacgcccggctccaagtcctgcaaagtcccctcagccatattgccgctgatggcgaggtccatgctctggctgtaagtccctttgacgacagtgactgccaccctcgagacgttgaaattgagctgtgccgccgggctgaggtccatgcggatcggcagctcgcccgtctggtcgggaagcgtggaaacagtgttgcagcctgccaaaaacagggctgccagtaagctgaaaatgactaatcttggcattttggctccttgaatgaacggattggttatctatcatgttttcaaggcaatctgtcaagaaaaatccgattccccgcacggcaagatacttgacagaaatggacatttatttataaatgcaattgctcgtacaggatttttccccagcggaacctgacacaatcagttacagaatggagcggaagcatgacagacatagaactttcaatagtcacccaagcagacccggaggcgatcctggccttgtatcgccacgcgggatggtggcaaaccgatgacaatccggagtatctgaggacggtggaaaagataatcgcgaactcccactgcttcgcgatcgccgcccacggctccaggatcatcggcatgggcagggcaatcagcgacagggtgagcgacgcctacatccaggacgtgacggtacacagcgactaccgcggccggggcatcggcaaggccatcgtgcgcaaactgctcgaacgcctgcgcggggacggaatgcagtggataggcctgatcagcgaaccgggctacgacaggttttacgaagggctgggctttgcccggatggagggatacacgccgttcctgttgaagcaggactaagcgcgcgacacagtatgctaaagctcgagcctcttaccactgcccagattcccctcctgcgcgagttcctcagccgctatccgcgccagtcctgcgactacaacatctgcaacctcctaagctggggcaaaatctacaacaaccaatacacgctctgggaaggccatctggtactggtcaatccgcaatactcctatctgctctacccggtgggaccgggcttgggcgcggacaagacgagggaactttttgacctctaccgcgaggacgctccggaggcgaaactgctgatcatcccggagaactggcaggaaagctgcccgggcctggacaggcactttgagatcagcgacgacagggactggtatgactacgtctatgcgacggagaaaatggtgaacctgagaggcaaaaagctgaccaagaagaaaaacctgatctcccagttccggcgtgcctatccgaactatcatgtgctgccgataagcaaggaaaaacacgaggtgatcgagcgcttcaccgaaaaatggcgccgcgagaggcacgttgaaggcagctatctggacaccgagatgaaagccatccaaaacacccttgagatgtgggacgaactgcccgtggagggaataatcgtctgcctggaccaaaggatcgccgcctattccatcttcagcccgcagacgcaggacatggtgacggtacacttcgagaagtttgatcccgacaaaaagggcagcgcccagctaatctattgggaaaccgcccgctatctgcaatcccgctacaaatggataaaccgcgagcaggacatcggcctcgagggtttgaggcaagccaagaccagctatgcgccggactttatggtcaagttcctcgtgggaatagcaaagtaagcagccacccgattcccacgcatcccgccagggaaagcaggaaggcggctatccgcttggggcgcggattgtaaaaaagctgcaaacccaccggcagcagatcgtgggcctgccagcggacggtgtattttttcagctccggatggggtttgatacggttcagcttcctgagataggaaatatgcttctgatggtaattccggctggcaatgccgccattcaggtcgtagtagctgaaaccccggtaatcgaactcacccagcctggccagcaagcccgcgtatcccgcttcaaaaagcctgtgagcctcttcctgcccggtgattttgtatgtgtcccaaaggcaaagcaggatcgccaacatcccgttgagcacaaagggttgcccctcgccgggatactcctgaaaccagagggagccatccggcaagcgcctcgtcaggctgcttccgggcgcgagggtgcgcatcgccatgacgctgttttgcagccagtcgtcctgggcggtcagttcatagcgccgggcaaaggcaagcatgcttctggcctgggccagggcgctgcaccagggcgcgcgcagccccagcctgggcaggtcgaagcgatagggaagccacagcctgccctcttccacctcggagtgttccagcagccaatcggtgagcttcagaaagcttgcgcgcctggcgggatccttcctgcgctggtagtcgcgattggcctgtgccgccacgaagaggggattgtattgcaagcccagatcccggtaaagctggatgggaatgccccgctcatcgaatctgcgagtctggttcaggggcctgccagtcagcaatgtgaccgccctttccccccaggcctgcattttgggctcggcaacctgccagatgagagcgtgggcgacgactgtccagaggcgcggatcgctcagcatctatccctccggaaagccctgggaagcaggctcagcaaaaacatgacaaactccagcaccacaacgctcgcccccgtgggcaggttcagccaccaggaaagggcgaagccgccaaaggaagccagcagcgaaaagacaacgcagaaaaccagggccctgtccaaacggtcaaccagattgaacgccgccgccgcgggcaggatcagttgggcgctcaccaggatgatgcccgccgcccgcacgttgatcacgatgttcaccgccagcaggatcatgaacaggcggttgaccaagccggcatgcaggcggtaaaaccttgccagttctggattgtaggaatagtaaaagagttctttgtagaatcccaggataaagatcaggttcagcacggccgccgcgcccagcagccacagatcggtggaattggcaagcagcacgttgccaaacagataactggccagatcgaaggtgtagcccttgttgagcgagatcaggatgatgccgatggccatggaaacgctcaggaagatggtgatggcgttggcctcctccagcctctggcggcgcgagagccaactgattgccaggctcacccccaccacaaccagcatggcggtgaactgcatattccagcctgccagaatcgccagcgcgatgcccgcaaaggcgatgtgggaaagcgcttcgcccatgtaggaaatccgccgcagggtcacaaagggcgaaaaaagcgccagcgagagcgaggagagcgaggcagccgccagagcgcggatcagaaaggaatattccagcatcagtagtccttgtcgatcagtttcaccgcttcgccgaaggttttgcggatgatctcggcgttcaccagttcggtcttgctgtggcagtgcagttttcggttgaggcagatcagcgagctgcagtgttcggaaagcgtgtgcaggtcgtgggagatggtgatgatggtcttgcctgccttgttcagatcgtgcagcaaagcgaagaagctctgcaccccgggacggtcaaccgaggcttcaggctcgtccaggatcagatagttgctgcgcgagaccagcgcccgcgccagcagcaccctctgcaactgccccccggaaaggcttcccaggcgtttggacgccagctccgccgtgctggtggtttccagggctgccagggcgcgctcccgctgggattttgtgaatctgcctcccaagggcagttccgccgccaatcccatcagcacgatgtccagcgcggaagccggaaaaccgcggtcaaactcttccctttgaggcagatagcccatcgggttgtgccgcagccagtccagatgcgcctcaccatcgatgtggatggtgccgctctgcacgggcagcaaacccaggatcagcctgatcagggtggactttcccgccccgttggggccgattatggccacaaactccccccgcgtgatctgtaagtctatgtcttccagaatcaggctgttgccgaagcgatggctgagcccccgcacctcgatcatcatatccccctcatatcaatccttaccttttgcttgggacaaccttaggtcaaccttataatttataaggaatacctaaggatgtctcctcccggggttaaggacgcgaagtagggccgaatgggaaggcaggcggaaaaaggcggaaacatcattcccaacccagctttaacccctcccagttgttgaggataacgtccatgatgctcttgggtttgaagctgtgccccagcggatccagttgcacgatggagaggtcgaactcactggccagggcgcgcgccgctttgtcgctcatctggacttcggtgtaaacggctttgagattgtggctcttgaccagcgagccgatgcgagccagctcccggggagtgggttccttgccaggggagctttgcacggtgcccagatcctcgatgtcgtaatccttgagcagatagtggaagctgtcgtgccaggtgaccaccggagtgcgggtgaaagtgctccgttcgctctgcatgcgctgatgcagggcggcgaggtcggagatcaggcgtcccgtgttttcgctgatggtggttttcaggtggggaaaacgcgtctgcaactgatcggagaggatcagggtgatgtgggtcagcagccggggcgagagccagatatgcggattggtatcatcggcgggaatgacgtgctgccgccggagctgatcctcgatcttcacatgcctgtcgcccaaggcgtcaaaagcctgccccagattggtttccaggccaaagccgttggatactgcgagggccgccccgttcaaggcacgcagcccggcgggcttggggctgaaggtatggggcgagctgttgggcggaatgagggtgaccacgttcaggctgtcgccggtcagttgcctcaccagtaattcatagggatagatcgagaccaccacggtctcccgctcgttccggggcgagccggaacaggccaggagagccagtagcgccagcgatcccaacagtagcggcaagattctgcgcatgggcttactccagttcacgcagcagttgggtcagcaaacgcactcccaccccggtggccccgtaggtgttgatgccgctttccctgtccttgtgcgcggttccggcgatatcgatgtgcagccagggtttcttgtccacaaactcgcggatgaacagaccggcagtgatcgctccagccagaggcccgccgctgtttttgaggtcggcgatgtcgcttttgatcagatccagatattcttcatgggagggcagttgccagatcagttctccggtgaagtcggccgcgtgtttcgccttgttcagcaaggcgtcgttgttgctcatcaccatcgaaatctgattgcccaaagctcccacggcggctccggtgagggtggcgatgtcgatgaccttggagacgcgttccttgctgaccgcgtaatggatggcgtccaccagggtcaggcggccttcggcgtcggtgttgttgacctcgatggtcttgccagccatgctgcggatcacgtctccggcgtggtaggcgtggccggagaccatgttttcacaggcggcgatcacgccaaagacgtttaccttcagcttgagggtggaaatggccacaaaggtgcccagcacggccgcggctcccgccatgtctgttttcatgttcaccatgccctgggggcttttgaggcagtatccaccgctgtcgtaggtgagccctttgccgatcaggccgatgcttttgctgcgggaatcgggattgccgtggtaggacatcaggatcaggcgcggttcggcggcggaacccctggctacggcaaggaaggcgtccatcttgatgcgtctcagcttgtccgggccaaagacatcgatggaaaaaccgtgtttcagagccagcttgcgggctgtctccgccagtgtatcgggattgaccacgttggcaggttcgttcaccagatcgcgggccagattggtggcgtcggcaaagatgcggccttcaaggatgccgcggttgatgtggcgggtggtcttgagctccatcaccagatgcaccgcttccaggccgcaggtttcggcgtccgcctggtatttgttgaatttatactcggccagcagggcggattccgccagaatgtggccaaactgcacatctcccaggggattggcaaaggcggggaagagatacacttccctgccattcagcttcatcaccgcgcgcagggcgttggcaaacagggttctcagtttcgcgccgttcaactccttggcgttgcccactccgcagagcaccacgttgttgcagtgcttgggcagcacgatgggaaagctgcggattctgttgaactcaaatttgaattcgttttgtttaagatagagctggatcgcctgtctgatattctccggcaggtattcgacactgtccaggtcgcctttttcgtctatcatcacgatcacgctttccatgtgttcggtaagcttgcgtaacaagtcgattttcatcgtttctcctcgtttatatcttaacttatttaaaaatcttcacttaagctcaggtaataggtgggctttgaggttttggaaagatcggtctgccaggcgatgtcgaagcgcaaaaccacatagcccaggttgagtcgcggcccgaagccatagcccagtttgaggtcatccagcctgccgtcctccgtggtggcgttgaagtctgagaaattgtcgaacaccgtgcccaggtcggcaaagaggctgccgcggatgttggggatgttgagcgggatcgggaaggcgaggttgatgtattcaaaaaagggaaagcgaagttcggcgctcagcagggcctttttgtagccgctgaggttatcccggtaagcccgcaccccatagtagccgctgaggttgaagcgctggggctcctttcccgtactcactccggcaatagcgcgcaaagcgatggcatagcgccggctgaacagggtgtagctgcgcagatcgatgtagttggtgaagtattccacccttccgtcggcgagggtggcgctcacgttatacaggctcctccaacccacaagcggcccggtggagccatagagggcgttgtcgtgcaccagcgaaagaccgggagtgtaaacaagatcctggctgaggctcacctcctcgctcagctcgtagccctccacatagggcgcccaggacaggtattgcccgcgctgatagagcatgtggtcaaactccagccgggtgaagcgcgtgaagggatagcgcagcagcatgtagaggccgctcttgcgttcccggtagcgcaacaaattgttggggaggtaattctcgtccagatagtaggcgtcgtccacgaggttgtagattccgaccccgtagtccatcctgtgcttcaaatacatataggtgagcagcaggttcgactcctccagcttgcccgccacgccgacgttcgcgccgatgccgtggttccccatgatgtcgctgaggccaagctccacatagccgattgttcccacggcggaggaataggccaggccaccccagatgctgtccaaagagaagcggggcttgtatccgcctattgtgggaggattgtctttgctggtggggcggtcgtcatagctgtaatcccgggtgagaaacagggaatcctcgcgggtaagttcaaaggggcggtattccccgctgagggggaagcgttcgtcatactggcgggcggggttgatcctgggcagaggagcgggtttgcgcttgccaaagtagtccagttgccccaaatccacccctgccatgaggtcgggagaggggacggaaagctgttgcgcggtgctgtcgctccaggccaggtttttcaggggatcgtgggcaaagtagatgttccacgccttgtcgaaatagttggaaaccagcaaatagcggttatcaggggagatatccgccgcaaagacccccgccagcacatcggtcaccttcgcctgggcggagctttgcagatcaagggcgtggagattgttgaccttgtcctcataggtgaggtagagcagtttgtcgccgctgccgtcaaacatgggccagctacagtccctgatcctgaaagtcaactgccggggctcccctccatccagatccaggctgtagatattggccaccacattggcaaagaagcccttgcgctgggattccgggttgaggctgcgctccgaggaaaagacgatcgtctgcccatcgggggaaaacctgggctgggcgtcgttgaaatagtcatccgtcaactgcctggtctgcctggtctccaggtcatggagatagatgtcgcagcgcatttcccgctgtccggcaaagaccagcttctgcccatcgggagccacgtccagttcatagatcgcgtcaaattccggcagtttgaccgtctgcacgatctttcccctgtccacgtccaggatgtggatctggtcgccccaggaggtcttggcggaaaaagccacccgtttgccatctggaaaccagctcaggttggagcggaagtaatagaattcctcggctttgccggtggcctcaccggtgaatatcttctttgccctgtccatttcatggatgccagccatccacacgctgtatctcgccccggcggtggaaaaatagacgtagcggtctcccttgggggaaaagcggggcatgaagttgaagtaggagccatccttatcggagcgggtgcgctgctccatcgcttcctggggcactccatggtcgttgacgcggggatagaagtcccgtttcaactgaaagcgccagcgggattccaggctctcgaaatcgatgccaaagactttcttggttgccgcgtccatattgtgtgaggagtggatggtgaaatagtattccgacaccttttcccggccataggtcttggcgatgtaggccagaaagctctcccccagccggtaggcaaaatagccgtccgaactgcccagtggcaccaggtagtcgttgaccaccatatccaggatgaacatgttgttatagtcgttttcgccgccaatggagaggaattccggcagtccttccgaaaaccagaagggaaaggacacaggccggagggacagataggagttgatcatgcctttgtccaaagcgttggcgtaggcatgggtgagctcgtgggcaatcaggtcttccaggttgcggtaactgccgtcgaaggggatcaccacccggttgcgcaggctctcggtgaatcctcccacgccttccgtgaggaggggatagatgatattggtgctctgaaactggctcttgctgcggtaaaagatgatcgggatgcgggacgagatgggatatttgaggtcagcccgcaggttgtagtaggtctcttccgcgagcagcgccgccaggcggccgaagtcgttctcgccccggggaaagtaaacatcaaagtgcatggtctggagggttgaccacgcctcgggtgtggtgttgaccttgttctggccaaagttgtaagcatggcacaaagcggaaatcagcaggaaaagcagggcgaatcttaatttcatcggcatctttaaaagagactgaatttcacatatttcttgggatgggcgcggatatccagcaccagcgaatcgagattggccaccgagcgcaacagcttgtgatacagggcttcatcgttcagcagcagtcccgcgctgccctgtccgctattcagcgccttgacggtttgggaaaggttggcggaaagcgttttgaggctgtccagggtgccgctcacgttttccagggcctggggagagcgttgcagcaccgtgttgatctgctcctcgttggctttggcgacgcggtttatccgctccgagagcgaatctatcttttgcagggtggccgccagccgcgctttggcatcctgggaaagctcctccactgacctggccgcgctgcccgcatcgtcaagcagagaggaagacttcgcaatcaatccattctcccgcctcagctccgatagcacagcgttgaactctcccagagtggcgttcgccttgcccagcagggccatcactccgctggggtcttcaccccgttgggccttgcccagatcgagcagccccggcccctctccctgggcgatgttgagtaccgttccgcccatcaggctgctgtccgagatgtaaaagaccgcgccctctttgaggccgagcccccggttgacgcgcgccgtcaccaggatgtcgtccccgcgggccgcgatgctcttgatgcgccccacttccatgccccggaacatcgccttgtcgcccacttccagccccatgacgtcggtgaagcccacctgcaggtcttgctgcgaacggatcgaaatgcgcttgctcagccacagatagccaaacacggctattaacagcatgataaccgtgaacagcccaaccttgagctgggtctgatagagcttggaataaaactttgccatcgcgcgtcctcaggtctttagctgtttcttctccgcggcgggaaagaggatgttgttcaggatcagcctgtagccgggagaattcttatggagttccaggatggtttccgggtcgccaaccttgtgctggtaatcctcgggatcgtggcctccgtaaaaggtgaaagtgcccttgccgatgttgccgtggatatacttgacctcattttgccccggcacttccgccaggatgatcacgctctttttcaccttgtccttaaagaacgaggtcgtctgccccaaaaagccgttgataacgttcgtatggcactgggtgagcatggtgggcacggggtcgtatttggcggaaaagtcgaagagctgaaaatagtccgcctccgctcccctcaggcgggagtagtcgctggcgtcgatatcggaaaattcgtattcgtagggattggtcttgagggtaaagttctcgaacgcgaagcagcgctcatagttgagcttgcttttatactggggatcgatgccgtcgccgtcgatgagggcgtccacgatatccacaccccgcgccgccagggcgatgtcgaaggtgtccgtgccggcgcacatggcaaagaggaagccgccggcaatcacaaactcctctatcttctgcgccacggcatgcttgagctgccacaccttggcgtagccgtgtttggcggccattgcctcgttggtgcgcacatcgttctgataccaaggcatgtgccggtaggagccataaaacttgccatactgcccggtgaaatcctcatgatgcagatgcagccagtcataatcggccagtttgccttccagcacctcgtcatcccacacgcggtcgtaatccacctgggcatattccagggcgagggtcacggcgtcatcccagggcagggagttgggcgggatatagatgccgatcttgggttctttctccagcaccacggcttccatattggcgttctggatctccagcatgatggcggccacctgggaggacgacacctgctcgaagcgcaccccccggatgttgcacagcgcggaaatctccggcgcgtccgggatcaggaagctgccgccccggtagttgagcagccactttatcacatgctgctctttgagcgcttcaaaagcgactccataggccttgaggtggttgctctgcgtcagatccatggggatcagaatctcagcccgcaacccggcgctcagcagcaaggccagcagcagcgtcaggagcgtgattcggggcagtcggtgcttatgtatcgtggtcggcattcctttgagttttttcattccgtcaaatttactttgggggtaaccaaaagcctgaaaactatgtatatatgtcaaggattttcttttccgatggagggaatttccggctgtcaacgccatcccaaaatcgcaagtttctctcgcttgggcaaatgggaatcccgctttccgaggcaggtctttttgcctgcacccgcgcttgtccggccgccgcccgggattttgtccttgacataaaaatgcgccattttaagtctggcagcgtcatcgagcgagcaaatctaaacctttggcaggattgctcgccgtcagggtatatccggaaacagatatgccttccagtgtgaaaaggtgacacgcaagcaaactttcatttttcctgcgactggcgcagtgtgtctccctttccaagctgaaaatactaaaaataaataaaggagttgaagatgtttttcactgttgctacacctgaaaatgaaccgatcaaatcttacgcacccggaaccaaagaaagagacgccttgaaggcaaagctgaatgaactcggcagccagttcatcgaaattcccgcgattatcgatggcaaggaagtgttcagcggcaacaccgccgactgcatcgaaccccacaaccacaagcacgccatcggcaaataccacaaatgcggcgaaaaggagatcaacctcgccatccaggcggccgtgaaggcaagcaaggattgggagcagatgtctttctaccatcgctcggccatcttcctgagagccgccgaactgctttccaccaaataccgctatctgttgaacgccgccaccatgctggggcaaagcaaaaacgccttccaggccgaaatcgactccgcctgcgaactgattgacttctggcgtttcaacccctattacgctcaaaagatttacgaacagcagcccctcatctcccccaagggagaatggaacttctcggaataccgcgctttggaaggctttgtcttcgccatcacgcccttcaatttcacctccatcgccggcaaccttcccacagccccggcgctgatgggcaacacggtggtctggaaaccttccggaaccgcggtttacagcggctacttcatcatgaagatattgatggaagcaggactgcccgctggtgtcatcaactttgtccccggctcgggagcccagatgggagacctgatcaccgattccccctacctcgctggcatccatttcacgggaagcacccaggtgttcaaccatatctggaagcgcaccgccaacaacatccacctctacaaatcctatcccagaatcgtgggcgagaccggaggcaaggacttcatcttcgcgcacgcttccgcggacatcaagaccctggcggtggcatccctgcgcggagccttcgagttccaggggcagaagtgcagcgccgcgtcccgcctctacattcccgacagcctctacggcaaatggttcgaggaaatcagcgccatgctcgcgacggtcaagatgggcgaagtccaggatttctcgaatttcgtcaacgccgtgatcgacaaaagcagcttcacaaagataaaggaatacatcgacaaagcccgcaacgcgtctgacgccgagatcgtttggggcggaaagtgcgatgacagcaagggctacttcatcgaaccgaccatcatcaagaccaccaatcccaagtttgtcaccatgcaggaagagatcttcgggccggtgctgactgtctatgcctaccccgaaaaagagttcaccgagaccctcgacctctgcgacaaaacctctccctatggcctcaccggctccattttcgcgcaggacagaaccgcgatctccgtcgcctccgaactgctgaagcatagcgcgggcaacttctacatcaacgacaaacccaccggcgccgtggttggacagcaacctttcggcggagccagatcttccggcaccaacgacaaggcgggatcggccatcaacctctaccgctgggtttcggcaaggtcgatcaaagaaaccttcgttcctgccgacgactaccgctatccctttatgggctaaacataaaccacataaccggagacgggatgattcattcgtcccgtctcttcgttttggcattattcaggcttcccatgtcgccgcaacctgacagcggtgtgaaaatatgctgtttttctaatgccttctgtaccatgcagttagaatctgacagccagacccttgccaattaatgcgcccgcctgaaataaatgccgctcccatttgacgggatgggctaagtctatattttccgtaggtcaaccttataatttataaggatgacctaaggatggtggcagcaaatgcaggagcagcaagggagggcgctatgaaggattatgcagattattgccgttgtttttggtgaatgttatactatattgtttgcgttcttttctgtgatggtgaaaaggtggaaaggttccccaaaataagtccaccaggctacatactgtgtcatcccgggcaagcgcacgcttgacccgggatccagtcttttgaaatggccgtagtaaagtggaactgtgaaatggtgtcgttagcaatgaaatacaacactgcgcaaaacgatttatccgttaatccgtgtaatccgtttcatccgtatgatacttggcatgcaaatcttatacggattgacggatttgacggatttacggattactatggtaaaagaataaggcttttcacccagccccgaaacaagtccaccaggctacatactgtgtcatcccgggaagtcggggccccctctggggtggcttacccgggatccagtcttttaggaacaaagcacaccaagactacaaagcgcgccaggcgaaaattattacttgacagccgctttatgtgcaaatataagtatttcaaatggtccgtaatctaaaaggaggatccgatttgagcaagaaatgtattttggcaatggctttgttctgctttcttggcgcgttgggcgcggcatcataccagggatttgcctggaacgggcttgagccgtcgtcggtcaacatggctctgggtggcagtcctgtgggtgtggtaaaccactggcacaaagaccccctttgcgcttacggcaaccccgctttcgcttccctgggagagggcatcgcgtattcacacacgagctatctgtatatgcacaaaagcgatatactgaaaacggaaaacctggaataccgggctgctttactcgggatgtcgtatcacggtttcgcgctgctgcttccagctttgggaaacagcaacagcgccggagtcgagttgggagagtttgccgtctcggacagcactggcgagcttgtggataacttttccctgaacgaagattcctcgaccctcggtttctcggtgaacctgcccgcggcactggccttgatggcacctggcgtgtttccaagatgcgtcaggcatctggctctgggcgcaaattgggtaagtaacgcgagcgatccacatcccgatcctgataatgagggggttctctttagcttgaagaaagcggaaagcgtcaatctgggactgtctgcctgtctgggcagcacgctccaatccggttttgagctggaatactccttcggagcggcgtatatcaatgcttttgacggcaaggcggaatactcggggcaagcatcccgagatccaatttacaagcgtctgagcgttggcggagctatttcgctaagcgcggaaaatcctcactactcccaagggcacggccttgcctcggcagtccgcaacttgtgcagcggcagagtgttgttaggcgcggcggaggagttcagcgatgacgcgccgcttctgggattcggctgcgaagccggggttttcgacaccatcttcctgcgcgcgggataccaccatgacaaggctggaaacattagcggccaaacctacggctggggcgtcaatctccactatcgcgacctcttttcggtgcgcctgaatcacgcactttttcccaggggcaggctgaggaaccaaaaaaacgcctacgattatggcgtttcggcaaacatcctgggcttgtatcaactgctaagcaaatgacgcgtatccgcgattgaaggaattatgaacaagataatgctatatacatcggcagccatcttgatcctaagctgcctgtcgctcatgagctgtgaacctgccaccaaaccggactcccccgctgcctcggaatgctggctggaaaaggtggaacccaatcccatgcccgagggaggcagttgcgagatagtttgcggggtcaaagacggcctgcaagcaaggttggccatattgaattccgtggggcaggaactgagagactggaacctaacagccggaaccagtttcgtaaactgggacggaaaggacaggcacggcaacatctgcgcgagcggtgtgtactactgcctgataagcaccgggagccatagtatctctctcaagatgttggttgcgcgggcaaagtaaacacccgacctataaacagaccacacccaagctatacagtgtgtgatcccggggcgagcagttcgcgcagatacacgcggataaaaggcgcagattgccacggattgacataaaaggattatttcggggctggctggttgtttccaaaagactggatcccgggtcaaaccaccccaccggatcgttaccgatccggcgaggaccccggtaggccgtgatgacgcggaatattgtcgggtatgatttgttttgtagcttggtggttgtgtttggattggacgcttatccttgtatcctgctttttaattcgtgttaatttgtgtaatttgtggatgattattcaaaaagactggatcacggctttatggcctggtggccgattctttcagcggcgcttgatgatcgcgtccgaaaacttggtcttgaaaagggccgtcctgagcagagccttgaaacctgtgctcaccgagtggaacttcaatgtccctgagcgaaatcccttgtagagcatggggatcagccgccatttcttgcccagatagatgctgaggtaggctttggactggaagcgttccagatccttggggctcatcccttggggctggtaaacgcagtgggtgaggtcatacttttcccagtcgtaatggagcagcctgccttccttttgcagcctgtcaaagacctccgtgccggggaagggcgtgagcagggagatcaccacaatgcccaggggcagggaacggaaaaagcggatgttctgacggatatagcggggatggtcaaattcatcgccgctgcccaggatcatataccagacatggctgatcctgagccggttgagcgtgtccaccgcctttttcacctgggtgctgtcgatctgcttgtgcatcttttccagcacttcgggaacgccgctttccaggccgatggtgatcagcgaacagccgcaggccgccatcctggcaaaaagctcgggatgcttgtagataacgtccacgcggctcatgcagttccagcgaatcttgaggcggcgctcttcaagctggcggcaaaattcgttcacccatctgatatcggcggtgaggttgtcgtcgtgaaaccagaaatccttgtagccccaggaaacgaactcctccagctcggaaatgacagtctccacgggacgctggcggtatttgccgccataaaaggaagagatggagcagaaggaacagcggaaggggcagccgcggctggaaaccagcttgggcgtgaagctgaactccggggccaccagatccatggagatgcggggcaggcggctgaggtcgtccaaaatagcgatgtggccgtcgttgtggtagcggccgtccttgaggaagacgataccggggatttcaggatagcgttcacccttttccagagcagccagaagggcgggaaagacctcctccccctcaccccggcagacatagctgacgccggtctccgccaaaacttcgcggtacatgaaggtggcgtggtgcccgccgatgatggtgggcaggccgggatagttttgcgccagatcgatgaggatttcgcgggcgacgggataggtggcggtcacgcaggaaacgcccaccaagtcaggctgatagcgcctgatatagcggggcagggtctcgcggtcggcaatcaccaccgtggccttgtgcccggcatccctcgccgcggcagccacatagaccaggccctggataatctgatgccccttgcgcaggctttccaggccgctggtgcgcgcgcggggtgaaacaagcaggactcgcatcgttcgatctccctttatattgggtgtttaacccgaccgggagcgaccccgccgcaggggcaggatcactcgaagggcaggaagttaaggaacgcgttgacgtgggcagtggataagaccacccctattatcacgcagacgacgataatcagcttaaaatagtcctgagccttgagcatgctcaccaggctcgggtcgcgggaaaggtaggcggaagcggcgtagaactcttcaccgatgagggtatagtcgcaggtggtgataaagaagggaatctgggtgatggcatcggtggcggcgatctggatggctccggactggtttccggtttcggtcatgagcagggcctcggcgtagaagtagcccatatagaagatggtggcgaccctttcgcgcacggtgattccatttaccgccgcgcagaacgcgaactgggtgtcggaaacgaagaagatgtcgttttggttgtaggcgtcaggcctgcccatttcgctgtaggcggtttggaccatttcctgcgccaaggggacaacaaagtagtccacatggggggagatgagcctgatgtcgtattcagcggtctttttggcgatctggttgaggatcatcatggcagagatggtgcacacatcgcccagggtgccccagccgggaacgaacatgaccgggcgtcccatctcggtggcgcggcccacggcgttgtcaagctcagccaatcccgcgatggggcggatatacaattctttgcggcgggatattgatacggtgtaaaccaccagcgcgagcattacaaacgaagcgatcagggtggcccatttggtgttgtcgaaccagttgcccacgggatagttccaaatctctccaccttcgccggaggctggttcggcgatgttccagaagcccttgccatcggtcatcagcagttgataggcgtagctgcggctgtttctgtccttttcagcccggaagaccttgcgccaggttttgtccgactttgcgtctttggcctgggcgtaggcgggatggttgcgcgcgaaatccagttcggcctgtttgtcccgcaattcctgggctgcctcggaaaggctgtctccgggcgccagcccggctttgagcgcggccagttctttctccaaattggtcagatagggggcaaaatcctgtttgtaaaggggaacccacaaaaccgctccgctgacggggtcctttgccactttgaaattgggttcaagcagcagcctgccggtcttctggtcaaagccgacgatctcgggggtgacggtgtcctcaaaggggatggtgtggtcaaaggcgcgggaaatgccgccgatgcgcatgacggggctgtaatccgaatccagtttgcttttggcaaaaacatcgaagaaatacttgttgagcaactggccgttgagggtgaccccgctgccgttgaaacgcaaggccttggcgtcgtaagtcacatcctgccagaccacctggggatcgaaatccttctctccccgcaggcgaaactcgacgcgcaccctgaagctttggtttttggcgaggccagcgggcagcttgaactttatcacgttgtccagatagtattccgtgaccgtgcccaaggtgtttttggcagtatcctggaaggtaaagcggagcctgtctatctcgtaatgctcgtttttggagagttcgtagttcaccctcagcttgtttttccgggagctggtataggaagcctgcgttatgaaggcaaagggcttgccgaaggaaacgatgaggttgtcacctttgtcgttgaccttgtcaatcacctggaaagccggcacgatgggcagttccgcggagttttttacctgcgcgcttttgcccagggtggctgcctggaaaccgccgtagtccataaagctgagcaccggaatgtagtcctgcaggctggaaggcagattgatgccttccgcggccgcgtccacctggtggtaaaaggtctggctccaatagggaggggtgtgttcaaagagctttatggagccgttttgccaggcggcgtaaaacacgctgtcaggggcggcggcgttcttctgctgttcctgccggtaaagcgggagtaggcttttgggcatcagccagccctgccagaggccgatatcggtggttcccgtgggagggctccattcaaacttgaactgcctggtgtcctggatgtaggtggtggcaaacaccgcgctggaatccggccggttgtcaacggggataacgctgcagacccgggcggcgggagtgcgcctgcctgtctcggtcaccgccaccacgctgtaatagtaggtgtttccaggcagggggttggcatagatgctttcaaactggttaagcttgtagccggcaaagacttccttgccctcttcgccatccttttccacccggcgggagccgttgtagaaaccgcgggcggtgagattgcccagcacgctgtaatggggaagcatggtgctcacgacgttcgcgtccctgggaactgcctggtagaggggactgtccggagcctggtgtttttcctttttcaattttgagggagcagtctcaaactggaccagggggagataatcccggtcgtagaaaaagaggtattcgcccatcacaccctgtttgggatcaacttcgatattgcccagcaggaagaggctgtccggcgaatggccgcgatagacgttgtattggatgatccggtggcttttgtccagaggcttccatctcaggagtactccgctgccatcgtcgtggggcatgtcgagagcttcaaagacctccaccccggcatttgcggaacggccgcggacgcagccgcccatggccagcaggagtgatatcagaactaagaggcagaataaaaagtatcttttcattgctttatcccttggagcattgctggtgtggcatcgacgcctgaacagagtccggggggaagaccgggcttcccccctcatgatctgtgtttatttagttgaatatcgctttgatgacgtcgttgaccaggaactggatacgtccgatcagcagtgagatacgcgccataacggttagtccgaatgacgcgccaaagccaaccatcatgtaccatttgccgatatccacaaacttcccataggcgccggtgtgggctttggaaaagaagaagtagagcaacacggcgatagttccgatgaagatcagcaacaggttgatgttttcgatcggcaccatagcctggcgcatctgcaccagaatgctgttgtgcatggccaagggaacggacgcgcccacccccatcatggaaaaggcgattggatagcgcgaaagccagctgtatttgcgggaaaagcggaacaggtagaaaattccaatgatactgggtatgatcagtatccattggtgtttgaggaagatgggctggacgaagaaggggatgaaggcgcgctcgtaggtgagtaccacggagtagcccagggatatccccaccagcagttgttcggacatctgatagaacggattgtccttgtaaaggaaggagaagatgcagagggtgaagaaggctccaaccaggttgctaaataattcaaaagacattttatcctcccttacttcttttgcgctttggcccggctgatgaagtagccgatgtttccgatgatgataaagagaattatcatgatgtgggccaccgactgggcgttcatgccgatacgggccgtcttgaatttatagatggtgttgtgggtcatgcggttgaggtcgttccaggctgtgtagccaagcttcttctggtcgtcctctttcaccttggtgacgtcgatgaccacgttgttgtcctcctcggtcttgtagctgctcatcaaagcctggacttccggaggatagttggccaggaacctgtcaaactccttctgcgagaaaacagccttggtttgagtggtgatcttgagcagtttctggatggattcgtcctccagaacgtcgctgctgaaggagcggccggggactatcttgttgccttcctcgtcgtaggtgacgcccatggggtcgccgggagcgcggtaagcggcaaagacatccaccagcttctcatattcggcagcgcctttcaagcccgccagcatgccgatgaactgtccggtttgcaggtagggatattcgtccgccgccataacggctgtgacgccgacggcgatgttggtgccgaacttgggcctggcataggtgagccagtagccgcccgccacggagccggaaaactccaccaccaggttcatctcgctgtagttgttgatccctttcataatgggcaggttttccaccttgcgcccttcggcgtcggtgggcaccgccgtggcaatgtcgtcgcccatgccgatgatggttggcatgatcagggcggcggggatatagccaaagttgcagtagtccactccagacttgatgtccggatactcttctttcacggagttcacggcatagtcgatgatgggggctccggtgggcaggaaggaaagcaggaagagcttcacattacgctcgaagcagtggcggatgatcgccacttccatcggatacagttccggcatggtggaagcatcgtgccagaagctgagcaggacagcgcggtcttcccggccggcataggagtctattagctgataggtgttctccgtgggaggagaggtgatgttgtcggagttataggggatcatcaggggaatgacgatcgccagggcgaccacgatgtagatccaccggcggtcgagcttttgcagtctttcaaatagattcattttcacctccgcctttaatctccgcccagatacgagcgttcgatgcccaataggatcttgagggtggtggccacgctgcccagacccacacccagcaggattccgcgcttggacgccagattcggcacgtccaggatccattgggagatatcaggcaggtatttgctgatcttgacgcccagaggcacctgagccagcatcaccactatcgccgccaccagcagcacggtggcttccgcggaacgggcgcggaaagccttgtaggcggcggaagccatataaaaagccagcagagcgaacatcgtggcgctcatcggcatctgcatattttcgaacagccacatatagaggccgcccttctgggttccgccgatgaatccagccaaagccgtgatgatgaaaccggcgaaaaagaagaaactgtattgccatttgggagctttgcggcgaatcttggatgtgtgcatcatgcaaaggctgatcacgcccaagagcatcccgaagggagacatggcacgaatccagggcacatagaaatcgtagtagaatacatcctgcagcagtctgtgcggcacaaagacccacagcacccagacgattcctcccaggatcactatcattaatggtattgtcttcttcatttacgacctcttctatttaatagggaatagttgcattaaacctgtgacctggaagcttgccaaaatgccgcccagaatcacgaagatcagaatcaggaacttgaaatagtcctgggctttcagagtccccagcagcatcggctcgcggttgaggtaggccgaggcggcgtaaagctcttctccgatcagggtgtagtcgcaggtggtgataaagaaaggtatctgcgtgatggcgtccgagccggcgatctgcacggctcccacggtgtttccggtttccgtcatcagcagggcttccgcggcgaaatagcccaggaaaaagttggtggccatgcgttcgcggatcatgatgccgttcacgccagccacataggcaaattgcaccgaggtgagatagaatatgttgtttttatcgtagctgtccggacgccccacggcgtagtgagcctctctcactatctcctgggcgatgggcatgacaatgtagtcgtagcaggggacgatcagcttggtgtcgtattccgcggcttttctggccaccaggcccaggattcccagggaagccagggtggccacatcggaaagaccgccgttacccatacaatacagcatcgggcgtcccatctccgtggcgcggccgatggcgttgtcgatctcctgcaagcccgcgatgggacggatatagagatccttgccttgcttggccagtcgcacgaagaccaccacccccacgccgaagatgatgcaggcgacgagggtgaccagtttgttccagtcgaaccagttggataccgccaggttgtaaatatagtcgccttgggcatccttttcgggataggattcggtgaagaggccgcggccgttggtcttgacgatcatgtaggattgcaggcggctgagcggttcgcggatggaagccacgaagttcattctgccgcggttgccgcggaaagtgagggatttcttgtaatccgggtcattctcgtagatcttgatggtcttggccagactctcgtttttcgctgttaaggcttcaatctgctgttgcaaagcctgcgcctggggattggcagccccgccgggaatagctttcatttccgcttgcttggtggctatttcggccttgttgtccttgatgtcctgccgcatcttatccagttccttcgcggcttcatccttgaacacgctggtacggatggtgcgggaatccttgggatcgtcctgcttgacatatttcaggtcgatctgcgattccaccaaagtcaggttttgaaccttttcgccagccttcagcttgcgggtgtagcgctcgccgcccatataggtgtaaagcgtgccgcccttcacaaagttgaagcccagcacgggcttgcccacgttggcaacgtaagggatggtgacatccaggctattatcgtaggaagtgttctttttcaccagggtaaactgcgagccgctgaatgttttacggaacaccgtattgtgcacggaggaaacatccactccattcctgaagagttcgttggaaggcatcagcgacatcatctggttgtcccagacaaggttttgctccaacacatagttgggtaccaaacggcctttctgatatgtgatccgcccgtttttggggttgatctcgtaagggctggtgttcatcgtgatgcgcaccttgaggcccttgttcagatcatagcccttgggcagggtgaccttgatgatgttgtcctgatagaattcgttcaccctggcaaagggcttgtccgaaccgggaaccagcagttcaaagtagatattgttgaccttctgcacgtcggtcttgttaagctggtaattgatcttcagcctggtgccgccctttcctgccagaccgagcttcgcgaacaggcctttgttaccgttctcgcgtttgataatggaggtcttgctgatgaatactatcggttcgttccaaacgactgtgagcctgtcgcccttgtcgttgggtttgtcttccaccacaaactgtgctgcctggggcagcttgctgctgtccgaaagaactacacaggcttggcgggacaagggggaggggttgtttctgtaatcataaaactggatcgcgtaacggctggtggaagcccgttcccaactcaagccggctggcaattcgtcatgtttgaccgccgcgtagtttttgaacgcgcctccattgatttgaccctgggctacaggcagcgcgttggccatggcctggggcgtgcccttgatcttgcaccattgcgaatccggcatctcgggcacagccatgatctggtagaaggcgaggtcggatttgttgaccggatactcccactcaaagcgcagcgtcatgctgtcttgcaaagcggtgcaatagagattgggagaagcctcgggcgcgtcatccacgggaaatccgcacttgggttcggcaattcccagatactggttgcgctcattcaccggaaccacggtatagtaatacaaaatcttgtcttcttcgctggcaggatcgtaggtcttcagggaagcagagatgctctgctggttgattttcacgccagaatagacggtcttgtcttccgaatcggcggaaaaagctttcttcgtccggcgatagtagtctttggattccattatcgagtaaaggttgtatccttcgctcaacctggctaccaattccatatcgcgggggatgttgcgatacaggatgctgcctttcttctgcttttcgtgcttgagctttccaggcgagttgatatccacaaaatcgttgtagccgctatcgtagtaatacatgctgtccgaggcaacgccggttttcacgttcaccgccacggatgcaagatagaacagggaatcgggggtgagtcccctgtaaatgcggtattcctggattctcttttcgcggggcaggggcttccagcctattaccaggccatcgcctccatcgttgggaatatcccgcacaaagagaccctgaaccgtatccagggtttgcccgttctgatccttgcctgttgaaaccttgcatccggccagagccagagcgaggacaagcatcagtccgaaaacacgtatgtacaatttcatacgcttactcctatgctttttcaatttagtaacttatattaaattgcatcaccttacaactgcgcaatattgtcaaatccttttttccttgcctgatggaacagcggggcttgaaagccctgtctctggttcttggctcgggcaacgcataagtctgaatccctacttgaaattctgttgattgccacagagaaaccagacgccatcctcccggtaaaaataggaagcgtcgccctcggtgtcgggatccagatagctgagagtgctgtccgcggccgtgaaggtcagcttcatgctcacgatcgcccgggagccagccaggtcaatatcccgcacttccacgtcaagcaggtcgaagcgtgccatacggtcctgccacagcccgcgcagttgaaagccatacatccctttgtggtaatagtccggatgcacctgggtcatgatgccctcaatgtctttccagcagaaatcgcgggcaatgcctttcaggatatcctcgatgcggattttgtccatgtcttcgggactgctggccaaattgcaggacagcaggaacaaacagagcaacaggacgccaagctgcttcataggcggctcaaccaggccagagtctcaatgtgccaggtttggggaaacatgtcaaaggtctggatgccttccagtttgtaacgcccgctgccaagcaggatcttgaggtccctgtgcagtgtcatgggcgcgcagctcagatagaatatccgcttgatacccgtgtcgattatggcttgcaaggctgccggtttcactccggaacggggagggtccagaatgatcacatccggcgttttgcaggggctgctttgctggtctgaaagcagcgcgggcagggcgtcctcaactctggcgcagagatggtcaacattcgccaggtcgttcagttcggagttcagttccccatccagtgccgcttcccggcattcttccacgcagagcacgcgttctgcctgcgcggccaggttcagccccagcgccccgattccgctgtaggcgtcgaagaccagtcccgcgccgcccatcagtttctgcaggcgggcgatgatctgttccgccgtgccgcggttgatctgccaaaagctgcggtagtggatgcggaagcgtttgcccgccagttcgtcaaagagccagggattgccatacagcagtttgtcttccgggcccaggatcacgtttccccgttcccggttgatgttttgcacgatgccgctgatgcaggggaattccgcggtgatctgcttcacaaagaggttggaaaaaggcagcttggctcccctggtcaccaggatcagcagcaccgagctttgatctctgttgctgcggaggcctatgtggcgcaaagtgccggtgtggctggcttcagagtaggcctgcacacccgctttccggcagatttccaggcaacgctgggcgatggtgtcaaagagttggggatgcaggacgcagcgctgatgggggacgatcctgtgcgaccagcgcgcgtagatgccataatagaggccatcggcgccggaacccacgggcagaaaggctttgttgcggtagtttacgggatttggggaagcgggcatggcgccgatcttcaaatccggggccaggggctgcagcaattccctcaccagttcggtcttggctgccaactgcgccgggtagtccagcatcagccaatcgcagcctccgcaggggtcgtccaggtcaaaggaagcgcagtccgcttcccgcactcccttgccccgctccagccaacgcaggggcctggcaaaggcggtgtccttgcgttctttgaccagctccacttccgccaggtcgccgaccgccatccgctgggcaaagatcgccttgccctcgtgaaagcccaggccaaaaccgcccagagccagcttttctatccggaggatgaatctcttgttcacaccatcatcttacgcagggcttcaatccgcttctccaccggcggatgcgtcgcgaacagggagagggggctgaagttgttgatcttggcaatggcataggcgtctttgcggcgcgaaggcacgtaagctttgctgatcttttccagggcggtgatcatgtggccgggggtggtcagggcggctgagccggcgtccgccttgtattcccggtggcgcgaatgggctgccagcacgatgttggcaaggatcatcagcacattctggatgatcatcgcgatggcggcctggctggcggaatgcatcatcccggacgaagccccgtcatcatcgtttctgcctcttctgccgctcaggagggcggcgatgatattggccagaaagagcacaaaggtgttcatggtgcccatcagcagggtggtggtgaccatgtcgccttccgtgatatgcgtcatctcgtgccccgccacggcagccagttcctcctcatccaggttttgcatgatcccgctggaaaaggcgatcagcgatctgtttttggacgcgccggtggcaaaggcgttgttgtccgccgcctggtagatgccaaactccggcatcctgatgcctttgtgggcggccattttctctatcgtatcaaagagatagagctctttgccgcgggctgtctcccgggtgagcggtgtgatcctgtaggatgccttcgccatcgctttgctggaaagcagagaaatgaccgctccggcaaagccgaatatggcgcagtaaaccagcaacccgatccagtccgagcttttcacgcccacgatctgcatgataaaacccaagacagccaacaccaggatgttgactgtcaaaaacagcccccaacgtttaataatagtccacatggattatataatcctccttacaggtttatcggattcaggggcagccacgggaatgatctcagcccgtgccacccttggggtcacactaattgatagtgcgataacaaggcaagtaaaatttttggtgcccagagattagaaaggcttcatgcaaatatcggggcttcctttgaggtggaaaggtggaaaggagaccttcgtggtgaggtggtgtcgtggtgattgtaaaaaagagatagaacgcggatgacaggatcgacaggatcagcaggatatttgaaggtgaaatagcgaaaagaaggccacgaaacaagtccaccaagctatatacagtgtcatcccgggcaagccggggtcctcgacggatcggttacgatccgttggggtgggatagcttgacccgggatccagtcttttaataatgtccacgaattacacgaattatcacgaattaaaagaacaggataaggacagcgtccagcttcaaaaaaccacacaagacccaaaaaccgcgtcatcacggcctgccggggtcctcgccaaagcgcgtagcggtttggtggggtgtatagagccgggatccggtgcccaggggtggcaaagtctgtttgccacagagaccgaaggtctctccccaacaggcaactccgttgcctctgccgaacagacttcggcagcccacgaaacaaaccccaccaggctatatactgtgtcatcccgggcaagcttgcttgacccgggatccagtgctcagggggtggcaaagtccgtttgccacagagaccggaggtctctcccaaaaaggcaactccgttgcctctgccgaacagacttcggcagcccacgaaacaaaccccaacagactacataccgcgtcatcatgggcaagcttgcttgacccaggatccagtctttttatacaatactccccatttccggccagtttggccgctttttggccggattactttgtagttcggtaaactgtggatgggcccctaccctcacgggatacaaggccattctgagttaaagactccaagtatcttctaactgaacgaatgggaagttgcattgaatctgctatctgggttgatgataacacaccgtgcttctctattgtttgatatacagaccttttgagggaggaatatgcatcgggtctttcaaaccgatcccgagagatcaacttgagccttaataacagatcattctggactgtcatacatagtggcttcaagcgatgagctatgcgaggtatttatttggggaagtgctcgtgcatgatcttgatatcagcctggcttgcataattcacgataaagacctttacatttgcttgtgattcatacttaaccagcttgcctccggctattatttgggcgtttttctcttgcgatgcatattttacaaaatagaccttgtaatccgctttgcttgcgtatttcacgataaacactttagcctgacttgacattataacctccttgatttacatgatattgctttgcattcagacgtccaggattgttgcttttatcctgttggtcaatttctcgaccaaatcttcagcgttttcccagataatatgtttgtactgtcttgtgtcaaaaatatcagatatttgagttccttctttacaacaccagatcaccggttttctttggcccatcgcataaccggcttcaaagtggacgttgatattggggattgtggtatccgctataaggaaatcggatttgttaatctctgcaataatcttatcatcaattttgtcgttatactcttctttgtcaacacggtatggtatcagatcaagtgaaccaactgccttccgtattccattctcatatacgctatccagttctgtatctccaaatttcatagccacaaagacctgttttgttttcacactacccgagacaatctggctgattcgctcccagccttttagctctaatctgagagtatatgtcttagcgagaaaactatcattagaatcaacataccctatgttttttgcgaatctgactaagtaatacagttcttgtttgtcatgcataaacagcaagggacagtcagtttccgcaatggctttcacttgatcgactcgagtgatatgcttatgtaaatataacaataggatatctatcaactcaagtggaccggagggaaatctcacgctttgctttatcttgtcgatgtcttggtggtctgttattttcgaaataattttcgattcttcgtaaagatgcctgagcgcaatacaaagctccttatctctggctggtttgactcctggtttattaatattaaaatgacttaccatcctaaagccattgatctcaaattcaccacaataggcacagcggaaatggaaattattattgtaatctgtccctatgggtgattcactcagtgggttgcggcatatcggacattctgtaacaacgcagttcatgtgtgcatacctccttggtactatcgttacgttatgaatataaactgaaactgagcagggctaatctctgttattgaaaacctgggttggcgcaggaacagggaacccttgaaaagatcactttctttgaggacagaaagaacaacgggttccgccaaggttttgatgggcttgaaatccacgcacagacgttgcgtttcacaagcggtaaaatcctgaaaaggttcgcgggcaacttccaagactcccatgcaggaacgcttatgagggtcataatagatggccttatcatcgggaagcatagacgcaatcagtttttgagcgtatctacccttgatgccgtagaggctataactgtcccggaagagaacatcttcccagttatggtgcttatagggattcctgatcatccaataacgcattgttaaccaaacggggataacgtcgggcataccattgttccacaagctcaatatcttgatcacacagaccgtatagttcatagatgattttatctatttgcctttgttcattacttgaataatcgtagtatctatcagatatctgttttgttatgatcttacggactaatgagatgattttatcattgtttccacagataattggtatttctttgattgcatctatttctgcagctacaccatggtatatcaatgccttgaatataaatttacataattttgaacaaaggatagacaaaatgttgtctatttggagataaggggttgtaacattaattaatgatcctctaatatcataaacagaactactattgtatctaaatgttggggcatattgacctacaatcgaaaatgttattccgttactaaaatatgtgtcactgttctgaaaccttgaacagatagcatttgatcctttaccatccctttctctgatagtcagagttttcattcgagtgacagcccaagaactccaatctatgaagaaatcagttttaacatagtagtttggcagccaaccggattctgtataagaagcgccacctttgtcataggggacaatgtattttccaccgaaccaacggtcagggtcaaatggttgctcggagcgtgattgatgaaagccaaggttgattatcttgtggcggatattgtcattttgtgatattttttccagttctgcgtcggaaacgacatatttcaggtatggctcaatgcttctgtatgtgggtccagattcgggggtctggaaaagatacgatttattgtcgccagtggcaagtccttgagttaccgacgcaatatcagagagtttgacaagcgtgaccttcttaccattgatctctacagttctttcagctttattcttagggttccgatcaacgccaacatcatgcattaaactgaacaacttaggaggggcgacgaagaaaggcagcaaactgcatttatggataatgttttggtgataaatgaacacggcatggacattgtcggagtattcaactgctttttccgcgtctgaaatatcatacaggatttccaggaacttatccagatacttgtggatgctaatgttggtcatatccaccataaggcattgatgggaatctggtatgctataccctggctccgctttctggcacaggattaccacggtgttgaccacttgcttgaaggtgtccgggtgcatgcggattattttgtggatatagttgtcgagcaattgcctgcgcaattttttgtgggacttgatcgtcataaaagtgtcggaaacgatgtaagacaaaaccccatgcggtttcagcggagtgggaaaatcgttgaaattcatgaagcgggcgatgaaagcaccataagggtcatttgaacctaaaccaaggctacttctaacctccggggagattttatcgcctccatagggtggattaccgattacgatatcgaatcctccttccttcatcaccctgggaaagaaacattcgggatggaagaagggacaggcgatattgccatacataaaccatcgtttccaaaacactttgagcctgtctttgcttggatttttaagaccccacttgaagctttggtataagttgctaagttcagtggaaatacgttcagcgagctgttctttttctgccttggtatgttccgcctgatagtattcctcaatcgctcttgataagtcattagatactatttcttcgaatatatcagtttcaatatcgttgagagaatctgcgcagatcaggttggtctctaggttgggcagaggcatcactccaatgtctttgctacagtctgtattttggtcaaccaccagagatatgaagaatctcagttttgcgatatgtactgccaaaggttggatatccactccaaagattgagtcacgcaggatgccaatcttgcgggagtagtcgtcgtagtgttccttcaggtgtttgccaaaatcgtcgcgatattttccttccagcggttccagttttaggtgtaaccatttagagttatcgggatcgaccagattgagtatccgtgtgatcttgtgaagcatgcccatgggaaatgaaccgctgccgcaggctgggtcgaggatgcggattttatccagggcgtcaaccacaaaatcgtcaaaacgcttctcattggcattgacaacatcatggtaaactaggaatctgatgttgtctccatactccattagccccttttctttcgccttggactccagatacaacaccaacgagtcattgaccatgtaatcaatgacctccctgggagtgtaatacgcgccgctgcttctgcgagcgtttctggaaatgtcggggtccgggtcgagttcagccagaaggttttcgaagaccatacctaggagttccggatcaagcgcgacatcttcttccaggggtgtgttttcctcgatggtaaacttgaacttgcccagaatcacattcaacccgggaacatcatctgatctcctgtttccaggagcctgccagccgtagaagatcttgttgggtatgctgatatccgagtctgctatgttgttgttaagtatgcagtggtcttctaaaaactcatcgtcacggttgaacactcctccattcaaaaatggtattctttcgaaaacagtcaaatccagtgcaggatccaggtatttttcaattttgcctttatccagtttacgacttttcttaggctcgttcaggcaatcgaagaacactgtctgcagaatgccacgataatagctattgctttcgggattatcgttatcttttactatcggatagggaacatcggtgtctgagaacagctccagaatgctgctgtcaataaggcctttttcttttaggaaccaacagaacatcaaccggcaaagcaatttgaccagaaagtgcttcttggtctcgttttgctcttcttcagacagttgacactgaaacttgagcctgataatagaaagggaagtgcgataccaagctatgatttgattatagaattccctgtttagttcccggatagagagttgtttctgccaagctttatgcagttggttgatggatgaaacatccaagttcccaagacaaaacttctcaagaatgtcaatgtgccccctgtgcggagtggcgtatctgatatccttaaccaagctaactttatccaagacatctctcgtttcgtcgcgtttgttcagccttcggttgataacggatgtagtcagcagttcgccatatttgattagcagcagcacaggcatcgcgaagcagcggttgatttccctggttaatgcaaccaactcttttcttgtggcatgaagtcctttcagttcaattgatgcgaagatatacgacttaacctcattggagtcaaccgagttacttttaaaccccggtatagtcgtttgaacggagaaggagccagcttctctgatctcatcatttgtgagttgaaagtgcagattgatctttgtccagcgctctttcaaggcttgaacaggcctaagttgatggcgggtagaaaatgcttccgtaaattctgaataggtataggatacttcttcgaatctacgctgggattcatagcccaggactttccaaaaatcgtaggcggcatccacaaaaggacgggtttgaaagttattcaaagcctcctggatggaaagtttcatgtctgtctttgcgttcataggtcttctctctggtgcttatttgattatcagccaggtaatcagttcaaattcaccgccggggtcatgttgtttcaggggagggagcacagcatcgccatgggtttggagttgatcctgctttttctttgcaagggaggctttgatgctttttaaggctttctggatgagctcattataggctctcatgtcttcgcccgatttggtttcctggtcgaactggtcgcaaaggctttcgatgggacttcgccgtccgctggccaggatccggtacatatccaggatctgcttggcattaaagaaacggaaacggacggtgccgtcggtgcggatgtagatcataaaatagggatggagagggttgagcttttcgtattccctgccagattcgttgtggcggaggcagaagatcacaccgggccggatgatttccctgtgttcctggctgactttgaccgagtggtcccaaagttcgtggtcgggagagggcaccacggtgtacaggccaagaggggcttcgcgcagctctttttcgtttgctttgatatagttaagcagatcaacccggaaatcatccagagtgaaatcggtcaggctgatgccgtcttccatgtcttcgatgtcgataacctcttcctttagccttttcaactgcttggcgcggaacttcatttcgttggaaagcagttcttcaaattcctcttcggcgaagagattgtcctcgcctgtggcggtaatatccaccagagccatcctcgcctccactctcaacttgagggagatgtatttgtccaggtctttggtaggccagaagttcagcatctggattttggcattggggctgttgatgcgatcgatacgcccaaagcgctggattatcctcaccggattccagtggatgtcgtagttgaccacatagtcgcaatcctggaggttttgcccttccgagatgcaatccgtggcgatgatgatgtcaatctcttcatcctggggcaggatgggcatcttgtggcgctgcttggcaaaaggggcaaagcaggtgaggatggcgttgaagtcgttctggaaacctttgggcagcttgatggttgttttattatgagaacttccggtgaccagggcaacattgagaccaagctctttgtgaatgaaatccttgagctgctcatagaggtaatcggctgtgtcggcaaaggcggtgaagatcaatatctttttgttgtccttgtttaccggatgtttcagtttgttggtaatgatctgcttcagttcctcaagcttggcatccttgtccggagttaccaggctcgccgtgttgtaaagcgagatcaactggtctttgtccttgctcagggcttccttccatttctccagatcgaggtgttttagttcaaacttcagtttcttgccaactgtgaaatcatcgctgttatcctgttcttccggtgaaaccgcgtcctcatcgccaaaggagtaaatatccccatcttgagtttggccggattcaaatttggcgatcttgtcctgcaggctgttgatcttttccaaggcccgcccgagggtcagggtataggaatgaacgctgctttccaggcgcttgaggaagtttatcttcatcatctcaaccagaaaatcctcgcgttgggcttgggaaaactccttcactttctctgttggctcataaagttccttaaactcctccagaacgaagctggagggtttgaagagggaaagcttgtaagcctggatgtcttcattcactttgtcgtaggaacaaaaatccccttccaggtcgatattcgtgctcaccgagatcggcgttagccgcttgggaaagctctttttatcaatatccttgtagtaggagacaatatgcttgcggctgcgggctatggtaagttcgtcaaggagtttgaagagcgagctgtccagggcgctgaagagttgcgagcttttcttttgtcccgctttgttgctcttcacccagtttgtgaattggctctgggcttgtttcatggtgtaggagacactttctatacccaggctttcgtagaaggcgtcgtccctgccttcggtgatatagtgtatctggttgcgcaggtctttcaggttggtgttgaccggggtagcggagagcatcagcaccttggttttcaccccctctttgattaccttgtgcaaaagaaatccagcccggttatagctcaactcgtcgttttcgtcgatcttttcccgcggatttccccttagattgtgcgactcatctatcacgaccagatcccaggcgccccagttgaaattcgccaggtcgatggaattggcatccgaagttccccgcgctctgcccaggtcggtgtggtacataaccgtgtaggaatagcggtctctggtaaaggggctgagtttgttggcggccatggattggtaaacggtccaattatcttttaactttttggggcagagtaccagaaccctgtattgcagcctctcatagtattggatgattgccagggcttcaaaggtttttcccaggccgacactatcggcaataatacagccgttgtggcgttccaacttgttgatcgcccctttcacaccgtctttttggaagctgtagagcatgttccagatctcagtgtcgaaaaagccggtcttttcggttaacagccccttgtcagcttgctctcccaggaacttctcaaagaggtgatagagggttttataatagataaactctggggaattatgcacatagagttttgccaggtattttagaacttcgtctttgacatcctcaaccaaggatttatcctcgttccacagttcgtcaaaccaagccaggagatctgccctgtcgcgatcgtcggcaacctcgatattgagctcgatattgggtttgttcccgtatccgagaccattaactgtgaagttcgagctgccaagcagggctttctcaaccccgttttcatttgtgatgtgatagagtttgccgtggaggaaatttggcttgaccatggattttatctccaccttctccctgatccattccgcgcagtctcgggctgttttactctgcaccagcctgtttgccagggagatcaccagcttgttgtcctctatctcgaactgcttcttgtcggtcttgttgggatccatggaagccaggaatctgggctcgccaaagagaaagcgcaggtgatcgatcttgtccagcctgttcttcaactgctgataggcatagattgtaaaataggcggaaacaaaggccaacttgctgttgggagtaacgtttagggaaatgaagtcgcccactgtgccatatttacggttatcccgaatgcctgaattcttgttcataagatttatcctaatctccaaaataaagaaaaacctgttggcgtttatatgaagttccagagacgatttcatctataactcaaaacgcaaccccagtttgtttcgtctatttcagcaaggaaaatctgtcaacctaaaaaagcccggagttgagagctttactacaaacaataatcttaccatagatgaggcaggaaaaaactgaacccatatctcccgcaatgcgttagagaggcgttcccctcgtatttgggcaaacggactttgccattcccctcgggctgccgaagtccgttcggcagaggcaacggagttgcctgtttggaagagacctccggtctctgtggcaaacggactttgccacccctggacactggatcccgggtcgctgcccgggatgacgcggtttttgggtcttgtgtggttttttgaagctggacgcttgtccttgtatactgttttatttcgtgataattcgtgtaattcgtggatgtttcttttaaaagactggatcccgggtcaagctatcctaccccaacggatcgtaaccgatccgtcgagggccccgacatgccgggatgacgcggtttttgggtcttgtgtggttttttgaagccggacgcttgtccttgtattctgttttaattcgtgataattcgtgtaattcgtggatgtttcttttaaaagactggatcacgggtcggagcccgtgatgacacggttttttagtctggggggtggtctttttgggggtcggttgggacttgtatcgagagaacctttccaccattccaccattccacctttccacctcaaaaacacctttccaccttttcactatgataaaaataaaacgcaaacaatatagtattacattcaccaaaaacaccagcaatattccgcataatccttcatagcgccctcccttgctgctcctgcgtttgctgccatcatccttaggtcatccctcaccaagttaaggatgacctacggaaaatatagacttagcccaccctggcaaatgagggcaaagaggtgatcaatctacgctcattaaatgtataaaggttatccatagcagaggcggagcgcaaatgatcgcactggagatacacgattcgcgcagggcgcggattgccgggacaagaaaaacccccgggcagtgccgggggttgcaatctcagacagggtctgatcagtttactttgaaggttgtgtcgcctttttcaaagaaggcgatgatctgtttggcagccgccactccggcgttgacgttggcttccccggtctgggcgcccatcttttttggggtggcatagtagcggtcggcatagagttccatcagtttggcgccgcattccggttccacgtcgctcacatagcggaatttcttcttttcctcaaaggccttgagcagggcttcctcgtcaatcacctctttgcgggcggtgttgaccaggatgcagtcgggtttcaccaggctgagcaggttccagttgatggatttcttggtctcggcggtggcggggatgtgcagggagatgtagtctccggtgctgaagatgtcttccaccttatccaggtgtttgacgccgtctttggccatgatgtccgcgctgatgtagggatcgtaggcatagacgtccatgccaatgcctttggccattttggcgagaaagcggggcacatttccgaagccatggagcaccagcttcttgccagccagctcggagccgcttttgccgttgaacttgccgcgcgccatgtagatcatcatggccagcgccagctcggcgacggcgttggagttttggccgggggtgttcatggccaccacaccgtgggcggtggcagcggcgaggtcgatgttgtcatagcctgctccggcgcgcaccacgatcttgagttgtttggcggcgtcgaagacggcggcatccactttgtcgctgcggatgatgagggcttcggcatctgccacggcggcatggaagtctttcacgtcggtgtagctttccagccagctatggggatagccggccttgtccagttcagccttgatcttctgcacggcttccgcggcgaagggcttctctgtggcgatcagtacttttggcatattagcctccctatgtatattttatttctggtttcaagactttattttagtgcgttttatgtcaatgcaaatctctgtcatttgagcagcagcatacgccgtgactgcacctttccacccgcttgcaggcggtagagatagactccgctggagaccgggtcgccggaggcgtcgaggccatcccaggtgacggtgtgtgagccgcgggaacgatggccgtcgctcaggacgcgcaccaactggcctttgaggttgtaaattgcgagccggacggagccttcggatgccagttggaaacggatgctggtgctgggattaaagggattgggaaagttttgcagcagggcggtgcgcagggcgggagcttcttccgcgggattggagacgttaccggtggagacgtagctgccctggcgggtgagtgagccgcggtaaacggtccagggccggttgtccttttccgcgcggcgcaggttcagcaccagcactccggtggaatagccgctcaccagcttgagccagccgtcgccgtccagatcgcatagcgtggagggcgtgcagccgttgaagctggtctggaatggaaatccgtccaatacgctgccgtcgtggttgaagccataaaccgagttcacatagctggaaacgaggatttccaggttgggatcgtcgtcgaggtcagcgatgatgggcggggtctgcagcacggcgccggtctgcaccgggaagccgggaaggtctattccgctctggctgaccgcgtagagtgagccattggcggtgccgaacacgatatccagcgcgccgtcggcattgatgtccgccagggcggggctgccgcccatcgcggagctgatcggcttgctgaagaccaggctgcctgcgggcgttgccagatgcaggtggctggaggtgccgaaggctatcctgcggttggcgaggatggtgggcgcgccgttgattgcgccggagacctggagggggaaacccgccaggggagtgccgtcggatttgatcacgtgcagcttgccgttggagcagccgacgatgatctcattgccgccgtcgccgtcgatgtccgccacagccagttcgctgtggaaggcggagccaaggtcaagcgggaagcccggcagcaggtttccggaggaatccaggacgtggatcttgccatccagggagtgcgccaccacttccatcccgccctgccagtcgatctgggcgatcacgggggtgaagaggaactggctgccgccatcgtaatcgaaaagcacttcatcgcctgccagtgccagcactttaccggtgcggctggtgagtaccagagccggttcctggccgtcaatcaactggccataggcggcgctgcgcatcacatcctgctggagaggcgcgggaatggagccggtctgctgccctgcgttatccagcagatggctgttgccgaaattatcggtgtaaagtatgtcgaggctgccgtcgccgtcaaaatcgaagacgatcggggcggatttgctgcccacggggcaatcccagggaaagctgccgtcaatgagggtgatttcatattcgagctggaatctgcgggttccagtgctcaagttggtgacgggatgcagcgattgcagctccagggtgatctgatagctgccataatcgatgccggacggaagttgcacacggaaatagaggccgggatcggcggtctggcctggcaacaactgtggtatcaccagcgggtcgctcaaaagctgcgctccggctggcaggccgctgagggtggcggtcacgttgtgggccgcggcccaattctgatggttgctgatcacggggtggatgcggatgatctcgccgggattgatggtgccgtcgccgtcgccctccacatcgtcgatagtgtagctttccaggctgagcaggggcagggcggggtcaggcagtttgacctcgatggaaggatcgccaaatagcaccatctgatagtagcaccagcgcatcacgtcatagctgatggcggcattgaggttctgctcgcgggaatagctgagcgcggagccaaactgggtgttggccgtttggtagagaccgatgaagtagtcgcggtcatagaactgggaggcgccattggtgttgccgggggaataccagccatagcgggtgtttccgaggaaggcaaagacgccgcccgaggctgtgagcatgtgttccgcgatgctctcgccgtcgccgctggtggcctggtcgaaagcggcgggatagcagccctgggtgtaaagaaagccatattcggtgttctggagctgctggatgctgccgttgctctgtcccatcaggaaggtttggttggcgtgtcccatgtggttcatcacgtggacgccctcgttgatggcgttccagacgccctgctcgctgtaggtgccgtcgcgctgatacatggtgcgcaggtggtacagttccgggacgctggtggccacttcgtccttgtaatctccgccccaggtgagggggttgttgttcaggttttctccgaacatgatggcggtgttgttgctgaacgtggaattgctggtgtagtattggattttgcggatgatgttttcaaactcgggttgggtctcggcgggaaagcgtccgatatgcacttccggcagcatgtccacctggtcctgcggttcgccccagatgtcgtttccattggcgttccagtctccatccagattgctgaaatagaggtcggtaggcattctgagatcaaccgtgtcgcccacctggccgtagcagccgcgcaggggcacgatctcgtcatcgccgcccaggatcacatattgcagaggctggggggtgcttgcccaggcttgataggcgtcgctgatgaaggcgcgcaccttggcggcgttgtcggttccgggatagctggcatagatatccgcggtctggaatacgccggtgctgatgtcgttgccgtcacgccagttggcatagctttgcagccaggaggaggcggtggagttggtaatgatgaccatttggcgcggagtggaaaggtcaatcaggcggctttggggagcgtggttccgatagcgggaagcctgctggtagctggccagggcctgggggttgagggcaaatccttccacagagcgggcagccagggcgggggcgtagaagttggcctgttgggtggccagggcatcatcccatccggtttctatctcgatgctgaattcggaagccgcgtgaatctggcgggaaaccggattgtatttccaggggaagaggtccagcacggcatattggaggccgcgctgcaactgggtgcccagataacggtgattggcggccgggaacagcgcgtcgctctgccagatcgcgggatcgggctgagtagcgtccggacggggctgcgaagtgggctgctgctggcgcgcgtagtccagatacacgccatcgcgctgcaacaggtaaggggagctttgcacgctcacgttgagcaccttttccccaaaggggatcagcacccgcacggggtaatagttgagcgcgggaacgccgggctccagcaggggtgccgtgggctggccgcgcaggctgccatcccaggcggaggggtcaacgcttacattgagggtgagcgccaggctgattccgcagagcagcgtcaggccgatcagggcggtaagttttttcataatctgtattccatcttggtttatcgaaatgtagtcgaaaaattcttatgtgagaaatggcagaatcagtcaagtagttttttgagggcaaagaaaacagacgtctgggctgcgtttgtgatctgtgaatacctgcggaagacaagggatatgaaccaatccttagaacaatgctgccctagcaatttcagctcgcaatgggcgcctcacgctgtatatccggcgccttataaattttaaagaaagaagttgcgaatatggcggacttgtttaaactatcattctgtaagctgtttgttttgcgtctttatgtaagggcagcgcctgcccgcgggacttgttatcttttccaatctatttgaaaaggagtctttttcatgaaacacacggctatgctactactgctgctcgccaccagcctggcttttgccaaccctgtctggactgaggacgtcgtggtgcgggaagcgcaggatctgagttacactggctgcacgcagcaagcagatgacggcagcctgatcacgctctggacgcagatactggatggagaaaactgcctgatggcaaaccggatcagcgcgctgggcgaggaggtgtgggattccccactgcgtatagcgggttgcggcctgggcatcggcggagagcagatgaagagacctccggtctctgtggcaaacagactttcccacccctgggcaccggatcccgggtcaagcacgcttgcccatgatgacacggtatatagtctggtagggtctgtttcggggtctggtggacttgtatccaccattccaccttttcaccttttcacaaaatacttagaataatctccataatccttcatagcgccctcccttgctgctactgcgtttggtgccatcatccttaggtcatccctcaccgggttaaggatgaccccaggaagacagagacttagctgtctcgcgcgcgcgagagcggactgacaccagtcttagttttttgcgcccttgttttagaattgatttatccactcagtgttagagatagcctgattttctgccagaaaaggaataagctcaagtccctcccggcatttcctccgtgccagatcgtaaaatccgtttagattattcaatatcaagccttaaaaggagtatccctatgctaacagatcaagagatcgcgcgcagcgtaaccttgaaacccatagatgagatcgccgcccagattgggctaagcccccaggaactggaacattacggcgagcataaagccaagctcagctattccgcgctggagcgcatcaaagacaaccccagaggcaagctgatcctggtctccgccatcacgccgacccccgccggggaaggcaagaccacggtcgccatcggcctttcccaagccctcaaccagatcggcaaaaagagcatcgtcgccatccgcgaaccctctttgggccccgtgtttggcatcaagggcggagctgccggcggaggctggagccaggtgttgccgatggaggacatcaacctccacttcacaggcgacttccatgccgtcaccgccgccaacaacaccctcgcggccctggtggacaaccatgtttactttgacaactcgctaaatatcgatccccgccgcatgacctggaaacgggtgctggacgtgaacgaccgcatgctgcgcaagatcgtcatcggcctcggcggcagcaagcagggcttcccccgcgaagacggtttcgacatcacccccgccagcgagatcatggccatcctctgcctggcaaacaacatggacgagctcaaggagcgcatcggcaacattaccgtgggcttcaccttcgacggagaaccggtctatgtgaggcaactgggctatgaaggcgccatcgccgccctgctcaaggacgccctcaaaccaaacatcgtgcagaccaccgaaaacacagccgccttcgtgcacggcggcccctttgccaacatcgcccagggcgccaacagcatccttgccaccaagagcgcgctgcggctgtcggaatacactgtcaccgaggcgggcttcggtttcgacctgggcgcggaaaagtttttcgatatcgtctgcaaatatggcgggctctgcaccgacgccgtggtcttggtggcaaccgtccgcgcgctcaaggtgcatggaggggtcaagctcaaagacctcgccacccccaatcccgcggcggtggaagctggcctggccaatctgggcaaacatctggaaaatatcgacaagttcggcatgaagtccattgtcgccatcaaccgcttcgcaaccgacaccgatgaggagatcagattgatccgcgactatgccagctcccgcggattcgattcatctgtggtggaataccacgcccggggcggaaaaggcgggctggacctcgcccaacaggtggtggatatggtggacagggaaatctgccactaccacgggctttacgactgggacagcccggtggaagacaagattcacactatcgcccacgaaatctacggagcggagaaggtggattactccgcggacgccaaagcggacttgaagaggatcgccaaattcggcttcgacaagctgcccatctgcatcgccaagacccagaagtcgctttccgacaatcccgacctcatcggacgccccaaggacttcctggtcaccgtccgcaagatagtcatctcgagcggagcgggcttcctggtgcccatcaccggagagatcatgcgcatgcccggcctgcccagacacccctccgccgaaaccatctccgtggaagacgatggcgacatcagcggcctgttctgattaaccctaaagaccttgtgccgggacactaaaaacttaggttccggctttttttgcccttatcgccaaggcgcggatcgacagggtctttgaaggtggaaaggattatagaacgcggataacaggatcaacaggatatttaaggtgaaacagcgaaaagaaggccacgaaacaagcgtcaccaagctacattccgtgtcatcccgggcaagccggggtcctcgacggatcggttacgatccggtggggtgaaatagcttgacccgggatccagtgcccaggggtggcaaagtctgtttgccacagagaccggaggtctcttccaaacaggcaactccgttgcctctgccgaacagacttcggcagcccaatccgcgccttttatccgcgtatatctgcgtgaaccgtttgacccgggatccagtcttttgaggctccaaacagccatcctgtctttgaaaaatgccttccaaaaaataaagattcaacctgccgatatttttcttgacaaatctactaaaacccatccagtatatttccaaatgggaaacccatcatagggaggaaaaaatgaaagccttgcgaaactcatttttgtgtcttatcctgctctgcggagcgatggttttgggagcgcaggcgccccagtggcagtgggcagtccgcgcggggggaactgactatgaagaaagcatatccatagcgaccgacagccagggcaaccagtacatcactggtatgtttgatgaaatcgctacattcggcagccataccctgacgaccagcggtggcggtgatatctttgttgccaagctggatgcctccggtaattggctctgggcggtcagggcaggaggaacagagaatgactggggattgttcatcaccgtggatggagccgacaacgcttatgtgaccgggtatttccagaacacagctaccttcggtaaccataccctgacgacaaatggagagcatgatatctttgccgccaagctggatccctccggcaactggctttgggcggtcaaagcagggggtattgactgggatataggaggtggcatcgacgtggatgaagcgggtaacgtttatgtgacaggatacttttgctacaccgccactttcggcagccataccctgacagcaagcggaggcgctgatatttttgccgccaagcttgacccctcaggcaactggctctgggcggtaaaggcaggagggtcaggcaatgactttggaattagaattgccttggatggaacgggtaacgcttatgtgaccggattatttcaaggcacagtctctttcggcagccataccctgacggcaaacggagaatcggatatattcattgccaagcttgacccgtcaggtaactggttatgggctgtaatggggggagggaataacgatataaatgtatttggcttcgttgtggatggctcgggtaacgcctgggtgaacggttctttttatgacaccgccactttcggcagccataccctgacggcaaacggagagaaggacatcgttgttgccaggcttgaccctgccggcaactggctttgggcggtcaaagcgggaggaatagactatgataatggctatggcatcgctctggatagtgcgggtaacgcttatgcgtgcggttctttttgcgaaaccgccacttttggcagccatcccttgtctgcagtcggatggatagatatctttgttgccaaacttgactcctccggtaactggctctgggcgatcaatgtgggaggaaatgaatatataaataacgctggatctggtatcgctgtggatggcgcgggtaacgcctgtgtgaccggatatttttacgaaaccgctactttcggcatccataccctgactgcaagtggagaatctgatatctttgtcgccaagttgggaagcggaacccccgtggaagatgaactcgctccgcaagcggttgccaggctgcataacgcctatcccaatcccctaaacagagatggaagcgcgctgatcaaagctgacattccggaacgctcctccgctacactgagcatctttaacctgcgcggacagatcgtagcccgccacaagctgggttccggttcgcagcagatatccttcagcggggaagggcttcccgcgggggtctatctctacagcctgcaatgcggggactaccgggaaaccaggaagctggtgcttttgaagtaagataaaatggtggaatggaaccgtccgcgttctgtttccatttctccttccggctttagcatcataaatccgtaaatcggttaaatccgtcaatccgtataagattggcatgccaggcatcatacggatgaaacggattacacggattaacggataatactgtttagcttgcattattacaattgaatacaattatactattttacctttccacggccatttcaaaagactggatcacgggtcaagcggttcacgcagatcagcgcggataattgaagggctgccgaagtctgttcggcagaggcaacggagttgcctgtttggaagagacctccggtctctgtggcaaacagactttgccaccccccctgcgactggatcccgggtcaagcatacgcttgcccgggatgacacagtatatagcttgatggacttgtttcgggggaacctttccaccattccacctttccacctaaaaaacccctttccacggcgatagccaagatcgccatcggtaaaggcttggggggcagagcgaggttttttgttgacaaaaaagggctgcaatttgctattgcatcctgtcctgggtgattagctcagcttggttagagcgctacgttgacatcgtagaggtcactggttcgagtccagtatcacccaccaccctgattgttgggtgattagctcagctggttagagcgctacgttcacatcgtagaggtcactggttcgaatccagtatcacccaccactttcccccgcaaagcaacccggtcagagaaatttcttgacagaaagcttgcggagatatctactgttcatgttaatcacgagcaaacgaaagaagaggcaaaatccaacattatatacggaacacaggcatttacgcggtatgctgctgttgtgaataatatattttttcttacaccgagatttggagcatagctaatgatcaaagaaatgggacgtctgaatctggacgactacaaaataatggacgcccaggtggaaaagattttcaaaagcctggacaagggcaaacgggaacaggccatcaaggaaattgaggaaatggccaacacggcgaactatttcgtgcgcgaagaaatgggcaagaggctggccacctaccagggcaaggggcccttggacgagatttgcgccgaaatgctggatgatttcatctacggtatccgcgccacggcgctgttctatttctattacaagaggcaggacgacccgcgggtgatcgtgaagaccctggaaaagaccgtggagaccgttccctgggaaagcgagaccatctgtttcgagctatggaagaactatcccgaggtcatgaaggaagagatgccccattgggcgatgtctcccaacgaaaacaagcgttccatgtccatgcacggcatggaaaacatcgcggataaaaacccgcaatacatcctcaccttcatcggcaggctgctggacgacgaaagcgaagaagtgcaaaaaaagatcggccacatcctcacccaggtgggacggcaacgcccgctgcagacctatgccaatatccggcgctggctggtgggggccagtgaagaacgggtggacgccatctggcagaccctgcgcaaattgggcagcatcttcagccaaaagaaccagcgcgacaagggattcgactttatgaacgtcaccaagcgggtgatccaggaatggaaaaacgatcccgaccccaacgtggcgcagatgagcaaccgcctgggacaactgctgcgtaaacaatgatccacgtaatcctggtggaacccatctatgagggcaatgtgggcgccgtcgcccgcatcatgaacaactttggtttcaccagcctgcgcatcgtgggcagcgtgcccaaaaagaacgacttttacctggccatgcactccgaacatatcctggaggaggcgcaggtctttgacagcctcaaagatgccagcgccgacctggacaggctgatcgccttttcccgccgcgtgggacgctataaaccggtggatctgaacccgccccagatggcggactactgcgccaaaatccccaaactggagattggtctggtgtttggccgcgaaacattcggcctcaccgacgaagaggccgacctctgccccctgcgttgccacatccccgccaatcctgcctttccctccatcaacctcgcccaggcggtcaccatcgccctgtggcagatctacagcctccccctgcagggagcaaaaccgcggcagttaagggcggtggatggaaatgaacttgacagaatccgcaactatatgcttgatgtaatgcgcgactgcggttttttccgcagccacgagaccacgaactgggagcttttcctggacaagatgctggcacagctcaaccccggcaagatgatggtctggcgcctgcggcagatgtttaaccgctggcacgtgctggtaaccggcaagggaaagggctacggccaggatcaatagattgcgcggggcgattcagatgccccgcaagttatgcctacaaggaaacaagagatgatagcactcaccgccgtcacggaaatgaatgaacgccagttggaaatcttttgccactgcgaaaagtttttcttcgaccacgaaaaaccagcgttggtcaacaaatatgcccattatttcaccgaaggctatgacgcctttggcattagcgaagaagagatgaaacagctgcgcgacgaagtcctgtcaaaatgggagcccagcgtgcaggaactggcggaactgggcaggcacttctttgccacgggaaaatatgagttcggctcgctcgccatcatgctgctcaagaaacaccgtccccgcttcgaccgcgaggtatatgagagcgtcaaacgcttcaccgaggagtcccttgccaactgggcccacgcagacctgatctcgaccaagatcacccccgtgtttttggagctggagatagccaacatggaggatttcgcggagtggcggagttcgcccagcaaatggagccgccgggtgtccgcggtgaccatgctttggcagcgggggaaattgcctccggccgagctgctggactttatgcgccccctgatgtccgatccggaacgcgtggtgcatcagggcgtgggctggtttctgagagaactttggaggctgtttcccactgaggtggaagaattcctccttgaacacaaggacagcgcgccgcgcctgatcatccagtatgccacggaaaagatgagcaaggacaagaagaagcgcttccgcaagaccacggcgcgcgaacgctcccaggaccgccagggcaaaaagaacttcgcggacaagcggaacttaaaaaaccgcggcaaatcccaaaacaggcaggggttcaaatcccgtcgccgttccgcggacgatgccggcatgcccttcaggatcaggcacacggaggaatccgatgaataagctttgcaccatcttgctgctgtccctgcccctgctgctgtggggtggaaacctttccctgagcgtcgatctcggcctgcccgcctcctccagggatatggaactgcagggttggggcagcctcagcgccccgggatacccacaacttccatataagactataaatgtgatcctgccacccgcggcggaggaactgagcttcagctacaactggagcggagcgcagacctctggcctgcccgccccggaacgcaacggagcctttttgggtggagaacgcctgctggacagccccgcccgcgaagcccgggccggacaggtgcactatctgggcaagggacgctggggcgacgtgagctacgcccgcttccgcgtgctgcccgcggtctggaatggaaactcctggcagggttacagcaggttggaactcgatctgaactggagcgaatccgagcccgcgcccaaccgcatcccgcctgtcctggcagaactgagcaaatccaacgcgaacctgcgggcgaacttctttgccaatccccgtgatctggacaaatggtatcagcccccggcaggcaaaaactacgactacctgatcgtcaccactcccgcgctctatgacgtgttgtccccgttggtcagctttcgccagagccagggcctggtcacctccttcgcggatatctccgtgatcctggcctccaccccgggcgccaacgcggcggacaagctgcgcaactacctttgcaatcaatataacagccatcctttcacttatctgctgctggtgggcgatcacgacaccgtgccggtgatgtatctgacgccggagccggatggcggcgatacagtggcttccgacttctattatggtgacctcagcagtatcgtggacacggacggagacaaccgcctgggcgagtattcaccggttgaaggagtggatgactacctttgcgactataccccggaactgtttgtgggacgcatttcctccaataatcccgtccacgtgtatgacgttgccaaccgcaccgtgctctacgagcagagcgacgccccctggaagcgcagcgccctactgcccgctgcctacctgaactacggcggcgaaccggaaactatctatctgcagacggatggcgcggactttatggaatacgccaaagccaccgccctggcaggattccagaataccaccctgtacgagcaaaccggctggctgccctcccatccctgcgatcatcccctggactaccaaggactgcgaaacctgctcaacacccaaagctacgggctggtgaactggagcgcgcacggctcttccggttactctgtccgcaaggtgtggatgaacgatgacaactccaacggcttgccggacagttgggaaatggagtggatgagcatggtggacaggcagagctttgacaacctgaacaacagcgacggcacggtcatcttcatggcctcctgctacaacggcatgatcgacagcagtcagcagtgcatcgcggaatacgcgctgcaaaggaaggctgtggcggcgatggcggccacccgcacaggctggtacaagatcggctggcgcaatcccggctggggagggctaagctcctataacctgcactatctggaaaactttgcccgcaacgggctgtcctcgggagcttcactggcctgggccaacctcctccacacccaatattacctctttggcgatccggtggacggcgggggaatcatatatcccgaactgcaaaacgtttacacctacctccactacggcgatccagccatcggccacagcggcagccagatccagcccctgggcgaaatcctggtctatgaaccctcccgtcatggcggcttgagagtggtggatgcgctgaaccagatcggcgggctgaacgtggtctataccgataagctgatcccggattatgactatatcaaccgctttgaagccgtgttttgcctctttggctggggcgacgccgcctatgtcccgcatcccgattccctggactactcgctgctgcacggctatctgaacggcggcggcaagctctatctggaaggggatgtggcctggaatagccaggatcctttctggagcaagttcggcgccaacgccccgctgaatatgttcaccaatattgaagctgtaaaatgctatcaggatggcgaagcctggatctgggactacaacccccagtccaaccccaacgcgcaggtcttgctgcccgccctgcccgccgccgagaccatcttcagcacccacggcgccgcctccgcggatgccagcatcggaatcctgcacgcggttccggagcatagcaccatcgcctcctcctttgctttggcaggcctgcaaaacggcgagtgggaactgaaagacatgctgggcctcatcctggatcgctttggcgttttggaatacgtcaatacccaagtggacgagccacagataccgatggtgcaaacctccctgcgcggctatcccaaccccttccgcagccagaccagtctgcgcctggaactgcccgccaaagccagggtggacttgaacatctataacctgcggggacagaaggtgcgctccctggcaaggctcgacctggacgccggcaagcacgaactcaactgggacgggcgcgacaactccggaaaccggcttgctcccgggatctatttctggcgcttgaaagcgggtgacaccctacgtcaggggaaactgctcaaactggccgactgacctcccccacgactccccaatactatatatggataggtgcgatatgtcttgttgcaaaagaatcttcctgctcttcgccttgatctttgccgtcctgagcctcagcgccgccggacttcccgccgccttcaccaaaggcggcaatccatccctttacaaggaactgcacagccttgccaaagagaacctgaaacgcctgcgaaacgggcagggaaaagcctaccgccgcttgctgaaccggtacccggatgtggtgatggcctatctgctggcctatgaatcggacgctaacctgcaatgcgccgctcccgcggatgtggcaagcaactaccgggagatagtcaaactgcttgcggagcaaggctgcaaacacagcccggaattctttctttcctatgtggcggatcagactgtatccgatgaacgcatcgaggcctaccgcgccgcgctgctggatgacggcctgcgccagatcatgcgcgactccgtcgatgagctcgagctctaccgcaagatctcccaatggtgtgtgagcaaactcaagtttcaacagacctccgggcgcgaccagtcgcccctggacatcacccgcaggagcatcgtgggacgctgcgaggaaatgcaaatcctcttcgtggcagccgcccgcaccgttggcctgccatcccgcccggccagcaccccctggtgggcgcatatggacaacaaccacgcctgggcggaagtgtggctggacaacgcctggcactacacgggagacatggatgccgcctactatcccgatcagacctggtttagcggcatgatcgacaagacggtgctgatccttgccgacggttcccttccttcagaacaggacgaggtgctgagccgcggccgctacgactgtgtgatcaactcggtgcgcaactatgccggggaacgcgcccgcaccatcaggatcagaaccctggacgcgcagggcaatcccctgggcaaggtgccggtgcgcgtgatggtttacaactggtattccctgcgcgtgctggcggagtttatcaccgcggaggacggttctttcacgctcagcaccggtcgcggaggcttctatctctgcgccagcctggatggccgtcaggcgctggttcccgtcccttccaccgagcaaaacgagcttgatgtcgatctggttctgaacgaaggccccctgccacctcaagatatctttttggagtatccctccaaccccttcacctggaaacaggctccccctgagtgggatctgggcgtgaaggaagccaaggctctgtgggacgggcaggatagctcgtttaccgagcggggagcagcctgcgcggacaccctgcaaggcaaggtactgagcgcctgccggggcaatcatgccgcctgggaaggctttctgaagatgcagccccagcccggcccggactttttgaactatctgctggagagcgaccccaagttcctctggcaggcgaacgcggcgcagttcgcggcgctctatcagaactttcagcgcttcgatgccggacagttgaatccggaagaacagtcttcgctgctctcgccctcagttttttatgaagagctgccccgcccctttggcaagccagacagccccagcctctatcccacttcctttgccaaagcgggaaacaacgatctggagcggctgcacaacgccatgcgctggctgaagaaaaagcaccggatcgaccccgccaaagccctgcgcggcctcctgcccctggaagaggcatcccgcagcaagtatctgagcaactaccaatactgcatcctggctgtcagcctggcacgcgccaacggcatccccgcccagttcacccgcatccccgacctgatctatgtgctggtgaacgaccagtggcgctattgcaatgtccggctctgcgaatttgaggatggcgggaagaaggattctgcctccagcttcaccctgcgggtgcgcactctggatgaacagggcgcccctctggacatcgatccccaaaacctttccctggcacgctggcagaacgggctgctctacccgctcaaccacaaattcaccgccacaggaggcggaacggccacggcaaacctgccccggggagaatactatctgcaggcgggctaccgcgtctccgacgccaggacagcttaccagttgcagcatctcactgtggaaagtgagcttagccttgacctggtgctgcgcgagtttccccgcaaatgggaagaactgccggaagactccgaattgcgccccctactggctgaagcgggagattgcgactgcctgctgatcggcaactttgaccgcgaaaacagcctgcgcctggcggagaagctgaacgcggagggagtggtattcctctggctgggctatgaggaagctgccgccgcacccgccaattaccgggtcagccccgcctggcagactctggtggcggcagatcagatcaattcagtgcgcagcctgaccctgctacgcaaggacggcgtttggcaataccatcagggcatctgggaaaagctgccccgttaaacgttctttacagcttgccgcggctgaagcggtaaaactggttgcgcagcgccttcacgtgcattcccgtgatagatttgcgcattttgtccggaggatggatcaccgagattccgtccgggttgatgccgccgatctccaccaggaaagcgcccgtgtagtggatgtggaaaaagtagttgcgcgcgttgccttcccttgaactggggccggtggcaacctcatagcgtccgccgccaaaggccttgcgcgtctttttggcataggcctgggcaaagcgcagcagcgagtcgtaacgctctttctggctggcgacggagctgtcgatggcgggcaaaaatatcttttcggaataggctccggtggcagaactatggaagaagatcgccagttcaaaattgttttcctgggccagtaagacgctcgccttcacctctgcttcggacatcggagtgctgcctttgaaattctcgtgcgagcccggcacaaccgcgccctgttcccaaaacaccggatagttgcggttgaggtccaccccgtccgtccgccagtccaaacctttcctgccgtctgtttcctgattgtttttccgtttgaactgatattgcccgctggtcaccacccggtagccttccggattgagggtggggatgatggtgaactcgaactccgccaggatttttttgatcttgccggagtgcttgtaattcaccgccagttctcgtgcccatgccagggcggtttccacacccaaaacctcgcttccgtggtgctgcccgatgatcaggactttgcgccgggcgtccggtgtgccgatgcagagggcgtggatgggcagcttttccgtgccgctgaagccgatcacccgcagggtcaccagatcgggatgcttgctggaaagcgcctgcatctctttttgcaaactttcccaagtctgatatcccttgggaaggggataaacgttgccaaccgctgcggcaaaagcgctcgcgctcaacgccagcaggggcagaatgagtaaaatactgtatttattcatcatgagaccaagctgccgcagccccgcatttcgtcaacaaaatccgatcttatgaaaagtagtggaaaggtggaaaggtgaaatggtggaaaggaactcgtggtgaagtggtgtcgtggtgacgtgtagatggtggatgcagcccagaacaagcccccaagccccaaaaccgtgtcatcccgggcaagccggggtcctcgacggatcggcaacgatccggtggggtgggatagcttgacccgggatccagtcttttagaaacaaccacccagccccgaaacaacctccccacagactatatccgtgtcatcccgggcagacggggtcctcgccaaagcgcgtagcggtttggcggggtgatttgacccgggatccagtcttttgaagcccaaaaacaaccaccagaatcccaaagcaaccgccccttttataaccccaatccgcgctcatctgcgcctctatcccgtatatctgcatgaaccacttgaaccttgatcctgtcttttcaagtcccaaacaagcacccagaccaaaaacaaccggcatcatttatttgacaaccgcaaaaaatatccaatacattccgcaatatccttcacacctccctcctttgctgctactggctttggtgccatcatccttaggtcatccctcaccaggttaaggatgactgccggaagacccacgccggagagggggatgcaaatgaggccgccctctataatatataggtgctatgcccgaaaggtcatggaaggatgaaagcaaacgcgaaccgccaaacccaaatttccaattgacaaatatctgccgcccagatattggttcagtaaggtaaggaataaactatatgtgtataaacagcaagaagataagtgataaatataataccctgaatagaacaaaagcatttgcaaatcagcagatgctttttttttaccccggaggatagcatggatctggacaagatcataaaacttgccctggccgaagacatcggcagcggcgacatcagcacccagtatctggaactggaacccctcaacagcaacgcctacatgatcgccaaggcggaaggtgtgctggctggggtggaagtggcgaaagccgtgttcctgcaggtggacggcggcctcaagatcaccctctaccgcaaggacggagaccgcgtggttcccggcaacgagatcatgcgcctggaaggcaaagccgccagcatcctgcagggcgaacgcaccgcgctcaactttttgcagcgcctgagcggcatcgcaaccctcaccgactcctacgtccagcgcctcaaaggcaccaaagccaggctgttggatacccgcaagaccactcccctgctgcgcggactggaaaagtacgccgtgcgcgtgggcggcggtttcaaccaccgctttggcctctacgacatggtcatgctcaaggaaaaccacatccgcgcctgccgcggcatcaccgaggccgttaaacgcatcaaacgccacaacaccagctacaagatcgaggtggaagtcacctgccttgaagaactggaagaagccgtgaaagccggtgttgaccgcgtcatgctggacaatatggacctcgcccagatcaaagactgcgtgaaaaagttcggctcccaagtggaactggaaatctccggaggcgtcaccgcgtccaacatccgctccctcgcccgcaccggagtgcagtatatctccagcggagccctcacccactcatataaatctttggatataagcctgctttttgataaggagtaaaatatggaagaacaactgcgcaccctggttcaaatgcaaaaactggatgaccgcatcggcgctctgcgggtcctgcaaaaggaactgccccagcagcttaacgaaatcatcgggcatgtggaccaggcaaccgcgaatttgcttgcctgcgaaacagaacgcgccgaactggccaaaaaacaacgctcgctggaaagcgacatcaaacagcatcaggaacagatcaaaaaatacagcaaccaactctccgaaatcaagaccaacaaagaatataaggccctcaacagcgagatcgcctttctcaaggaaaagatttcagagcaggaaagccaccaactggaactgatggatgccgaaaaccaggccgcggcgcgggtgaacgaagccaaacaggaactggacaaagcggaaaaagctaaaagcgaacaggaaggcgaactgcgccgccaaatcgactcgctggaaggacagatcgaggatctgcgcgcccaacgcaacaccatggcacgcaccctgcccttgcagatcgtgaagctctatggcaacatgatcaaaaacaaaggcaacctggcggtggtcttctgccgcaagggcacctgcggaggctgcggtttcgtgatccgcccccaagtccgcatcgagctgcagttgcgcaaaaagataaactattgcgaaagctgcggccgcatcctggtggaaccgtttgaagacagctcatcccccaatgcggcggattagccccgtccttttctgctaaaggcttttgagccactatgcttggctactttggtgtccgaaataatggacggcaagcccgtttgccgcggcaaaagtttatgagcaaagttgggcatggaaaggccaaaaaagcactttaacaagttaacccaaacattatacttgacagatttatagaatgtaggcattagaatttaagagccaaaatatgctggcataccatagcagtgaaagactatatattaagtgattatataacgactgatggcataaatgtctctatcggcctggaggaagagtccgccggtaaagactcccgaaaatcggtcaataattagaaacaacccaaatagaaaacgggaataaggagatatcctatgagaaaaacccttcttttcgcgctgttgctgatcctgggcttcggcctgatcagtaatgtctatgcccaggttaacgttaccataggcagcgggaccagcaccaataccacaaccggtgctccagccccctatggaacctactggaagaatttccgccagcagttcctgctactggcctcggaaatcgaggatgccggcggcggagcgggcaacatcaattcagtcgccttcaatgtggccaacctgaacaactgttccccgatgccgaactacaacatccggctcaaacacaccacccagaccaccctgaccaccgcgtttgaggatggggactaccagaccgtgtacacgcaggctgagtatatgcctaccgttggctggaacacccacaccttcacgacccccttcgtctgggacggcacttcgaacatacttgtcgatatctacacctccatcattccgggatcctggacccagaatgcctctgtttattactccaccacagctttcaatagttccctgcgcttccaaagcgacagcgctgatgccagcaccgccaccagcggaaccacaagcaccaaccgctccaacatcagattcaacatggaagccctggtggttaccgatccgcccaacccggcgctgctcatttcacccgcggacggcgctgtggacgtgatgagctctgctaccctcaactgggcttccggcggcggagcacccactggttacaaggtgcattttggcacaaccaacccaccccccttcatcgaaaacaccattgaaaacagctacgcccccaccctggacctccacaccacctactactggcagataattcccttcaacgccattggtgacgcggcaaactgccctgtttggagctttaccacgggtggcccggtggtcatcatgaccaacggcacacagtcggtgccggatggaatggtctattccttctacgattcaggcggccccgacggcaattatcaaaactcagagaactacaccttcaccttctcagccgccaaccccaactcgatcatttacgtgttgttcacagaattcaatacggaaaacagctgggattacctgaagatctacaacggaccggatacctccgccccgcagatcggacctgctgacggctacaccggtaccactctgcctgaagagatctttggctccaacgctgtgaccttcgtcttcacttccgacacctctgtccagcgccccggctggtcggccttagtgactgctggaaatctcgaccacgaccttggcgcgaagagcatttccggtaacagcactccctccgtgggcgatcccactacctacacggtggcagtcaagaataacggaaacaacaccgaaaacacctacaccgtgaagctgatgggcaccggaaacgtggagctcgcctccattcccggcaccaccatcgctcctcagcagaccatcgaattcggcctcacctggactcccaccgaaaccggcccgatacagatttggggtgaagtggtgcttgccaatgacggcatcgctgccaacaatcaaaccttgcctctaaacgtggccgtgcaggcagcgggaatcgtggccattaccctcggtgacggcagcgctgtcggccgcatgcccatggacatgtactggaagaactccctgttcgaggccatttacctgggctccgagctcaacattggtggcctgataaccggcatccagttctacaacgacttcgtcagcaacctgcccaacatgcccactaatatttggttaggcgagaccacccagaccgatctgtcggctggctggatcccttcaacccagctcaccgcggtgttcgccggtaacgtcgattatcccagcggtccgaacaacatcaacattgccttcaccaccccttacacctacgcgggcggtaacctggtattgctggtggaacgcccgatggataccgaatggcacaattacaacgataacttcctcacccagactggggaccttgcggcccgttctctgaaggtccagtcggactcccaggactacgatcctgccgctcctcctaccggtacaagtccctccgctatgttccccaagaccactttcttcctggtcgtggacgacatgggcgcgcttaccggtaccgtgcgtgacgcgaacaacgttgccatgcccggcgctacggtttccatcactggaacccccctcaccaccctcaccgacgccaacggcgtttacaacttcccctacgtggcgatgggaccccagagcgtcgtggccaccaaacacggctacaacgtcgttacccacaacgtaaccatcatcgaagatgaaactgtcacccaggacttcgtgctcacccaactgcctcaggtcaccgtgaccggccgcatcgtgggcagcgaccaacccacagttggcctggctgacgccaccatcagcctcacaggttacgagccttaccaggctacaaccaacgccagcggccaattcaccatcactggcgtctatgccagccagacttacgaatacaccgctcaagccatcggttaccaagctgccatcggccaagccgtggttggcaccaccgacctgaacatgggcgacatcaccgtgaacgaactggccttccctccctgccaagtggttgccacagaagcagcggactattcgcacgtaaccgtcacctggatggctccggatcccaatgctcagggtatctccgaagactttgaggaatacgaagacttctccctcaccttcgatccctgggttctggtggacgttgatcaaagcggcacttatggtatgaccggctacacttggccgaacgtctattcccccatggcttacatgatcttcaaccccagcgctgccactccgccggttaccactattaccgcccacagcggaaacaaaatggctgcctgcttcgccagcactgatgctgtcaacgacgattggctgatctctccgccgatgatcgcgaccgcaagtcagttcctgaacttctacgcgaggtcctacagcgatgcttacggcctggaacgcttcaaagtgggtatttccaccggcggcactgcccccgcggacttcaccatcatcagcggccccagctacatccaggcgcccattgaatggacactgtacagctatgacctcagcgcttacgctggccagaacatccgcttcgccatccagtgcgtttccgacgacgccttctacttcgtggtggacgatgtgagcgtgggccccgttcctacagccaaggaacactttgcctccgcttcctccttcagctcccgtaataccaacacccagagcttctccaccagttcaattgttaccagaagcattggaaacgcggcttcggcatcccgcaacgtgggaaccagccatgccaataacccccgtattcaggtaccagacttccagatgttcactccttccaattcggaccgcgtacttggtggatacaaggtctatcgcctgcttgctgacaaccaggacaacgagtcactctggacgaccctgaccccatctgtcattcccagcactaccaccacctataccgacaacgcctgggccccgctgccttccggcgtttacaaatatgcagtcaaagctgtttacaccaacaacgtcctgtcccccgccgtcttctccggtgagatacacaaaggcatgatgggcaccctgaccggtaccgtgaccgaattcggcaccaacgtcccgatcgaaggagctaccatcaccgccggcgattacagcggcacctccgacaacaacggacattattccttcagcgtctatcagggagtttacaccgtcacctgctcgaaagtcggctatcaggccgcttcccagaccggtgtgagcgttaccggactgcaaaccaccacccaggacttcgtactcacagagatcaccctgcctccttgcgcggtggaagccgtggcagtgagcaacagcttggtcaacttgacctggatggagcctggcactggcggcggcgaatggatctactacgacaccggcgaaaacgatgacagcatcggcctcgtctccggtggtgaattcagtgtcgccattcgtttcccgccctccgctcttaccgactatgccggcatgagcctccacgccatatccctcttcccaggcgatgtgggcacctactccctgcgtgtctggaccggtggcaccgccagcgctcccgaaacccaggttgttgaccaacccttcaccgtgcaagccgtagacacgttccaaaccgtggttttggataaccccgtgcttatttcaggcaacgaggaactctggtttggctacaacgtcagccatgctgcgggcgcctatcccgcaggctgtgacggcggccccgccaccaacggcttcggcaacatgatctacaactccggtgaatgggcaactctgaccgacctggctccgagcctcaactacaactggaacatccgcggctacgtgggatattcagctcccaacgatgtgtgcgcgatcgatcccagcatcctcaaacacatcccgtccgacaacatcaaagccagcaaagacatcagtgcctgcaaagacaacgaccgtgtcctcgtcggctacagagtctggcgcttgctgcaaggccaggaaaacaacgattcagcctggactcagctcaccaccggacccatcaccgcgactgcctggccggacaacggatggggcggcgtgcctgacggctggtacaaatgggctgtgaaagccatctacaccggcgaagcgcaatccctgccagccttctccaatgctgtgcagaaacttacccagatcggaaccattgccggtatcgtccgcgatatggccaacgcccccatcatgggagcaaccgtatcttgcggcgacgtgactgccaccaccaacgccagcggagcctacagcatgcaggttcccgcgggcacctggagcgtaaccgccagccacccgaactacacacctgtcacccaggacggagtgattgtcgttaccaaccagaccaccacggtgaacttccagctgccgatcagcaatgtgctgctctcggacggatttgagtcctacgaaaacttcgttatcgaattcgcgccctggaccacggttgacgttgacggcagcgcgacctatggcatgaccaataccacctggcctaacacccaaacaccacaggcctacatcatcttcaatcccagtgccaccactcctcccgccactaccatcgtacctcacggaggagataaaatggcagcctgtatcgccgcaactacccctcccaacaacgactggttgattactcccgtactccacaatccgctggaacttcgcttctgggcacgctccctgacggcgcagtacggaggactggaaaagttcaagatcggtgtctccaccactggaaccaacccctccgacttcaccatcatcagcggcagcactcccctcgaagctccccttgattggacagagtatgtgtataatctcagcaactacgatggtgacacctacgtgggcatccagtgcgtgtcccatgaccactggatcttcatgctggatgacttccatatcaccggcagaactgacagcgacgatcctatcgtccctgtggtcgccaccgagttgcacggaaactacccgaaccccttcaacccggaaaccaccatcagcttcagcgttaaggataaaggccacgtaaaggtcaatatctacaacgtgaaaggccaactggtgaagaccctcgtgaacgacaacatgaacgccggcaagcacaccattgtgtggaacggccgtgacaatgctggtaaagctgtctccagtggcgtctacttctacaagatgagcgctggcaaatacagcagcaccaaaaagatgatcatgatgaagtaattcatcgggatataacctataaccaagccccgggaccgaaaggttccggggctttttctactctcctgaaaagaacgtggatgacaggatcgactggatctttgaaggtggaaaggtgaaaaggtggaatggtggaaaggttcccccgaaacaagtccaccaggctatatactgtgtcatcacgagtggggtggcaaagtccgtttgccacagagaccggaggtctctcccaaaaaggcaactccgttgcctctgccgaacagacttcggcagcccttaagttatctgcgtatatctgcgtgaaccgcgtgaaccacttgaaccttgattctgtcttttcaagtcccaaacaagcacccagaccaaaaacaaccggcatcaattatttgacaatcgcattaaatatccaacacattccgcaatatgcttcatagcgccgtcccttgctgctactggctttggagtcatcatccttaggtcatccctcaccgggttaaggatgactgccggatgacccacgccggagaggggaatgcaaatgaggcccatccctctataatatataggtgctacgataggtggaaaggaggacttcgtggtgacgtggtgtcgtggtaacgtggtgctgtcggaaaagagatagaacgcggatgacaggatcgactggatctttgagagtggaaaggtgaaaaggtggaatggaggaaagtttcccccgaaacaagtccaccatgctatatactgtgtcatcatgagtggggtggcaaagtccgtttgccacagagaccggaggtctctcccaaaaaggcaactccgttgcctctgccgaacagacttcggcagccctggtccgaaacctccccccataatactaatccgcgctcatctgcgcctttatccgcgtatatctgcgtgaaccgcttgacccgggatccagtcaccccagaggagccacccccgtttcccgcctgttcagcgtgcagacagcagtcgtgtcaggaaagcttgtccagttcttcgcggacgtttttgcagcggggatagtctttgccaaaggtgttttcccagatgctcagcaccctggtcagtagttcccgggcggtgtttgtgtcgccttgtctggcgcgcagcctgcccagagagaagaggtaatgggctgtctgggaatggttttcgccatagtggagggtatggccgtctatcgcctgcttgagcagtggttccgcttcttccaggcgtccctggcgcagcagcacactgcccagatttccggcgcagaccgccgtaaaccagtgcccctgtgggaaaaggctttccatcatttccagcgcggcgcggagcatctcctccgctttgtccggcctgtccatcagactgtagagcgaggcgaggttgttcatgcggtctgccacgttggaactgggcccggggcgtttttcgatattcagcgagcggcgcagcagtttttcagcctgctcgtagcggctggtatctttgtaaaagcgtcccaggttgttcagatagggggagaggcgggggctgcgtggcccgagctggcgggttctggcctccaccaccttcagatagagcggctcggcatcgtccatgcggtgcatatagtgatagagcagggccagatggaagagccgttcgatgtgttccgggctgtccccgccccaggcctggcaggacaactcggctgccagcagcatacattcctcaatcttggccagcagcatgcggtcccagaagtaatcggccgccatctcatagtaatgggcggcttttttgagttccccggcggctttgaagtggcgggcgatctccgcggaatgctccttgagtgcctgttcaaagacggtttccatggcttcggcggccgccaggtgcagttttttaagctccttttcgcggatgctggcatagaccgccttctgtaacaggctgtgggaaaagatgtaaaagagttcatcggcatcctgccagattttccgtccccccgctttgcccagttgctggatggggttgccttcgagcatgtgggagaggaggacaacattgaagcggaagcccagcacactggcgccgcggacgctttcctgaacctttttggagagccgggcaatgcgccgggaaatcacctcgtcgatgcctcccgccgccgcttccaagccctcttgcgctatttcgccgtggggactgagcagcttgttttccagcagataagcggcaagctgttcggcattgaaaggattgccgcccgcgcaggcgtggaaagcggaaaaggcctcgcggggcaggcggggaaggcccagcagattgaggtagagcttgcggctggcgctggagttgagggagcccagggcgaggctctccaagccatcttttttgacggcaagctccgcgggcagcctgcccttttccgtccgggcggtagccagcagaaagagcgggcgcacgccgtgttgccacagcagttccaggaattgacggctcaggggatcgagccattggacatcgtcaataaagataagcacaggggatttggcgcacagccagcgcaggtaatccagccaggcctgctgctgacggggcagcctggcttcgggggcgatcccgcgccagggcgagccatcccaggagagattcagcagcgaggcgagggcggcttcgcaatcctgtcccagcgaggaaccgcgggtgcgcttttgccacgcttcgcggaaatgctgcaccgcctgcgcgggagcctcatcctccaaaagccccaaactggcacgcagcaactgggatacgatatccagagggaggggggaatcctgcctgcaagccagcagatacacctgccgccggggagtctcgaaggcgcgcaaagcttcgcgtgccaacctgcttttgcccactcccgccgttccatgcaccaccatcgcctggggcgaggaggccgccaaaccatcgcgtatcctgctatgcagcagagcggtctccttctccctgccaatcatgcaaagcggttgtccggtgatcagttgccccggcagcatgcccagacggtaggcgcggggcgcggcttttgaggcggctttttcccttttgaggggggtgaagatgaaggagttgtgctgctggttgcgcagcttgtggtcggcgagggcttcgccggggcgggcaagctccaggagcttctgggcgcgggtgatggcttcgcccgggaagaaggttgccttccacaggtctttgccggcagccatggaaaagatgtagccggtgcagcaggcggcgcgggctttgtggcgcgtggcagcttccaaagccaggcggcaggcgcgctgcattttgttgaccttgttgtgggggaaatcgaagagcaggatggcatgcagccgcttgtgccgcacatagatggctgccaaaaaggcgtcgtagatcaccgccagcagttccagcgcctggatggttggctccagggggccgtccggaggctcgtccaggctgaggcagcagcaaacgctgtgccggacgtcagccgcgggattgagtctgtgaaagcgggaatgaatgaagtggtggccgtgttgcttgcccaagcgcttcctttccggaatatcaggcaactggggaaagggcggatgctcggcaagtttgccaggcctggcatccaactcccagcccagtctgttcaatgcctggggagagtaataaggttggttgggctggccggggttttcacgcaggacatccagttggggagaccagaacacatattcaaactggagggggttctcaaagatgcgccaggacagggtgccaaaacccacggccaggcggattacattcggcattccatgatgggggctggcgtagctgttgatcgcaccgatagtgtgattgatgcgtgccagcagcgccgcgatcagcaccggagtgctttccggcaacagggcgtggatgcagtttccctcatactggaagagcagtccgcctgcgttcctgatcaggctcagcatcctttcataggcttcggtgaaagttgcttccatcctgtcaatcacctgctgccgctgcttgagccttactcctttgatattgtaagtggcaacggtgcaaaagcgcaggatatagccggtgatctgcccctgcaggatgttttgctcatactgctgcaggatgtagctgggcaccacgcggttcatatctggctacctgccttgcctggcttaactataatctcctttctgcctacttatcccccaggctcagattggcgaaggcggtgagggtgatctccgcgtccgcgctttccagatagctgacgcgtgcccggtcgcccgcgcgggtgatgggcagacggctgctcaggttgctggaggcgataaagattatatccggcgcttcggtcagggtaaggtagtagtaggtgcgtccatccgtggtgtccgagccaaagcgggcgatggagcctgtgagggtggcctgcttgtccgctgcctccggggatatccccatccggcttccggccagggccatctgatagttgtcgcgcgcgctgcgcacgctttcacccactcccaccagggaaaagtcgcgcactgaaacgaagctgaacatcttgattagcccggcgctgtccttgagggtcataaaataggtcggcttgccgttcatgttcaccaggatggggaaggtggcatagtatttgaagttttgcaccttgccttcggcggagcgcatggcggcagtctcggtggcaccggagaccaggtagaggtggctgcttttggtgcgggtgtccgtgagcgcaaagcccaccgttccctcgtccgaacccacgctggtgaggccggagtagaaatagctgcgctgatcgcggccatagatcacgttgtaaccgggcgtcacccgcagcaggtcgcgtttgccgaacacgctgttccaaaagccgtgcacatatttgccccaccaggaaagctggggaagcacaaagtaggagggctggatgcggtcaacccaggcgggaatcttgctgtcgtcatagatgccgccgctttttttgaggggaaagtatttgatctcacccgtgccggcatgcacgatggcgagtccggtggcttccggggcactcactccgatcttgtgggtgtaggtggtgatggtccagtagggttcgccattgtcgtccagttcaaaggtatcgcctgccaggccgatgcccgcgaagccgttccaccagagatggcggtagaggtcttgtccaaagtaggcgttgcgctgatagcggatttggatgggtttgcctttcagctcgcgcacaaaggtgatatcctgcggattggtggccgagaccttgatgtagcccggggtgcctttgcttgtgttggtgatccacttccagaagccgctgtgcagcaggggacagacccagaaaagcttgccatccaccatctggatggtcgggttgccgagcaccacccggctgccgagggcgaagtcctcgcccagtttcttggctgccaaatccttggcgaaagcggaatccaggatcggcacctgatccagattgaccggcgccaccaggtcggaaaactcggtcttttccacctcgccgatcatgcggcggtagctgccggaattgaagatgccggaagagaagaagggcgccaagatcagccacagcgccagaaggggatagaccacatagaggatcttgcgcaggcgccggattgccagcagcggagccaggcagatcatcagggggacgatccagtccaaaaagcggatatgcagcaccggaagcacaaagtaaagcataaaacccagcagcaggacggacagcactatggcaggcagggctttgatcctgaacttgggaaacttgatcacgacaggtttgggcgtttgttgttgaaacatggtaacctccctgaactaagctttgtttttatactctaccagatggcggcggatttgtcaagccggaatcgctgcccgcctccaatacagaatggaaaaaagtggactcggctcgaagaccgctcctatccttgcggatacagaggcgcgaccgcccgctcaaacactccctgaaccttggaaatggccagcccgtaattggtgatcggcactccgcgccgctgggcttccacgatgcggcggctcatctccatctggttgagcatgcaggctccgcagtggatcaccagcgcgaattcctccagattgggcggaaagtcgtgtcccgcgtaaacttcatactccagttccttgcccgtgaactggctcagccagcgcggaatcttcacccgcccgatgtcatccgcctgcacgtggtgggaacaggcttcggcgatcaggatcttgtcgccgtcgcgcagcttgtcgatctgcctcaccccttccgccaggacgtccagatcgcctttgtagcgggcaaagaggatggaaaaggtggtcatcttcacctcggggggcaggtcattcaccaccttcagcaccacctgcgaatccgtgatcaccagatcaggcggctccttcagggtttgcaaggcataggccagttcccgctctttcaccaccgtcaccaccgcgtcgtgatccagcagttcgcgaatcacctgcacctgcggcaggatcaggcgtcccttgggcgcggcgaggtcgatgggagtcaccagcagcaccctgtccccggccttcaccaagtcacccgccagggggcgctcctccagcagatgggcgggcgccagcttgatcagcagttccttggcggcatcgatgttttcccccttgagggcggagacggagacccagggcagtccccgttcctcgcaccaggcgatattggcgggggcaggctcgcgcaaatccctgtggttaaagaccattaacagcggtatcttcatctcgcggatgcgtttcagggaggacagctcgctctccgcgaaggggcggccatcgttcacaaacacggctatgtccgtgcggtaaagtatcttataggtggcgagtacccgtttttcgcccagttcgccgctgtcgtccagtccagcggtgtcaaagaaggtcaccgggcccaggggcagaagttcatagcgtttgtccaccgggtctgtggtggtgcccggggtgctggaaacgatggctatctcctgtcctgccagggcgttgatcaaggacgattttccagcgttgcggttacccagcagggtgatgtttacgcgttctccgcggggtgtgctcatctatcttctcccaaaaagtcttgcggcttgcggccgctaatagcttttattatcagttctttcatgtttctttccttgtcggactggataccagcccatgtaaaaataatatatgtgaaaagcgcgaatctgtcaagcaaagagaattctggcagacaggggcctgtgtttttgatatatccacaaattacacaaattaacacggattaaaagaacagaataaggacaagtgtccagcctaaaaacaacaaccagaccctgaaacaaaccgccaccaagccctaaagccgtgtcatcccgggctgtcggggtcaccgccaaagcgcgaagcggtttggtggggtggcttgacccgggatccagtcttttaaaaacaaccagcaagccccgaaacaaagcacaacagactaaaaaccgtgtcatcccgggctgtcggggtccccgccaaagcgcgaagcggtttggtggggtggcttgacccgggatccagtcttttagaaacaaacgcgtaaggttttaaaaaagcaggcacctttccacctcaaaacacctttccacaaattctccccccatatatataggtgctacgaccccttcatgccaggcgggaagcggatcccagggcaagtatatatatacttgcccgtaattgcgcggccatgggctggctgccctccctttcccctcgcgcgcgggtggctctcatttgcatccagcgttttggcgtgagtcttccttaggtcatccttataatttataaggttgacctaaggatgatggcatcaaatccagtagcagcaaaggagggcggtatgaaggattatgcggaaggttgtggtatttttgtggaaaggtggaaaggtgcccccgaaacaagtccaccaagttatattttgtgtcatcacgggaagtcggggccccctctggggtggcttacccgtgatccagtctttttaaaagaaacatccacaaattacacaaattaacacgaattaaaagaacattaaagagtcaacacacccgactccggaacaaaaccctccagactaaaaaccgtgtcatcacagcctgcgagccgtgatccagtgcccaggtgtggcaaagtccgtttgccacagagaccggaggtctcttccaaacaggcaactccgttgcctctgccgaacggacttcggcaacccttatattacaccaatccgtgtcaatctgcgccctttatccgcgtttatctgcgtgaaccgtggaacccgggatccagtcttttggaatgtttgaacttcgctgaaaacatttttcgctaccaggaatgaaaactggacaacaaacgcagcttgggatatctgacactaagagtgtaattcacacgatcaataagaacatagcgtgctgtgcatacaaaacatattaccgacggacttctgttctgaaatatggacgttttgaacttggtaaacagtccgtatatggactaccagctgggacttgccattaggcatatgcccgaatgtaaagctatattcttatataacgcattgtagacagcacaggttgttctctgctctttccatattacactagtggtcatcatttcaccagtaggggtttttttacgcttttttcccgggagttttcatgtaaagcaccctactggacaaagagatgggagccggaaaacacagcctgaactgggacggcaccgactccaacggcgcccaactggcaagcggagtctatatctaccgcctcagcaccggaaagacgagcgccagccgcaaaatgatattgctgaagtgacggacagccgcccttccaagtccgataattaacttgaaccgccgcgcattacacacggcggttctttccaacaagccaagtatcagcagcgggaaaactgcgctgaaaaagccgctggtggggctccgtaaaatgggagtggaagccgccgcatggaacaccttgaaagtaacaagataccgccccaaattgatctttcctaacccaaaatccgcaaagcaaatttcttgacaatgatctttggcttaaatataaggttcctatcgaacaaaaggagcatgttatgtacaatcttctttgtgataattgggtaaacgtggtctatctttcgggcaaaccagatagaatatctttagttcaaactcttgaagacgcacactgtctgcaactggcatacagcaatcctatggaccggttcgctgttttcagattcctgcttgctcttggctactggtgtttcgccaacaccaacggggagcctgaacctgataagccgcttccgacctcctggatatcctggctggaagaaaacaaggggtatttcgagctttttggggatggacagagatttttccaagccgatcccagttccaggatcagagccattaccgaccttattcatgagataccaacagctcacaacctatgccatttcaatcatgtcaccgactatatcgatgggctctgcgaagcttgctgcatcaagggactgctgagattacctgtctttaccactgtcggtggcagagggataggcgcgggaatcaacaacactcctccattttacctgctctggcatgcaaatgacctcgctggcatgctggttcaaaattggcaaccctgggataatatggggattccggcatggttgggttcttttcaaaaagaaagcaggaaagtgggcttacttgccggaatgacctggctgccgcgcaaggtgcatctgcatgatcctgtctcaggtcaggcagcatgttgttcctgcggcttaccctccaaagctctcgtctattcctgcagcataaaacctgaaccagtgccggaaggccttaaatggaaagaccctcatggtgtttacaccgatcagggaaaaagtctccagtccaaaatcaaactgatgtccaatgatagatacactttcgcggaccgggattggtatagcccgttgttcagctatttgcacgcggaaggaaactccagacaaggaaaactatggttggttggatttgccagcgataaagcaaaaagcatagacatctgggacaagatcatcgagcttgagggaactgatacaaatgatgagctactggctcaattggcaaacagggctactgcccttaatgccatgcgcaagaagcctctcagaggtgatttcaaaaagtcagtgggcactccccagattgctgacattatcccccacgccgaaagcagaattgccatcaatgcgggtaaaatgactgagaacaggggctattcctggcaggatgccgatactgaatacggagaactgctcaccaaggttgcatgctctttggagccggctcaaacagtggacgccaggctcaagagaggtaaattcatttcccgcaagccctggccagttataccagaatccaaaacaaaacccgcagaggaggaccagaatgaatagaggaaccgttgacttcattgcaagcctggagaacctcaaagaaggcgatttgggcattcttagaaaactcaggggagcccggcttgatgaaaagcttcccggatttgacctgttttccgccctatggtggcctttgcggcaaaagaatcaacgcgctcccaagcgtgaagtggcttggttgatcgccaaactttttgctgaattccgctttgaacagcgcgagggagccacattgcccattcttatgggaggcatctgccggaagttggaacccaaaaaggaattaccccgtgtattggcacgctttgatcaactcgcatcgcttgacattatgcagatggaagagccgctgtcggtcattatgggtatcttgcgcaagcaccagcaggtctgcctggactgggtagggcttactgatgttctgtcattttgggagcaggaacctgtcaaaagagaatggtcggattcatttattaaagcatacaagatcaacaaggaggattcagatgttgattgaaattcatatgattcagaatcacagcccggcaaatcttaaccgggacgacttgggcgcccccaagacctgttatttcggtggagtattacgttctcgcatctccagccaatgcatcaagcgcagcatccgttttgccccggaattcgcggaccttagaggaggtatccgaacaaggcgtctggcagagaaacttgaagaaatgctggaaaacaaagataagaagctggttgccaagtttcttgaagcctgcggaatcaaaaccaaatcttccaagaaagctgcaaaaaagtccgaaaagatacccgcggaagccgatgaagatcaggatgagcagcaggcggctgatacatctgacatgctggtttttaccacttatgatgccctgcgccaaatggcagagctgctttccgactccaaactaagtgaaagcgaaaaactgctgcagttcaaagatttgctcacaaactgcgtccattctccggatatagcactttgcggcaggatgttggagaccaaagagcttaaaaacactggcgttgaaggcgccctacaggttgcacatgcgatctccacccacattgccagacctgagatagactattttgtggcggccgatgatgttcccggtgaagacgccggagcgggtcatattggcgaatccatgtttgcctcagcctgtttctacaaatacttctccattgattgggaacagttggtcaagaacctgaaaggggacacgaatctggcagcccacaccgtgggtgcctttctcctcgccgctgccaaaaccaaccccagtggcaaacagaacagcttcgccgctcataactatcccgatggcatccttgttgagttcaagaattcccctattagctacgccaacgcattcgtcaggccagtttccgtggtcaaggaatcggacctggtggaacaaagcatcggccagctttccaactacgtgaacgacatcaggcttggctattatgatgagcaatccccagttatcagcttctggttttctccaaacaatcgctattcccttggcaatgagcattccaaactggcttccagaaacattggcaacctcaatgagcttgtaggcgctgtgttggattatattggcggcttcaagtgggaagaagttcagaaaagcaaggcttatgttggcggctgacatgagtgcgccacccaacaccttattcttgcgcttggagggggctttgcagtcttggggcagcaacgaggctaagtttgctttgcgcaggactaccgacgctcccacaaaatcaggtgtcctggggctgctttgcgcggccatgggaattgggcgcgcggaggctgctgattcatggctcccaaaactcgccaacctgcgcatgggcgtgcggatagaccgccccggcatacgctggtgggacttccatactgttggagcgggacaaagaatgcgcatggcagagctgaaggcacccaaaaaaccttccatggttggagctgccctggctgataccctgacaccaagcaaagtaaaaaccagggcagagaccttgctctcacgccgcgaatatcttgccgacgccagttttctggtcgccttgcagggtgagccggaacttgtggaaaagctctccgccgctctggccaagccggtctgggcaatttatctggggcgcaaatcctgtcccccttcacgtcccgtgggcgagcatgctccgggcttttataacactttggaggaggcgctgtccgcggttcccctgcaaaagcgctggcacaatgaacccctgccgcaaatactgccttgcgtcatggactggatccccagccaggacggagaacatgcgcctgatgacgcggagattcattacgatctgccggtttcttttcagccgccccgccatttgccgcgcttcgtgatcaggcgtgagctggttgtgggagaggatgtgcaagtgagcagggaaaccggaaccagcgtttggaggcccaaaggaacccgggcggattataacaattccgagtataagaaggtcagggcggagcggcttgtgatggaccatgccgcgtgcatggtatgcaaagctcccgccacgactgttcaacacgtgaattaccgcagggcgggaggcaaggaaataccggaagacctgcgggcgctgtgccgcctctgccacgacgcctgcaccatgctggaatacggttccggcatgaccaccgaccgcatcgacccctgcgaccccatctggcgggagcgaatactggcaaagcgcaaagatatagtcgagttccgttcgcgcgggcagcgtttccgcaaaatgaagccagaggaggaaaacggatgatctacttgtccaagctattgatcgatactggaggcaatccagaccgtccccgccccggcagaaagtggctggacaatatctataacgtccaccgccgcctttccatggcgttcccttcaggtttgcgccgggagcaggatccgcatttcctgaagcccttttcgccaaacgacttccaaaaaactcccttccttttccgggtcgataacaacatcgacggaaacgataaaagggcgattattatcgtccagtccgttcttgagccggattgggattattgcttccaaaacgcgcttgatttcctggcagcgccaccggaaacaaaggagtataatccagagtttcaagcgggacaactgctccggttcaggctgcgggtaaacgccagcgtacgccgtcatattcctgagaaggtgcaacaggacggtcaaaccatagaaactggcaacatcctgcacaaaagggtttctctcacctgggatccctcttccaccccggatcaggcccttgccgactggctggctgccaaaagcccaaagctgggcttcacccttcagcgctgtgagcttcttcaactgggttgggtttatggctccaagcctgaacctaaaaatgtcaaagcaaaggaacagggacagggctactggcgtgaacacacatacaatcctctgcgcttccgttcggctctactggagggaattctcaaagtggatgacccgaaactgttcctggaaacgcttagaagcggcattggaaaagcgaaaagcttcggctttggcctgctgtccgttctgccaatcaggaatgatgaataaagacctgcactctatcccccggatcagagatcggcttagctatctctatgtggagcatgccaaaattgatcagaacgggcaagccatcgccattcacgatgccctgggagaaaccccggttccttgtgccggcttggctatgctgatgctgggaccgggcataaccatcacccatgcggcaatactttcactggctgcctgtggctgtctggtagcctgggtgggggaacatggcgtcaggttctatgccgcaggcacaggtacaacccgtagcgccgtcaatcttatgaaacaggcaaagtactgggcagacccggttttgcatttacgggttgtgcgctccatgtatcagttgaggttccaggatgagctttctcctgatttaactttgaaccagatcaggggcaaggaaggtgcccgggtgcgcgatacatatttccaactctcccaaaagtatggtgtgcccatgcagggcagaaactatcaaagagacaactggaacaaagcagaccccataaaccgggctttatctgtggcaaactcatgcctctacggcatatcacacgctgccatcgtagcggcaggattctctcccggattgggctttgtccacactggcaagcaactgtcgtttgtctatgatatcgcggatctatacaaaatggagatggctgctcccgccgcattccgggcgaccgctgaagggatcggcgaactcgaccgcagagtcaggcttgcctgccgtgatgaattccacaggcagaatctactcaaacgcattgtcgctgacattagttctctcttcggtgatattatgccagaggatagcccggatgactgttttgccgaagaaccagccttgcctggaggactctggtctccagatggagaagtgtccccagggggcatatcttacgggcaggatgatctgccaaaggaagattgatggtggttttggttttggaaaacgtgccgaactccttgcggggtcagatcacacgttggctgctggaagtaaaggcgggggtgtttgtgggtaaagtctcagcaatggttagagacaaactgtgggacaaggttagaagcaactgcagcggtgggacttgcctgatgatctggagtagccagaccgaacagggttttgatatcgaattctggggtgccgcatcaagagtcgttacggaatgggagggtatcaaactaatgaccaaacatccttgaactaaggcttgaaggagctcaatgacctgttagctctctattgatcaagtgtattccccacgcatgtgggggtgaaccaggagaattaaaatgaatctcaaccagtatcaagtattccccacgcatgtgggggtgaaccgtgatagagcagctgggagaccagtcgtctatcgtat

SEQ ID NO: 956 - DNA, 103575 bp, Artificial Sequence
  Synthetic Oligonucleotide
  misc_feature (1)..(16594): n is a, c, g, or t
nnnnnnnnnnnnnnnnnnnnnnnnnnnnnnnnnnnnnnnnnnnnnnnnnnnnnnnnnnnnnnnnnnnnnnnnnnnnnnnnnnnnnnnnnnnnnnnnnnnnnnnnnnnnnnnnnnnnnnnnnnnnnnnnnnnnnnnnnnnnnnnnnnnnnnnnnnnnnnnnnnnnnnnnnnnnnnnnnnnnnnnnnnnnnnnnnnnnnnnnnnnnnnnnnnnnnnnnnnnnnnnnnnnnnnnnnnnnnnnnnnnnnnnnnnnnnnnnnnnnnnnnnnnnnnnnnnnnnnnnnnnnnnnnnnnnnnnnnnnnnnnnnnnnnnnnnnnnnnnnnnnnnnnnnnnnnnnnnnnnnnnnnnnnnnnnnnnnnnnnnnnnnnnnnnnnnnnnnnnnnnnnnnnnnnnnnnnnnnnnnnnnnnnnnnnnnnnnnnnnnnnnnnnnnnnnnnnnnnnnnnnnnnnnnnnnnnnnnnnnnnnnnnnnnnnnnnnnnnnnnnnnnnnnnnnnnnnnnnnnnnnnnnnnnnnnnnnnnnnnnnnnnnnnnnnnnnnnnnnnnnnnnnnnnnnnnnnnnnnnnnnnnnnnnnnnnnnnnnnnnnnnnnnnnnnnnnnnnnnnnnnnnnnnnnnnnnnnnnnnnnnnnnnnnnnnnnnnnnnnnnnnnnnnnnnnnnnnnnnnnnnnnnnnnnnnnnnnnnnnnnnnnnnnnnnnnnnnnnnnnnnnnnnnnnnnnnnnnnnnnnnnnnnnnnnnnnnnnnnnnnnnnnnnnnnnnnnnnnnnnnnnnnnnnnnnnnnnnnnnnnnnnnnnnnnnnnnnnnnnnnnnnnnnnnnnnnnnnnnnnnnnnnnnnnnnnnnnnnnnnnnnnnnnnnnnnnnnnnnnnnnnnnnnnnnnnnnnnnnnnnnnnnnnnnnnnnnnnnnnnnnnnnnnnnnnnnnnnnnnnnnnnnnnnnnnnnnnnnnnnnnnnnnnnnnnnnnnnnnnnnnnnnnnnnnnnnnnnnnnnnnnnnnnnnnnnnnnnnnnnnnnnnnnnnnnnnnnnnnnnnnnnnnnnnnnnnnnnnnnnnnnnnnnnnnnnnnnnnnnnnnnnnnnnnnnnnnnnnnnnnnnnnnnnnnnnnnnnnnnnnnnnnnnnnnnnnnnnnnnnnnnnnnnnnnnnnnnnnnnnnnnnnnnnnnnnnnnnnnnnnnnnnnnnnnnnnnnnnnnnnnnnnnnnnnnnnnnnnnnnnnnnnnnnnnnnnnnnnnnnnnnnnnnnnnnnnnnnnnnnnnnnnnnnnnnnnnnnnnnnnnnnnnnnnnnnnnnnnnnnnnnnnnnnnnnnnnnnnnnnnnnnnnnnnnnnnnnnnnnnnnnnnnnnnnnnnnnnnnnnnnnnnnnnnnnnnnnnnnnnnnnnnnnnnnnnnnnnnnnnnnnnnnnnnnnnnnnnnnnnnnnnnnnnnnnnnnnnnnnnnnnnnnnnnnnnnnnnnnnnnnnnnnnnnnnnnnnnnnnnnnnnnnnnnnnnnnnnnnnnnnnnnnnnnnnnnnnnnnnnnnnnnnnnnnnnnnnnnnnnnnnnnnnnnnnnnnnnnnnnnnnnnnnnnnnnnnnnnnnnnnnnnnnnnnnnnnnnnnnnnnnnnnnnnnnnnnnnnnnnnnnnnnnnnnnnnnnnnnnnnnnnnnnnnnnnnnnnnnnnnnnnnnnnnnnnnnnnnnnnnnnnnnnnnnnnnnnnnnnnnnnnnnnnnnnnnnnnnnnnnnnnnnnnnnnnnnnnnnnnnnnnnnnnnnnnnnnnnnnnnnnnnnnnnnnnnnnnnnnnnnnnnnnnnnnnnnnnnnnnnnnnnnnnnnnnnnnnnnnnnnnnnnnnnnnnnnnnnnnnnnnnnnnnnnnnnnnnnnnnnnnnnnnnnnnnnnnnnnnnnnnnnnnnnnnnnnnnnnnnnnnnnnnnnnnnnnnnnnnnnnnnnnnnnnnnnnnnnnnnnnnnnnnnnnnnnnnnnnnnnnnnnnnnnnnnnnnnnnnnnnnnnnnnnnnnnnnnnnnnnnnnnnnnnnnnnnnnnnnnnnnnnnnnnnnnnnnnnnnnnnnnnnnnnnnnnnnnnnnnnnnnnnnnnnnnnnnnnnnnnnnnnnnnnnnnnnnnnnnnnnnnnnnnnnnnnnnnnnnnnnnnnnnnnnnnnnnnnnnnnnnnnnnnnnnnnnnnnnnnnnnnnnnnnnnnnnnnnnnnnnnnnnnnnnnnnnnnnnnnnnnnnnnnnnnnnnnnnnnnnnnnnnnnnnnnnnnnnnnnnnnnnnnnnnnnnnnnnnnnnnnnnnnnnnnnnnnnnnnnnnnnnnnnnnnnnnnnnnnnnnnnnnnnnnnnnnnnnnnnnnnnnnnnnnnnnnnnnnnnnnnnnnnnnnnnnnnnnnnnnnnnnnnnnnnnnnnnnnnnnnnnnnnnnnnnnnnnnnnnnnnnnnnnnnnnnnnnnnnnnnnnnnnnnnnnnnnnnnnnnnnnnnnnnnnnnnnnnnnnnnnnnnnnnnnnnnnnnnnnnnnnnnnnnnnnnnnnnnnnnnnnnnnnnnnnnnnnnnnnnnnnnnnnnnnnnnnnnnnnnnnnnnnnnnnnnnnnnnnnnnnnnnnnnnnnnnnnnnnnnnnnnnnnnnnnnnnnnnnnnnnnnnnnnnnnnnnnnnnnnnnnnnnnnnnnnnnnnnnnnnnnnnnnnnnnnnnnnnnnnnnnnnnnnnnnnnnnnnnnnnnnnnnnnnnnnnnnnnnnnnnnnnnnnnnnnnnnnnnnnnnnnnnnnnnnnnnnnnnnnnnnnnnnnnnnnnnnnnnnnnnnnnnnnnnnnnnnnnnnnnnnnnnnnnnnnnnnnnnnnnnnnnnnnnnnnnnnnnnnnnnnnnnnnnnnnnnnnnnnnnnnnnnnnnnnnnnnnnnnnnnnnnnnnnnnnnnnnnnnnnnnnnnnnnnnnnnnnnnnnnnnnnnnnnnnnnnnnnnnnnnnnnnnnnnnnnnnnnnnnnnnnnnnnnnnnnnnnnnnnnnnnnnnnnnnnnnnnnnnnnnnnnnnnnnnnnnnnnnnnnnnnnnnnnnnnnnnnnnnnnnnnnnnnnnnnnnnnnnnnnnnnnnnnnnnnnnnnnnnnnnnnnnnnnnnnnnnnnnnnnnnnnnnnnnnnnnnnnnnnnnnnnnnnnnnnnnnnnnnnnnnnnnnnnnnnnnnnnnnnnnnnnnnnnnnnnnnnnnnnnnnnnnnnnnnnnnnnnnnnnnnnnnnnnnnnnnnnnnnnnnnnnnnnnnnnnnnnnnnnnnnnnnnnnnnnnnnnnnnnnnnnnnnnnnnnnnnnnnnnnnnnnnnnnnnnnnnnnnnnnnnnnnnnnnnnnnnnnnnnnnnnnnnnnnnnnnnnnnnnnnnnnnnnnnnnnnnnnnnnnnnnnnnnnnnnnnnnnnnnnnnnnnnnnnnnnnnnnnnnnnnnnnnnnnnnnnnnnnnnnnnnnnnnnnnnnnnnnnnnnnnnnnnnnnnnnnnnnnnnnnnnnnnnnnnnnnnnnnnnnnnnnnnnnnnnnnnnnnnnnnnnnnnnnnnnnnnnnnnnnnnnnnnnnnnnnnnnnnnnnnnnnnnnnnnnnnnnnnnnnnnnnnnnnnnnnnnnnnnnnnnnnnnnnnnnnnnnnnnnnnnnnnnnnnnnnnnnnnnnnnnnnnnnnnnnnnnnnnnnnnnnnnnnnnnnnnnnnnnnnnnnnnnnnnnnnnnnnnnnnnnnnnnnnnnnnnnnnnnnnnnnnnnnnnnnnnnnnnnnnnnnnnnnnnnnnnnnnnnnnnnnnnnnnnnnnnnnnnnnnnnnnnnnnnnnnnnnnnnnnnnnnnnnnnnnnnnnnnnnnnnnnnnnnnnnnnnnnnnnnnnnnnnnnnnnnnnnnnnnnnnnnnnnnnnnnnnnnnnnnnnnnnnnnnnnnnnnnnnnnnnnnnnnnnnnnnnnnnnnnnnnnnnnnnnnnnnnnnnnnnnnnnnnnnnnnnnnnnnnnnnnnnnnnnnnnnnnnnnnnnnnnnnnnnnnnnnnnnnnnnnnnnnnnnnnnnnnnnnnnnnnnnnnnnnnnnnnnnnnnnnnnnnnnnnnnnnnnnnnnnnnnnnnnnnnnnnnnnnnnnnnnnnnnnnnnnnnnnnnnnnnnnnnnnnnnnnnnnnnnnnnnnnnnnnnnnnnnnnnnnnnnnnnnnnnnnnnnnnnnnnnnnnnnnnnnnnnnnnnnnnnnnnnnnnnnnnnnnnnnnnnnnnnnnnnnnnnnnnnnnnnnnnnnnnnnnnnnnnnnnnnnnnnnnnnnnnnnnnnnnnnnnnnnnnnnnnnnnnnnnnnnnnnnnnnnnnnnnnnnnnnnnnnnnnnnnnnnnnnnnnnnnnnnnnnnnnnnnnnnnnnnnnnnnnnnnnnnnnnnnnnnnnnnnnnnnnnnnnnnnnnnnnnnnnnnnnnnnnnnnnnnnnnnnnnnnnnnnnnnnnnnnnnnnnnnnnnnnnnnnnnnnnnnnnnnnnnnnnnnnnnnnnnnnnnnnnnnnnnnnnnnnnnnnnnnnnnnnnnnnnnnnnnnnnnnnnnnnnnnnnnnnnnnnnnnnnnnnnnnnnnnnnnnnnnnnnnnnnnnnnnnnnnnnnnnnnnnnnnnnnnnnnnnnnnnnnnnnnnnnnnnnnnnnnnnnnnnnnnnnnnnnnnnnnnnnnnnnnnnnnnnnnnnnnnnnnnnnnnnnnnnnnnnnnnnnnnnnnnnnnnnnnnnnnnnnnnnnnnnnnnnnnnnnnnnnnnnnnnnnnnnnnnnnnnnnnnnnnnnnnnnnnnnnnnnnnnnnnnnnnnnnnnnnnnnnnnnnnnnnnnnnnnnnnnnnnnnnnnnnnnnnnnnnnnnnnnnnnnnnnnnnnnnnnnnnnnnnnnnnnnnnnnnnnnnnnnnnnnnnnnnnnnnnnnnnnnnnnnnnnnnnnnnnnnnnnnnnnnnnnnnnnnnnnnnnnnnnnnnnnnnnnnnnnnnnnnnnnnnnnnnnnnnnnnnnnnnnnnnnnnnnnnnnnnnnnnnnnnnnnnnnnnnnnnnnnnnnnnnnnnnnnnnnnnnnnnnnnnnnnnnnnnnnnnnnnnnnnnnnnnnnnnnnnnnnnnnnnnnnnnnnnnnnnnnnnnnnnnnnnnnnnnnnnnnnnnnnnnnnnnnnnnnnnnnnnnnnnnnnnnnnnnnnnnnnnnnnnnnnnnnnnnnnnnnnnnnnnnnnnnnnnnnnnnnnnnnnnnnnnnnnnnnnnnnnnnnnnnnnnnnnnnnnnnnnnnnnnnnnnnnnnnnnnnnnnnnnnnnnnnnnnnnnnnnnnnnnnnnnnnnnnnnnnnnnnnnnnnnnnnnnnnnnnnnnnnnnnnnnnnnnnnnnnnnnnnnnnnnnnnnnnnnnnnnnnnnnnnnnnnnnnnnnnnnnnnnnnnnnnnnnnnnnnnnnnnnnnnnnnnnnnnnnnnnnnnnnnnnnnnnnnnnnnnnnnnnnnnnnnnnnnnnnnnnnnnnnnnnnnnnnnnnnnnnnnnnnnnnnnnnnnnnnnnnnnnnnnnnnnnnnnnnnnnnnnnnnnnnnnnnnnnnnnnnnnnnnnnnnnnnnnnnnnnnnnnnnnnnnnnnnnnnnnnnnnnnnnnnnnnnnnnnnnnnnnnnnnnnnnnnnnnnnnnnnnnnnnnnnnnnnnnnnnnnnnnnnnnnnnnnnnnnnnnnnnnnnnnnnnnnnnnnnnnnnnnnnnnnnnnnnnnnnnnnnnnnnnnnnnnnnnnnnnnnnnnnnnnnnnnnnnnnnnnnnnnnnnnnnnnnnnnnnnnnnnnnnnnnnnnnnnnnnnnnnnnnnnnnnnnnnnnnnnnnnnnnnnnnnnnnnnnnnnnnnnnnnnnnnnnnnnnnnnnnnnnnnnnnnnnnnnnnnnnnnnnnnnnnnnnnnnnnnnnnnnnnnnnnnnnnnnnnnnnnnnnnnnnnnnnnnnnnnnnnnnnnnnnnnnnnnnnnnnnnnnnnnnnnnnnnnnnnnnnnnnnnnnnnnnnnnnnnnnnnnnnnnnnnnnnnnnnnnnnnnnnnnnnnnnnnnnnnnnnnnnnnnnnnnnnnnnnnnnnnnnnnnnnnnnnnnnnnnnnnnnnnnnnnnnnnnnnnnnnnnnnnnnnnnnnnnnnnnnnnnnnnnnnnnnnnnnnnnnnnnnnnnnnnnnnnnnnnnnnnnnnnnnnnnnnnnnnnnnnnnnnnnnnnnnnnnnnnnnnnnnnnnnnnnnnnnnnnnnnnnnnnnnnnnnnnnnnnnnnnnnnnnnnnnnnnnnnnnnnnnnnnnnnnnnnnnnnnnnnnnnnnnnnnnnnnnnnnnnnnnnnnnnnnnnnnnnnnnnnnnnnnnnnnnnnnnnnnnnnnnnnnnnnnnnnnnnnnnnnnnnnnnnnnnnnnnnnnnnnnnnnnnnnnnnnnnnnnnnnnnnnnnnnnnnnnnnnnnnnnnnnnnnnnnnnnnnnnnnnnnnnnnnnnnnnnnnnnnnnnnnnnnnnnnnnnnnnnnnnnnnnnnnnnnnnnnnnnnnnnnnnnnnnnnnnnnnnnnnnnnnnnnnnnnnnnnnnnnnnnnnnnnnnnnnnnnnnnnnnnnnnnnnnnnnnnnnnnnnnnnnnnnnnnnnnnnnnnnnnnnnnnnnnnnnnnnnnnnnnnnnnnnnnnnnnnnnnnnnnnnnnnnnnnnnnnnnnnnnnnnnnnnnnnnnnnnnnnnnnnnnnnnnnnnnnnnnnnnnnnnnnnnnnnnnnnnnnnnnnnnnnnnnnnnnnnnnnnnnnnnnnnnnnnnnnnnnnnnnnnnnnnnnnnnnnnnnnnnnnnnnnnnnnnnnnnnnnnnnnnnnnnnnnnnnnnnnnnnnnnnnnnnnnnnnnnnnnnnnnnnnnnnnnnnnnnnnnnnnnnnnnnnnnnnnnnnnnnnnnnnnnnnnnnnnnnnnnnnnnnnnnnnnnnnnnnnnnnnnnnnnnnnnnnnnnnnnnnnnnnnnnnnnnnnnnnnnnnnnnnnnnnnnnnnnnnnnnnnnnnnnnnnnnnnnnnnnnnnnnnnnnnnnnnnnnnnnnnnnnnnnnnnnnnnnnnnnnnnnnnnnnnnnnnnnnnnnnnnnnnnnnnnnnnnnnnnnnnnnnnnnnnnnnnnnnnnnnnnnnnnnnnnnnnnnnnnnnnnnnnnnnnnnnnnnnnnnnnnnnnnnnnnnnnnnnnnnnnnnnnnnnnnnnnnnnnnnnnnnnnnnnnnnnnnnnnnnnnnnnnnnnnnnnnnnnnnnnnnnnnnnnnnnnnnnnnnnnnnnnnnnnnnnnnnnnnnnnnnnnnnnnnnnnnnnnnnnnnnnnnnnnnnnnnnnnnnnnnnnnnnnnnnnnnnnnnnnnnnnnnnnnnnnnnnnnnnnnnnnnnnnnnnnnnnnnnnnnnnnnnnnnnnnnnnnnnnnnnnnnnnnnnnnnnnnnnnnnnnnnnnnnnnnnnnnnnnnnnnnnnnnnnnnnnnnnnnnnnnnnnnnnnnnnnnnnnnnnnnnnnnnnnnnnnnnnnnnnnnnnnnnnnnnnnnnnnnnnnnnnnnnnnnnnnnnnnnnnnnnnnnnnnnnnnnnnnnnnnnnnnnnnnnnnnnnnnnnnnnnnnnnnnnnnnnnnnnnnnnnnnnnnnnnnnnnnnnnnnnnnnnnnnnnnnnnnnnnnnnnnnnnnnnnnnnnnnnnnnnnnnnnnnnnnnnnnnnnnnnnnnnnnnnnnnnnnnnnnnnnnnnnnnnnnnnnnnnnnnnnnnnnnnnnnnnnnnnnnnnnnnnnnnnnnnnnnnnnnnnnnnnnnnnnnnnnnnnnnnnnnnnnnnnnnnnnnnnnnnnnnnnnnnnnnnnnnnnnnnnnnnnnnnnnnnnnnnnnnnnnnnnnnnnnnnnnnnnnnnnnnnnnnnnnnnnnnnnnnnnnnnnnnnnnnnnnnnnnnnnnnnnnnnnnnnnnnnnnnnnnnnnnnnnnnnnnnnnnnnnnnnnnnnnnnnnnnnnnnnnnnnnnnnnnnnnnnnnnnnnnnnnnnnnnnnnnnnnnnnnnnnnnnnnnnnnnnnnnnnnnnnnnnnnnnnnnnnnnnnnnnnnnnnnnnnnnnnnnnnnnnnnnnnnnnnnnnnnnnnnnnnnnnnnnnnnnnnnnnnnnnnnnnnnnnnnnnnnnnnnnnnnnnnnnnnnnnnnnnnnnnnnnnnnnnnnnnnnnnnnnnnnnnnnnnnnnnnnnnnnnnnnnnnnnnnnnnnnnnnnnnnnnnnnnnnnnnnnnnnnnnnnnnnnnnnnnnnnnnnnnnnnnnnnnnnnnnnnnnnnnnnnnnnnnnnnnnnnnnnnnnnnnnnnnnnnnnnnnnnnnnnnnnnnnnnnnnnnnnnnnnnnnnnnnnnnnnnnnnnnnnnnnnnnnnnnnnnnnnnnnnnnnnnnnnnnnnnnnnnnnnnnnnnnnnnnnnnnnnnnnnnnnnnnnnnnnnnnnnnnnnnnnnnnnnnnnnnnnnnnnnnnnnnnnnnnnnnnnnnnnnnnnnnnnnnnnnnnnnnnnnnnnnnnnnnnnnnnnnnnnnnnnnnnnnnnnnnnnnnnnnnnnnnnnnnnnnnnnnnnnnnnnnnnnnnnnnnnnnnnnnnnnnnnnnnnnnnnnnnnnnnnnnnnnnnnnnnnnnnnnnnnnnnnnnnnnnnnnnnnnnnnnnnnnnnnnnnnnnnnnnnnnnnnnnnnnnnnnnnnnnnnnnnnnnnnnnnnnnnnnnnnnnnnnnnnnnnnnnnnnnnnnnnnnnnnnnnnnnnnnnnnnnnnnnnnnnnnnnnnnnnnnnnnnnnnnnnnnnnnnnnnnnnnnnnnnnnnnnnnnnnnnnnnnnnnnnnnnnnnnnnnnnnnnnnnnnnnnnnnnnnnnnnnnnnnnnnnnnnnnnnnnnnnnnnnnnnnnnnnnnnnnnnnnnnnnnnnnnnnnnnnnnnnnnnnnnnnnnnnnnnnnnnnnnnnnnnnnnnnnnnnnnnnnnnnnnnnnnnnnnnnnnnnnnnnnnnnnnnnnnnnnnnnnnnnnnnnnnnnnnnnnnnnnnnnnnnnnnnnnnnnnnnnnnnnnnnnnnnnnnnnnnnnnnnnnnnnnnnnnnnnnnnnnnnnnnnnnnnnnnnnnnnnnnnnnnnnnnnnnnnnnnnnnnnnnnnnnnnnnnnnnnnnnnnnnnnnnnnnnnnnnnnnnnnnnnnnnnnnnnnnnnnnnnnnnnnnnnnnnnnnnnnnnnnnnnnnnnnnnnnnnnnnnnnnnnnnnnnnnnnnnnnnnnnnnnnnnnnnnnnnnnnnnnnnnnnnnnnnnnnnnnnnnnnnnnnnnnnnnnnnnnnnnnnnnnnnnnnnnnnnnnnnnnnnnnnnnnnnnnnnnnnnnnnnnnnnnnnnnnnnnnnnnnnnnnnnnnnnnnnnnnnnnnnnnnnnnnnnnnnnnnnnnnnnnnnnnnnnnnnnnnnnnnnnnnnnnnnnnnnnnnnnnnnnnnnnnnnnnnnnnnnnnnnnnnnnnnnnnnnnnnnnnnnnnnnnnnnnnnnnnnnnnnnnnnnnnnnnnnnnnnnnnnnnnnnnnnnnnnnnnnnnnnnnnnnnnnnnnnnnnnnnnnnnnnnnnnnnnnnnnnnnnnnnnnnnnnnnnnnnnnnnnnnnnnnnnnnnnnnnnnnnnnnnnnnnnnnnnnnnnnnnnnnnnnnnnnnnnnnnnnnnnnnnnnnnnnnnnnnnnnnnnnnnnnnnnnnnnnnnnnnnnnnnnnnnnnnnnnnnnnnnnnnnnnnnnnnnnnnnnnnnnnnnnnnnnnnnnnnnnnnnnnnnnnnnnnnnnnnnnnnnnnnnnnnnnnnnnnnnnnnnnnnnnnnnnnnnnnnnnnnnnnnnnnnnnnnnnnnnnnnnnnnnnnnnnnnnnnnnnnnnnnnnnnnnnnnnnnnnnnnnnnnnnnnnnnnnnnnnnnnnnnnnnnnnnnnnnnnnnnnnnnnnnnnnnnnnnnnnnnnnnnnnnnnnnnnnnnnnnnnnnnnnnnnnnnnnnnnnnnnnnnnnnnnnnnnnnnnnnnnnnnnnnnnnnnnnnnnnnnnnnnnnnnnnnnnnnnnnnnnnnnnnnnnnnnnnnnnnnnnnnnnnnnnnnnnnnnnnnnnnnnnnnnnnnnnnnnnnnnnnnnnnnnnnnnnnnnnnnnnnnnnnnnnnnnnnnnnnnnnnnnnnnnnnnnnnnnnnnnnnnnnnnnnnnnnnnnnnnnnnnnnnnnnnnnnnnnnnnnnnnnnnnnnnnnnnnnnnnnnnnnnnnnnnnnnnnnnnnnnnnnnnnnnnnnnnnnnnnnnnnnnnnnnnnnnnnnnnnnnnnnnnnnnnnnnnnnnnnnnnnnnnnnnnnnnnnnnnnnnnnnnnnnnnnnnnnnnnnnnnnnnnnnnnnnnnnnnnnnnnnnnnnnnnnnnnnnnnnnnnnnnnnnnnnnnnnnnnnnnnnnnnnnnnnnnnnnnnnnnnnnnnnnnnnnnnnnnnnnnnnnnnnnnnnnnnnnnnnnnnnnnnnnnnnnnnnnnnnnnnnnnnnnnnnnnnnnnnnnnnnnnnnnnnnnnnnnnnnnnnnnnnnnnnnnnnnnnnnnnnnnnnnnnnnnnnnnnnnnnnnnnnnnnnnnnnnnnnnnnnnnnnnnnnnnnnnnnnnnnnnnnnnnnnnnnnnnnnnnnnnnnnnnnnnnnnnnnnnnnnnnnnnnnnnnnnnnnnnnnnnnnnnnnnnnnnnnnnnnnnnnnnnnnnnnnnnnnnnnnnnnnnnnnnnnnnnnnnnnnnnnnnnnnnnnnnnnnnnnnnnnnnnnnnnnnnnnnnnnnnnnnnnnnnnnnnnnnnnnnnnnnnnnnnnnnnnnnnnnnnnnnnnnnnnnnnnnnnnnnnnnnnnnnnnnnnnnnnnnnnnnnnnnnnnnnnnnnnnnnnnnnnnnnnnnnnnnnnnnnnnnnnnnnnnnnnnnnnnnnnnnnnnnnnnnnnnnnnnnnnnnnnnnnnnnnnnnnnnnnnnnnnnnnnnnnnnnnnnnnnnnnnnnnnnnnnnnnnnnnnnnnnnnnnnnnnnnnnnnnnnnnnnnnnnnnnnnnnnnnnnnnnnnnnnnnnnnnnnnnnnnnnnnnnnnnnnnnnnnnnnnnnnnnnnnnnnnnnnnnnnnnnnnnnnnnnnnnnnnnnnnnnnnnnnnnnnnnnnnnnnnnnnnnnnnnnnnnnnnnnnnnnnnnnnnnnnnnnnnnnnnnnnnnnnnnnnnnnnnnnnnnnnnnnnnnnnnnnnnnnnnnnnnnnnnnnnnnnnnnnnnnnnnnnnnnnnnnnnnnnnnnnnnnnnnnnnnnnnnnnnnnnnnnnnnnnnnnnnnnnnnnnnnnnnnnnnnnnnnnnnnnnnnnnnnnnnnnnnnnnnnnnnnnnnnnnnnnnnnnnnnnnnnnnnnnnnnnnnnnnnnnnnnnnnnnnnnnnnnnnnnnnnnnnnnnnnnnnnnnnnnnnnnnnnnnnnnnnnnnnnnnnnnnnnnnnnnnnnnnnnnnnnnnnnnnnnnnnnnnnnnnnnnnnnnnnnnnnnnnnnnnnnnnnnnnnnnnnnnnnnnnnnnnnnnnnnnnnnnnnnnnnnnnnnnnnnnnnnnnnnnnnnnnnnnnnnnnnnnnnnnnnnnnnnnnnnnnnnnnnnnnnnnnnnnnnnnnnnnnnnnnnnnnnnnnnnnnnnnnnnnnnnnnnnnnnnnnnnnnnnnnnnnnnnnnnnnnnnnnnnnnnnnnnnnnnnnnnnnnnnnnnnnnnnnnnnnnnnnnnnnnnnnnnnnnnnnnnnnnnnnnnnnnnnnnnnnnnnnnnnnnnnnnnnnnnnnnnnnnnnnnnnnnnnnnnnnnnnnnnnnnnnnnnnnnnnnnnnnnnnnnnnnnnnnnnnnnnnnnnnnnnnnnnnnnnnnnnnnnnnnnnnnnnnnnnnnnnnnnnnnnnnnnnnnnnnnnnnnnnnnnnnnnnnnnnnnnnnnnnnnnnnnnnnnnnnnnnnnnnnnnnnnnnnnnnnnnnnnnnnnnnnnnnnnnnnnnnnnnnnnnnnnnnnnnnnnnnnnnnnnnnnnnnnnnnnnnnnnnnnnnnnnnnnnnnnnnnnnnnnnnnnnnnnnnnnnnnnnnnnnnnnnnnnnnnnnnnnnnnnnnnnnnnnnnnnnnnnnnnnnnnnnnnnnnnnnnnnnnnnnnnnnnnnnnnnnnnnnnnnnnnnnnnnnnnnnnnnnnnnnnnnnnnnnnnnnnnnnnnnnnnnnnnnnnnnnnnnnnnnnnnnnnnnnnnnnnnnnnnnnnnnnnnnnnnnnnnnnnnnnnnnnnnnnnnnnnnnnnnnnnnnnnnnnnnnnnnnnnnnnnnnnnnnnnnnnnnnnnnnnnnnnnnnnnnnnnnnnnnnnnnnnnnnnnnnnnnnnnnnnnnnnnnnnnnnnnnnnnnnnnnnnnnnnnnnnnnnnnnnnnnnnnnnnnnnnnnnnnnnnnnnnnnnnnnnnnnnnnnnnnnnnnnnnnnnnnnnnnnnnnnnnnnnnnnnnnnnnnnnnnnnnnnnnnnnnnnnnnnnnnnnnnnnnnnnnnnnnnnnnnnnnnnnnnnnnnnnnnnnnnnnnnnnnnnnnnnnnnnnnnnnnnnnnnnnnnnnnnnnnnnnnnnnnnnnnnnnnnnnnnnnnnnnnnnnnnnnnnnnnnnnnnnnnnnnnnnnnnnnnnnnnnnnnnnnnnnnnnnnnnnnnnnnnnnnnnnnnnnnnnnnnnnnnnnnnnnnnnnnnnnnnnnnnnnnnnnnnnnnnnnnnnnnnnnnnnnnnnnnnnnnnnnnnnnnnnnnnnnnnnnnnnnnnnnnnnnnnnnnnnnnnnnnnnnnnnnnnnnnnnnnnnnnnnnnnnnnnnnnnnnnnnnnnnnnnnnnnnnnnnnnnnnnnnnnnnnnnnnnnnnnnnnnnnnnnnnnnnnnnnnnnnnnnnnnnnnnnnnnnnnnnnnnnnnnnnnnnnnnnnnnnnnnnnnnnnnnnnnnnnnnnnnnnnnnnnnnnnnnnnnnnnnnnnnnnnnnnnnnnnnnnnnnnnnnnnnnnnnnnnnnnnnnnnnnnnnnnnnnnnnnnnnnnnnnnnnnnnnnnnnnnnnnnnnnnnnnnnnnnnnnnnnnnnnnnnnnnnnnnnnnnnnnnnnnnnnnnnnnnnnnnnnnnnnnnnnnnnnnnnnnnnnnnnnnnnnnnnnnnnnnnnnnnnnnnnnnnnnnnnnnnnnnnnnnnnnnnnnnnnnnnnnnnnnnnnnnnnnnnnnnnnnnnnnnnnnnnnnnnnnnnnnnnnnnnnnnnnnnnnnnnnnnnnnnnnnnnnnnnnnnnnnnnnnnnnnnnnnnnnnnnnnnnnnnnnnnnnnnnnnnnnnnnnnnnnnnnnnnnnnnnnnnnnnnnnnnnnnnnnnnnnnnnnnnnnnnnnnnnnnnnnnnnnnnnnnnnnnnnnnnnnnnnnnnnnnnnnnnnnnnnnnnnnnnnnnnnnnnnnnnnnnnnnnnnnnnnnnnnnnnnnnnnnnnnnnnnnnnnnnnnnnnnnnnnnnnnnnnnnnnnnnnnnnnnnnnnnnnnnnnnnnnnnnnnnnnnnnnnnnnnnnnnnnnnnnnnnnnnnnnnnnnnnnnnnnnnnnnnnnnnnnnnnnnnnnnnnnnnnnnnnnnnnnnnnnnnnnnnnnnnnnnnnnnnnnnnnnnnnnnnnnnnnnnnnnnnnnnnnnnnnnnnnnnnnnnnnnnnnnnnnnnnnnnnnnnnnnnnnnnnnnnnnnnnnnnnnnnnnnnnnnnnnnnnnnnnnnnnnnnnnnnnnnnnnnnnnnnnnnnnnnnnnnnnnnnnnnnnnnnnnnnnnnnnnnnnnnnnnnnnnnnnnnnnnnnnnnnnnnnnnnnnnnnnnnnnnnnnnnnnnnnnnnnnnnnnnnnnnnnnnnnnnnnnnnnnnnnnnnnnnnnnnnnnnnnnnnnnnnnnnnnnnnnnnnnnnnnnnnnnnnnnnnnnnnnnnnnnnnnnnnnnnnnnnnnnnnnnnnnnnnnnnnnnnnnnnnnnnnnnnnnnnnnnnnnnnnnnnnnnnnnnnnnnnnnnnnnnnnnnnnnnnnnnnnnnnnnnnnnnnnnnnnnnnnnnnnnnnnnnnnnnnnnnnnnnnnnnnnnnnnnnnnnnnnnnnnnnnnnnnnnnnnnnnnnnnnnnnnnnnnnnnnnnnnnnnnnnnnnnnnnnnnnnnnnnnnnnnnnnnnnnnnnnnnnnnnnnnnnnnnnnnnnnnnnnnnnnnnnnnnnnnnnnnnnnnnnnnnnnnnnnnnnnnnnnnnnnnnnnnnnnnnnnnnnnnnnnnnnnnnnnnnnnnnnnnnnnnnnnnnnnnnnnnnnnnnnnnnnnnnnnnnnnnnnnnnnnnnnnnnnnnnnnnnnnnnnnnnnnnnnnnnnnnnnnnnnnnnnnnnnnnnnnnnnnnnnnnnnnnnnnnnnnnnnnnnnnnnnnnnnnnnnnnnnnnnnnnnnnnnnnnnnnnnnnnnnnnnnnnnnnnnnnnnnnnnnnnnnnnnnnnnnnnnnnnnnnnnnnnnnnnnnnnnnnnnnnnnnnnnnnnnnnnnnnnnnnnnnnnnnnnnnnnnnnnnnnnnnnnnnnnnnnnnnnnnnnnnnnnnnnnnnnnnnnnnnnnnnnnnnnnnnnnnnnnnnnnnnnnnnnnnnnnnnnnnnnnnnnnnnnnnnnnnnnnnnnnnnnnnnnnnnnnnnnnnnnnnnnnnnnnnnnnnnnnnnnnnnnnnnnnnnnnnnnnnnnnnnnnnnnnnnnnnnnnnnnnnnnnnnnnnnnnnnnnnnnnnnnnnnnnnnnnnnnnnnnnnnnnnnnnnnnnnnnnnnnnnnnnnnnnnnnnnnnnnnnnnnnnnnnnnnnnnnnnnnnnnnnnnnnnnnnnnnnnnnnnnnnnnnnnnnnnnnnnnnnnnnnnnnnnnnnnnnnnnnnnnnnnnnnnnnnnnnnnnnnnnnnnnnnnnnnnnnnnnnnnnnnnnnnnnnnnnnnnnnnnnnnnnnnnnnnnnnnnnnnnnnnnnnnnnnnnnnnnnnnnnnnnnnnnnnnnnnnnnnnnnnnnnnnnnnnnnnnnnnnnnnnnnnnnnnnnnnnnnnnnnnnnnnnnnnnnnnnnnnnnnnnnnnnnnnnnnnnnnnnnnnnnnnnnnnnnnnnnnnnnnnnnnnnnnnnnnnnnnnnnnnnnnnnnnnnnnnnnnnnnnnnnnnnnnnnnnnnnnnnnnnnnnnnnnnnnnnnnnnnnnnnnnnnnnnnnnnnnnnnnnnnnnnnnnnnnnnnnnnnnnnnnnnnnnnnnnnnnnnnnnnnnnnnnnnnnnnnnnnnnnnnnnnnnnnnnnnnnnnnnnnnnnnnnnnnnnnnnnnnnnnnnnnnnnnnnnnnnnnnnnnnnnnnnnnnnnnnnnnnnnnnnnnnnnnnnnnnnnnnnnnnnnnnnnnnnnnnnnnnnnnnnnnnnnnnnnnnnnnnnnnnnnnnnnnnnnnnnnnnnnnnnnnnnnnnnnnnnnnnnnnnnnnnnnnnnnnnnnnnnnnnnnnnnnnnnnnnnnnnnnnnnnnnnnnnnnnnnnnnnnnnnnnnnnnnnnnnnnnnnnnnnnnnnnnnnnnnnnnnnnnnnnnnnnnnnnnnnnnnnnnnnnnnnnnnnnnnnnnnnnnnnnnnnnnnnnnnnnnnnnnnnnnnnnnnnnnnnnnnnnnnnnnnnnnnnnnnnnnnnnnnnnnnnnnnnnnnnnnnnnnnnnnnnnnnnnnnnnnnnnnnnnnnnnnnnnnnnnnnnnnnnnnnnnnnnnnnnnnnnnnnnnnnnnnnnnnnnnnnnnnnnnnnnnnnnnnnnnnnnnnnnnnnnnnnnnnnnnnnnnnnnnnnnnnnnnnnnnnnnnnnnnnnnnnnnnnnnnnnnnnnnnnnnnnnnnnnnnnnnnnnnnnnnnnnnnnnnnnnnnnnnnnnnnnnnnnnnnnnnnnnnnnnnnnnnnnnnnnnnnnnnnnnnnnnnnnnnnnnnnnnnnnnnnnnnnnnnnnnnnnnnnnnnnnnnnnnnnnnnnnnnnnnnnnnnnnnnnnnnnnnnnnnnnnnnnnnnnnnnnnnnnnnnnnnnnnnnnnnnnnnnnnnnnnnnnnnnnnnnnnnnnnnnnnnnnnnnnnnnnnnnnnnnnnnnnnnnnnnnnnnnnnnnnnnnnnnnnnnnnnnnnnnnnnnnnnnnnnnnnnnnnnnnnnnnnnnnnnnnnnnnnnnnnnnnnnnnnnnnnnnnnnnnnnnnnnnnnnnnnnnnnnnnnnnnnnnnnnnnnnnnnnnnnnnnnnnnnnnnnnnnnnnnnnnnnnnnnnnnnnnnnnnnnnnnnnnnnnnnnnnnnnnnnnnnnnnnnnnnnnnnnnnnnnnnnnnnnnnnnnnnnnnnnnnnnnnnnnnnnnnnnnnnnnnnnnnnnnnnnnnnnnnnnnnnnnnnnnnnnnnnnnnnnnnnnnnnnnnnnnnnnnnnnnnnnnnnnnnnnnnnnnnnnnnnnnnnnnnnnnnnnnnnnnnnnnnnnnnnnnnnnnnnnnnnnnnnnnnnnnnnnnnnnnnnnnnnnnnnnnnnnnnnnnnnnnnnnnnnnnnnnnnnnnnnnnnnnnnnnnnnnnnnnnnnnnnnnnnnnnnnnnnnnnnnnnnnnnnnnnnnnnnnnnnnnnnnnnnnnnnnnnnnnnnnnnnnnnnnnnnnnnnnnnnnnnnnnnnnnnnnnnnnnnnnnnnnnnnnnnnnnnnnnnnnnnnnnnnnnnnnnnnnnnnnnnnnnnnnnnnnnnnnnnnnnnnnnnnnnnnnnnnnnnnnnnnnnnnnnnnnnnnnnnnnnnnnnnnnnnnnnnnnnnnnnnnnnnnnnnnnnnnnnnnnnnnnnnnnnnnnnnnnnnnnnnnnnnnnnnnnnnnnnnngatacaggattacgtgcgcaaagcccccaaccgtccccgcatcttcaccatcgggctgggacgcaacgccgacgaggaactgataaagtccctgccccggcttaccggcggcgaaagtgagttcgcttatcccggcgaaaggctggagcccgtcatcggcaggcatctggcacgcatggacaatcccgtcgtcaccagcctcagcctgaattggggcgggcaaagccaacaactggacagccagtgcatttgcctgatccccaacgaaccgctgtattttatggagcatctggataggcagccggaaggcaaagtaagcctggtggcaagcctggcggatggcactaccctctctctggaaagcggggagttgcagccctgtccccagtcccacggcggcttgccgcagctctatgccaaacaccggcttcagaacccaggccggacaccctccggttcgcggcaaagaatgagatccagccgtgacattgccacggaaatcgccgtcaaataccagatcctgagcgagtttaccagctttgtggtgagcgatccccgccgtaacgaatccctcaagggaggcatcgaactgcgccgggtgcctgtggtggccactttggcatatcatgcggaacggatatgtgcgtgcgcctatccccccacagaatcagtcatgttttataacacgctattggataaccagaactctctcagttctaaagaagatgatcctatccttagcaggttggtgcttacgcaaacggcaaacggctactgggataaatcccaattactgcgcctggtattgggaaacaataaaataaaatccaaagacgtcgccgatcggctcgctctgacaggcaagttcaaaccggcagtcgccaaaaggatcggcatcaccctggttgtggtctattacctggaatacttcgccatgatttcgagtgaggaatatcaaaccatgctggataaggctaaggagtggctggcaaaaaataaaatccagccagaacagtaccgggaaaagatttgcaggctgttcttagattagatatacctcgttccgggcaaacggaggctacaggcgtagtctccgttttttgcgccagggctgcgagccgccatcttatgccgctgtcgcgagaagctgctcccaccgtctggagtgcaaatccaggccccggtattcgttttggatggtgtcccaggcaagctgctggaggaggttagccgtggcggcgtcgatctgtggggggaaatacctgttgcccacagggttgacgttccagatgcgggccagcatcaggcaggctaccaagtaggtgccatagatgctggggtggtagttgtccgcttcatagagatttggcatgccggggatggaatcggcgttgtgccacgccactcctgccggcaccacgggggcatccagccaggctccgatgtagcggtaggcgtctctgatcggcacatacatttccgggttgttgcgccaggcccaggtcatgtagaaaccggtgagggcgcccgcctggtggatcagggtgttcagcgaatcggcatagctgtaaaagagttccggattcagcatggggcggctgctctgttcctggaggatcaccaggtcccaatctcccgtggcgatggtgctgagggtgttctgatcgtgataatggttttccagggtgtatccgccactggttctggcatccaccaccacattccattcgggatgcgccatgtcgatcagggcttgcaagtgagtatccaccccatcgttgaagtaggtgtggctgtttcccaccaggaggacgcggcggctgtcttcatagggaagcccccaccccacaaccacttccaggcctccgggaacaaactgcagggtgatgtgcaccgtggtggtctgagagggtgagaccagtccgctgccctggccggtggcgatcagggtgaggccgtcaaagacctgtacatcgatggcgtaaacgcccggctccaagtcctgcaaagtcccctcagccatattgccgctgatggcgaggtccatgctctggctgtaagtccctttgacgacagtgactgccaccctcgagacgttgaaattgagctgtgccgccgggctgaggtccatgcggatcggcagctcgcccgtctggtcgggaagcgtggaaacagtgttgcagcctgccaaaaacagggctgccagtaagctgaaaatgactaatcttggcattttggctccttgaatgaacggattggttatctatcatgttttcaaggcaatctgtcaagaaaaatccgattccccgcacggcaagatacttgacagaaatggacatttatttataaatgcaattgctcgtacaggatttttccccagcggaacctgacacaatcagttacagaatggagcggaagcatgacagacatagaactttcaatagtcacccaagcagacccggaggcgatcctggccttgtatcgccacgcgggatggtggcaaaccgatgacaatccggagtatctgaggacggtggaaaagataatcgcgaactcccactgcttcgcgatcgccgcccacggctccaggatcatcggcatgggcagggcaatcagcgacagggtgagcgacgcctacatccaggacgtgacggtacacagcgactaccgcggccggggcatcggcaaggccatcgtgcgcaaactgctcgaacgcctgcgcggggacggaatgcagtggataggcctgatcagcgaaccgggctacgacaggttttacgaagggctgggctttgcccggatggagggatacacgccgttcctgttgaagcaggactaagcgcgcgacacagtatgctaaagctcgagcctcttaccactgcccagattcccctcctgcgcgagttcctcagccgctatccgcgccagtcctgcgactacaacatctgcaacctcctaagctggggcaaaatctacaacaaccaatacacgctctgggaaggccatctggtactggtcaatccgcaatactcctatctgctctacccggtgggaccgggcttgggcgcggacaagacgagggaactttttgacctctaccgcgaggacgctccggaggcgaaactgctgatcatcccggagaactggcaggaaagctgcccgggcctggacaggcactttgagatcagcgacgacagggactggtatgactacgtctatgcgacggagaaaatggtgaacctgagaggcaaaaagctgaccaagaagaaaaacctgatctcccagttccggcgtgcctatccgaactatcatgtgctgccgataagcaaggaaaaacacgaggtgatcgagcgcttcaccgaaaaatggcgccgcgagaggcacgttgaaggcagctatctggacaccgagatgaaagccatccaaaacacccttgagatgtgggacgaactgcccgtggagggaataatcgtctgcctggaccaaaggatcgccgcctattccatcttcagcccgcagacgcaggacatggtgacggtacacttcgagaagtttgatcccgacaaaaagggcagcgcccagctaatctattgggaaaccgcccgctatctgcaatcccgctacaaatggataaaccgcgagcaggacatcggcctcgagggtttgaggcaagccaagaccagctatgcgccggactttatggtcaagttcctcgtgggaatagcaaagtaagcagccacccgattcccacgcatcccgccagggaaagcaggaaggcggctatccgcttggggcgcggattgtaaaaaagctgcaaacccaccggcagcagatcgtgggcctgccagcggacggtgtattttttcagctccggatggggtttgatacggttcagcttcctgagataggaaatatgcttctgatggtaattccggctggcaatgccgccattcaggtcgtagtagctgaaaccccggtaatcgaactcacccagcctggccagcaagcccgcgtatcccgcttcaaaaagcctgtgagcctcttcctgcccggtgattttgtatgtgtcccaaaggcaaagcaggatcgccaacatcccgttgagcacaaagggttgcccctcgccgggatactcctgaaaccagagggagccatccggcaagcgcctcgtcaggctgcttccgggcgcgagggtgcgcatcgccatgacgctgttttgcagccagtcgtcctgggcggtcagttcatagcgccgggcaaaggcaagcatgcttctggcctgggccagggcgctgcaccagggcgcgcgcagccccagcctgggcaggtcgaagcgatagggaagccacagcctgccctcttccacctcggagtgttccagcagccaatcggtgagcttcagaaagcttgcgcgcctggcgggatccttcctgcgctggtagtcgcgattggcctgtgccgccacgaagaggggattgtattgcaagcccagatcccggtaaagctggatgggaatgccccgctcatcgaatctgcgagtctggttcaggggcctgccagtcagcaatgtgaccgccctttccccccaggcctgcattttgggctcggcaacctgccagatgagagcgtgggcgacgactgtccagaggcgcggatcgctcagcatctatccctccggaaagccctgggaagcaggctcagcaaaaacatgacaaactccagcaccacaacgctcgcccccgtgggcaggttcagccaccaggaaagggcgaagccgccaaaggaagccagcagcgaaaagacaacgcagaaaaccagggccctgtccaaacggtcaaccagattgaacgccgccgccgcgggcaggatcagttgggcgctcaccaggatgatgcccgccgcccgcacgttgatcacgatgttcaccgccagcaggatcatgaacaggcggttgaccaagccggcatgcaggcggtaaaaccttgccagttctggattgtaggaatagtaaaagagttctttgtagaatcccaggataaagatcaggttcagcacggccgccgcgcccagcagccacagatcggtggaattggcaagcagcacgttgccaaacagataactggccagatcgaaggtgtagcccttgttgagcgagatcaggatgatgccgatggccatggaaacgctcaggaagatggtgatggcgttggcctcctccagcctctggcggcgcgagagccaactgattgccaggctcacccccaccacaaccagcatggcggtgaactgcatattccagcctgccagaatcgccagcgcgatgcccgcaaaggcgatgtgggaaagcgcttcgcccatgtaggaaatccgccgcagggtcacaaagggcgaaaaaagcgccagcgagagcgaggagagcgaggcagccgccagagcgcggatcagaaaggaatattccagcatcagtagtccttgtcgatcagtttcaccgcttcgccgaaggttttgcggatgatctcggcgttcaccagttcggtcttgctgtggcagtgcagttttcggttgaggcagatcagcgagctgcagtgttcggaaagcgtgtgcaggtcgtgggagatggtgatgatggtcttgcctgccttgttcagatcgtgcagcaaagcgaagaagctctgcaccccgggacggtcaaccgaggcttcaggctcgtccaggatcagatagttgctgcgcgagaccagcgcccgcgccagcagcaccctctgcaactgccccccggaaaggcttcccaggcgtttggacgccagctccgccgtgctggtggtttccagggctgccagggcgcgctcccgctgggattttgtgaatctgcctcccaagggcagttccgccgccaatcccatcagcacgatgtccagcgcggaagccggaaaaccgcggtcaaactcttccctttgaggcagatagcccatcgggttgtgccgcagccagtccagatgcgcctcaccatcgatgtggatggtgccgctctgcacgggcagcaaacccaggatcagcctgatcagggtggactttcccgccccgttggggccgattatggccacaaactccccccgcgtgatctgtaagtctatgtcttccagaatcaggctgttgccgaagcgatggctgagcccccgcacctcgatcatcatatccccctcatatcaatccttaccttttgcttgggacaaccttaggtcaaccttataatttataaggaatacctaaggatgtctcctcccggggttaaggacgcgaagtagggccgaatgggaaggcaggcggaaaaaggcggaaacatcattcccaacccagctttaacccctcccagttgttgaggataacgtccatgatgctcttgggtttgaagctgtgccccagcggatccagttgcacgatggagaggtcgaactcactggccagggcgcgcgccgctttgtcgctcatctggacttcggtgtaaacggctttgagattgtggctcttgaccagcgagccgatgcgagccagctcccggggagtgggttccttgccaggggagctttgcacggtgcccagatcctcgatgtcgtaatccttgagcagatagtggaagctgtcgtgccaggtgaccaccggagtgcgggtgaaagtgctccgttcgctctgcatgcgctgatgcagggcggcgaggtcggagatcaggcgtcccgtgttttcgctgatggtggttttcaggtggggaaaacgcgtctgcaactgatcggagaggatcagggtgatgtgggtcagcagccggggcgagagccagatatgcggattggtatcatcggcgggaatgacgtgctgccgccggagctgatcctcgatcttcacatgcctgtcgcccaaggcgtcaaaagcctgccccagattggtttccaggccaaagccgttggatactgcgagggccgccccgttcaaggcacgcagcccggcgggcttggggctgaaggtatggggcgagctgttgggcggaatgagggtgaccacgttcaggctgtcgccggtcagttgcctcaccagtaattcatagggatagatcgagaccaccacggtctcccgctcgttccggggcgagccggaacaggccaggagagccagtagcgccagcgatcccaacagtagcggcaagattctgcgcatgggcttactccagttcacgcagcagttgggtcagcaaacgcactcccaccccggtggccccgtaggtgttgatgccgctttccctgtccttgtgcgcggttccggcgatatcgatgtgcagccagggtttcttgtccacaaactcgcggatgaacagaccggcagtgatcgctccagccagaggcccgccgctgtttttgaggtcggcgatgtcgcttttgatcagatccagatattcttcatgggagggcagttgccagatcagttctccggtgaagtcggccgcgtgtttcgccttgttcagcaaggcgtcgttgttgctcatcaccatcgaaatctgattgcccaaagctcccacggcggctccggtgagggtggcgatgtcgatgaccttggagacgcgttccttgctgaccgcgtaatggatggcgtccaccagggtcaggcggccttcggcgtcggtgttgttgacctcgatggtcttgccagccatgctgcggatcacgtctccggcgtggtaggcgtggccggagaccatgttttcacaggcggcgatcacgccaaagacgtttaccttcagcttgagggtggaaatggccacaaaggtgcccagcacggccgcggctcccgccatgtctgttttcatgttcaccatgccctgggggcttttgaggcagtatccaccgctgtcgtaggtgagccctttgccgatcaggccgatgcttttgctgcgggaatcgggattgccgtggtaggacatcaggatcaggcgcggttcggcggcggaacccctggctacggcaaggaaggcgtccatcttgatgcgtctcagcttgtccgggccaaagacatcgatggaaaaaccgtgtttcagagccagcttgcgggctgtctccgccagtgtatcgggattgaccacgttggcaggttcgttcaccagatcgcgggccagattggtggcgtcggcaaagatgcggccttcaaggatgccgcggttgatgtggcgggtggtcttgagctccatcaccagatgcaccgcttccaggccgcaggtttcggcgtccgcctggtatttgttgaatttatactcggccagcagggcggattccgccagaatgtggccaaactgcacatctcccaggggattggcaaaggcggggaagagatacacttccctgccattcagcttcatcaccgcgcgcagggcgttggcaaacagggttctcagtttcgcgccgttcaactccttggcgttgcccactccgcagagcaccacgttgttgcagtgcttgggcagcacgatgggaaagctgcggattctgttgaactcaaatttgaattcgttttgtttaagatagagctggatcgcctgtctgatattctccggcaggtattcgacactgtccaggtcgcctttttcgtctatcatcacgatcacgctttccatgtgttcggtaagcttgcgtaacaagtcgattttcatcgtttctcctcgtttatatcttaacttatttaaaaatcttcacttaagctcaggtaataggtgggctttgaggttttggaaagatcggtctgccaggcgatgtcgaagcgcaaaaccacatagcccaggttgagtcgcggcccgaagccatagcccagtttgaggtcatccagcctgccgtcctccgtggtggcgttgaagtctgagaaattgtcgaacaccgtgcccaggtcggcaaagaggctgccgcggatgttggggatgttgagcgggatcgggaaggcgaggttgatgtattcaaaaaagggaaagcgaagttcggcgctcagcagggcctttttgtagccgctgaggttatcccggtaagcccgcaccccatagtagccgctgaggttgaagcgctggggctcctttcccgtactcactccggcaatagcgcgcaaagcgatggcatagcgccggctgaacagggtgtagctgcgcagatcgatgtagttggtgaagtattccacccttccgtcggcgagggtggcgctcacgttatacaggctcctccaacccacaagcggcccggtggagccatagagggcgttgtcgtgcaccagcgaaagaccgggagtgtaaacaagatcctggctgaggctcacctcctcgctcagctcgtagccctccacatagggcgcccaggacaggtattgcccgcgctgatagagcatgtggtcaaactccagccgggtgaagcgcgtgaagggatagcgcagcagcatgtagaggccgctcttgcgttcccggtagcgcaacaaattgttggggaggtaattctcgtccagatagtaggcgtcgtccacgaggttgtagattccgaccccgtagtccatcctgtgcttcaaatacatataggtgagcagcaggttcgactcctccagcttgcccgccacgccgacgttcgcgccgatgccgtggttccccatgatgtcgctgaggccaagctccacatagccgattgttcccacggcggaggaataggccaggccaccccagatgctgtccaaagagaagcggggcttgtatccgcctattgtgggaggattgtctttgctggtggggcggtcgtcatagctgtaatcccgggtgagaaacagggaatcctcgcgggtaagttcaaaggggcggtattccccgctgagggggaagcgttcgtcatactggcgggcggggttgatcctgggcagaggagcgggtttgcgcttgccaaagtagtccagttgccccaaatccacccctgccatgaggtcgggagaggggacggaaagctgttgcgcggtgctgtcgctccaggccaggtttttcaggggatcgtgggcaaagtagatgttccacgccttgtcgaaatagttggaaaccagcaaatagcggttatcaggggagatatccgccgcaaagacccccgccagcacatcggtcaccttcgcctgggcggagctttgcagatcaagggcgtggagattgttgaccttgtcctcataggtgaggtagagcagtttgtcgccgctgccgtcaaacatgggccagctacagtccctgatcctgaaagtcaactgccggggctcccctccatccagatccaggctgtagatattggccaccacattggcaaagaagcccttgcgctgggattccgggttgaggctgcgctccgaggaaaagacgatcgtctgcccatcgggggaaaacctgggctgggcgtcgttgaaatagtcatccgtcaactgcctggtctgcctggtctccaggtcatggagatagatgtcgcagcgcatttcccgctgtccggcaaagaccagcttctgcccatcgggagccacgtccagttcatagatcgcgtcaaattccggcagtttgaccgtctgcacgatctttcccctgtccacgtccaggatgtggatctggtcgccccaggaggtcttggcggaaaaagccacccgtttgccatctggaaaccagctcaggttggagcggaagtaatagaattcctcggctttgccggtggcctcaccggtgaatatcttctttgccctgtccatttcatggatgccagccatccacacgctgtatctcgccccggcggtggaaaaatagacgtagcggtctcccttgggggaaaagcggggcatgaagttgaagtaggagccatccttatcggagcgggtgcgctgctccatcgcttcctggggcactccatggtcgttgacgcggggatagaagtcccgtttcaactgaaagcgccagcgggattccaggctctcgaaatcgatgccaaagactttcttggttgccgcgtccatattgtgtgaggagtggatggtgaaatagtattccgacaccttttcccggccataggtcttggcgatgtaggccagaaagctctcccccagccggtaggcaaaatagccgtccgaactgcccagtggcaccaggtagtcgttgaccaccatatccaggatgaacatgttgttatagtcgttttcgccgccaatggagaggaattccggcagtccttccgaaaaccagaagggaaaggacacaggccggagggacagataggagttgatcatgcctttgtccaaagcgttggcgtaggcatgggtgagctcgtgggcaatcaggtcttccaggttgcggtaactgccgtcgaaggggatcaccacccggttgcgcaggctctcggtgaatcctcccacgccttccgtgaggaggggatagatgatattggtgctctgaaactggctcttgctgcggtaaaagatgatcgggatgcgggacgagatgggatatttgaggtcagcccgcaggttgtagtaggtctcttccgcgagcagcgccgccaggcggccgaagtcgttctcgccccggggaaagtaaacatcaaagtgcatggtctggagggttgaccacgcctcgggtgtggtgttgaccttgttctggccaaagttgtaagcatggcacaaagcggaaatcagcaggaaaagcagggcgaatcttaatttcatcggcatctttaaaagagactgaatttcacatatttcttgggatgggcgcggatatccagcaccagcgaatcgagattggccaccgagcgcaacagcttgtgatacagggcttcatcgttcagcagcagtcccgcgctgccctgtccgctattcagcgccttgacggtttgggaaaggttggcggaaagcgttttgaggctgtccagggtgccgctcacgttttccagggcctggggagagcgttgcagcaccgtgttgatctgctcctcgttggctttggcgacgcggtttatccgctccgagagcgaatctatcttttgcagggtggccgccagccgcgctttggcatcctgggaaagctcctccactgacctggccgcgctgcccgcatcgtcaagcagagaggaagacttcgcaatcaatccattctcccgcctcagctccgatagcacagcgttgaactctcccagagtggcgttcgccttgcccagcagggccatcactccgctggggtcttcaccccgttgggccttgcccagatcgagcagccccggcccctctccctgggcgatgttgagtaccgttccgcccatcaggctgctgtccgagatgtaaaagaccgcgccctctttgaggccgagcccccggttgacgcgcgccgtcaccaggatgtcgtccccgcgggccgcgatgctcttgatgcgccccacttccatgccccggaacatcgccttgtcgcccacttccagccccatgacgtcggtgaagcccacctgcaggtcttgctgcgaacggatcgaaatgcgcttgctcagccacagatagccaaacacggctattaacagcatgataaccgtgaacagcccaaccttgagctgggtctgatagagcttggaataaaactttgccatcgcgcgtcctcaggtctttagctgtttcttctccgcggcgggaaagaggatgttgttcaggatcagcctgtagccgggagaattcttatggagttccaggatggtttccgggtcgccaaccttgtgctggtaatcctcgggatcgtggcctccgtaaaaggtgaaagtgcccttgccgatgttgccgtggatatacttgacctcattttgccccggcacttccgccaggatgatcacgctctttttcaccttgtccttaaagaacgaggtcgtctgccccaaaaagccgttgataacgttcgtatggcactgggtgagcatggtgggcacggggtcgtatttggcggaaaagtcgaagagctgaaaatagtccgcctccgctcccctcaggcgggagtagtcgctggcgtcgatatcggaaaattcgtattcgtagggattggtcttgagggtaaagttctcgaacgcgaagcagcgctcatagttgagcttgcttttatactggggatcgatgccgtcgccgtcgatgagggcgtccacgatatccacaccccgcgccgccagggcgatgtcgaaggtgtccgtgccggcgcacatggcaaagaggaagccgccggcaatcacaaactcctctatcttctgcgccacggcatgcttgagctgccacaccttggcgtagccgtgtttggcggccattgcctcgttggtgcgcacatcgttctgataccaaggcatgtgccggtaggagccataaaacttgccatactgcccggtgaaatcctcatgatgcagatgcagccagtcataatcggccagtttgccttccagcacctcgtcatcccacacgcggtcgtaatccacctgggcatattccagggcgagggtcacggcgtcatcccagggcagggagttgggcgggatatagatgccgatcttgggttctttctccagcaccacggcttccatattggcgttctggatctccagcatgatggcggccacctgggaggacgacacctgctcgaagcgcaccccccggatgttgcacagcgcggaaatctccggcgcgtccgggatcaggaagctgccgccccggtagttgagcagccactttatcacatgctgctctttgagcgcttcaaaagcgactccataggccttgaggtggttgctctgcgtcagatccatggggatcagaatctcagcccgcaacccggcgctcagcagcaaggccagcagcagcgtcaggagcgtgattcggggcagtcggtgcttatgtatcgtggtcggcattcctttgagttttttcattccgtcaaatttactttgggggtaaccaaaagcctgaaaactatgtatatatgtcaaggattttcttttccgatggagggaatttccggctgtcaacgccatcccaaaatcgcaagtttctctcgcttgggcaaatgggaatcccgctttccgaggcaggtctttttgcctgcacccgcgcttgtccggccgccgcccgggattttgtccttgacataaaaatgcgccattttaagtctggcagcgtcatcgagcgagcaaatctaaacctttggcaggattgctcgccgtcagggtatatccggaaacagatatgccttccagtgtgaaaaggtgacacgcaagcaaactttcatttttcctgcgactggcgcagtgtgtctccctttccaagctgaaaatactaaaaataaataaaggagttgaagatgtttttcactgttgctacacctgaaaatgaaccgatcaaatcttacgcacccggaaccaaagaaagagacgccttgaaggcaaagctgaatgaactcggcagccagttcatcgaaattcccgcgattatcgatggcaaggaagtgttcagcggcaacaccgccgactgcatcgaaccccacaaccacaagcacgccatcggcaaataccacaaatgcggcgaaaaggagatcaacctcgccatccaggcggccgtgaaggcaagcaaggattgggagcagatgtctttctaccatcgctcggccatcttcctgagagccgccgaactgctttccaccaaataccgctatctgttgaacgccgccaccatgctggggcaaagcaaaaacgccttccaggccgaaatcgactccgcctgcgaactgattgacttctggcgtttcaacccctattacgctcaaaagatttacgaacagcagcccctcatctcccccaagggagaatggaacttctcggaataccgcgctttggaaggctttgtcttcgccatcacgcccttcaatttcacctccatcgccggcaaccttcccacagccccggcgctgatgggcaacacggtggtctggaaaccttccggaaccgcggtttacagcggctacttcatcatgaagatattgatggaagcaggactgcccgctggtgtcatcaactttgtccccggctcgggagcccagatgggagacctgatcaccgattccccctacctcgctggcatccatttcacgggaagcacccaggtgttcaaccatatctggaagcgcaccgccaacaacatccacctctacaaatcctatcccagaatcgtgggcgagaccggaggcaaggacttcatcttcgcgcacgcttccgcggacatcaagaccctggcggtggcatccctgcgcggagccttcgagttccaggggcagaagtgcagcgccgcgtcccgcctctacattcccgacagcctctacggcaaatggttcgaggaaatcagcgccatgctcgcgacggtcaagatgggcgaagtccaggatttctcgaatttcgtcaacgccgtgatcgacaaaagcagcttcacaaagataaaggaatacatcgacaaagcccgcaacgcgtctgacgccgagatcgtttggggcggaaagtgcgatgacagcaagggctacttcatcgaaccgaccatcatcaagaccaccaatcccaagtttgtcaccatgcaggaagagatcttcgggccggtgctgactgtctatgcctaccccgaaaaagagttcaccgagaccctcgacctctgcgacaaaacctctccctatggcctcaccggctccattttcgcgcaggacagaaccgcgatctccgtcgcctccgaactgctgaagcatagcgcgggcaacttctacatcaacgacaaacccaccggcgccgtggttggacagcaacctttcggcggagccagatcttccggcaccaacgacaaggcgggatcggccatcaacctctaccgctgggtttcggcaaggtcgatcaaagaaaccttcgttcctgccgacgactaccgctatccctttatgggctaaacataaaccacataaccggagacgggatgattcattcgtcccgtctcttcgttttggcattattcaggcttcccatgtcgccgcaacctgacagcggtgtgaaaatatgctgtttttctaatgccttctgtaccatgcagttagaatctgacagccagacccttgccaattaatgcgcccgcctgaaataaatgccgctcccatttgacgggatgggctaagtctatattttccgtaggtcaaccttataatttataaggatgacctaaggatggtggcagcaaatgcaggagcagcaagggagggcgctatgaaggattatgcagattattgccgttgtttttggtgaatgttatactatattgtttgcgttcttttctgtgatggtgaaaaggtggaaaggttccccaaaataagtccaccaggctacatactgtgtcatcccgggcaagcgcacgcttgacccgggatccagtcttttgaaatggccgtagtaaagtggaactgtgaaatggtgtcgttagcaatgaaatacaacactgcgcaaaacgatttatccgttaatccgtgtaatccgtttcatccgtatgatacttggcatgcaaatcttatacggattgacggatttgacggatttacggattactatggtaaaagaataaggcttttcacccagccccgaaacaagtccaccaggctacatactgtgtcatcccgggaagtcggggccccctctggggtggcttacccgggatccagtcttttaggaacaaagcacaccaagactacaaagcgcgccaggcgaaaattattacttgacagccgctttatgtgcaaatataagtatttcaaatggtccgtaatctaaaaggaggatccgatttgagcaagaaatgtattttggcaatggctttgttctgctttcttggcgcgttgggcgcggcatcataccagggatttgcctggaacgggcttgagccgtcgtcggtcaacatggctctgggtggcagtcctgtgggtgtggtaaaccactggcacaaagaccccctttgcgcttacggcaaccccgctttcgcttccctgggagagggcatcgcgtattcacacacgagctatctgtatatgcacaaaagcgatatactgaaaacggaaaacctggaataccgggctgctttactcgggatgtcgtatcacggtttcgcgctgctgcttccagctttgggaaacagcaacagcgccggagtcgagttgggagagtttgccgtctcggacagcactggcgagcttgtggataacttttccctgaacgaagattcctcgaccctcggtttctcggtgaacctgcccgcggcactggccttgatggcacctggcgtgtttccaagatgcgtcaggcatctggctctgggcgcaaattgggtaagtaacgcgagcgatccacatcccgatcctgataatgagggggttctctttagcttgaagaaagcggaaagcgtcaatctgggactgtctgcctgtctgggcagcacgctccaatccggttttgagctggaatactccttcggagcggcgtatatcaatgcttttgacggcaaggcggaatactcggggcaagcatcccgagatccaatttacaagcgtctgagcgttggcggagctatttcgctaagcgcggaaaatcctcactactcccaagggcacggccttgcctcggcagtccgcaacttgtgcagcggcagagtgttgttaggcgcggcggaggagttcagcgatgacgcgccgcttctgggattcggctgcgaagccggggttttcgacaccatcttcctgcgcgcgggataccaccatgacaaggctggaaacattagcggccaaacctacggctggggcgtcaatctccactatcgcgacctcttttcggtgcgcctgaatcacgcactttttcccaggggcaggctgaggaaccaaaaaaacgcctacgattatggcgtttcggcaaacatcctgggcttgtatcaactgctaagcaaatgacgcgtatccgcgattgaaggaattatgaacaagataatgctatatacatcggcagccatcttgatcctaagctgcctgtcgctcatgagctgtgaacctgccaccaaaccggactcccccgctgcctcggaatgctggctggaaaaggtggaacccaatcccatgcccgagggaggcagttgcgagatagtttgcggggtcaaagacggcctgcaagcaaggttggccatattgaattccgtggggcaggaactgagagactggaacctaacagccggaaccagtttcgtaaactgggacggaaaggacaggcacggcaacatctgcgcgagcggtgtgtactactgcctgataagcaccgggagccatagtatctctctcaagatgttggttgcgcgggcaaagtaaacacccgacctataaacagaccacacccaagctatacagtgtgtgatcccggggcgagcagttcgcgcagatacacgcggataaaaggcgcagattgccacggattgacataaaaggattatttcggggctggctggttgtttccaaaagactggatcccgggtcaaaccaccccaccggatcgttaccgatccggcgaggaccccggtaggccgtgatgacgcggaatattgtcgggtatgatttgttttgtagcttggtggttgtgtttggattggacgcttatccttgtatcctgctttttaattcgtgttaatttgtgtaatttgtggatgattattcaaaaagactggatcacggctttatggcctggtggccgattctttcagcggcgcttgatgatcgcgtccgaaaacttggtcttgaaaagggccgtcctgagcagagccttgaaacctgtgctcaccgagtggaacttcaatgtccctgagcgaaatcccttgtagagcatggggatcagccgccatttcttgcccagatagatgctgaggtaggctttggactggaagcgttccagatccttggggctcatcccttggggctggtaaacgcagtgggtgaggtcatacttttcccagtcgtaatggagcagcctgccttccttttgcagcctgtcaaagacctccgtgccggggaagggcgtgagcagggagatcaccacaatgcccaggggcagggaacggaaaaagcggatgttctgacggatatagcggggatggtcaaattcatcgccgctgcccaggatcatataccagacatggctgatcctgagccggttgagcgtgtccaccgcctttttcacctgggtgctgtcgatctgcttgtgcatcttttccagcacttcgggaacgccgctttccaggccgatggtgatcagcgaacagccgcaggccgccatcctggcaaaaagctcgggatgcttgtagataacgtccacgcggctcatgcagttccagcgaatcttgaggcggcgctcttcaagctggcggcaaaattcgttcacccatctgatatcggcggtgaggttgtcgtcgtgaaaccagaaatccttgtagccccaggaaacgaactcctccagctcggaaatgacagtctccacgggacgctggcggtatttgccgccataaaaggaagagatggagcagaaggaacagcggaaggggcagccgcggctggaaaccagcttgggcgtgaagctgaactccggggccaccagatccatggagatgcggggcaggcggctgaggtcgtccaaaatagcgatgtggccgtcgttgtggtagcggccgtccttgaggaagacgataccggggatttcaggatagcgttcacccttttccagagcagccagaagggcgggaaagacctcctccccctcaccccggcagacatagctgacgccggtctccgccaaaacttcgcggtacatgaaggtggcgtggtgcccgccgatgatggtgggcaggccgggatagttttgcgccagatcgatgaggatttcgcgggcgacgggataggtggcggtcacgcaggaaacgcccaccaagtcaggctgatagcgcctgatatagcggggcagggtctcgcggtcggcaatcaccaccgtggccttgtgcccggcatccctcgccgcggcagccacatagaccaggccctggataatctgatgccccttgcgcaggctttccaggccgctggtgcgcgcgcggggtgaaacaagcaggactcgcatcgttcgatctccctttatattgggtgtttaacccgaccgggagcgaccccgccgcaggggcaggatcactcgaagggcaggaagttaaggaacgcgttgacgtgggcagtggataagaccacccctattatcacgcagacgacgataatcagcttaaaatagtcctgagccttgagcatgctcaccaggctcgggtcgcgggaaaggtaggcggaagcggcgtagaactcttcaccgatgagggtatagtcgcaggtggtgataaagaagggaatctgggtgatggcatcggtggcggcgatctggatggctccggactggtttccggtttcggtcatgagcagggcctcggcgtagaagtagcccatatagaagatggtggcgaccctttcgcgcacggtgattccatttaccgccgcgcagaacgcgaactgggtgtcggaaacgaagaagatgtcgttttggttgtaggcgtcaggcctgcccatttcgctgtaggcggtttggaccatttcctgcgccaaggggacaacaaagtagtccacatggggggagatgagcctgatgtcgtattcagcggtctttttggcgatctggttgaggatcatcatggcagagatggtgcacacatcgcccagggtgccccagccgggaacgaacatgaccgggcgtcccatctcggtggcgcggcccacggcgttgtcaagctcagccaatcccgcgatggggcggatatacaattctttgcggcgggatattgatacggtgtaaaccaccagcgcgagcattacaaacgaagcgatcagggtggcccatttggtgttgtcgaaccagttgcccacgggatagttccaaatctctccaccttcgccggaggctggttcggcgatgttccagaagcccttgccatcggtcatcagcagttgataggcgtagctgcggctgtttctgtccttttcagcccggaagaccttgcgccaggttttgtccgactttgcgtctttggcctgggcgtaggcgggatggttgcgcgcgaaatccagttcggcctgtttgtcccgcaattcctgggctgcctcggaaaggctgtctccgggcgccagcccggctttgagcgcggccagttctttctccaaattggtcagatagggggcaaaatcctgtttgtaaaggggaacccacaaaaccgctccgctgacggggtcctttgccactttgaaattgggttcaagcagcagcctgccggtcttctggtcaaagccgacgatctcgggggtgacggtgtcctcaaaggggatggtgtggtcaaaggcgcgggaaatgccgccgatgcgcatgacggggctgtaatccgaatccagtttgcttttggcaaaaacatcgaagaaatacttgttgagcaactggccgttgagggtgaccccgctgccgttgaaacgcaaggccttggcgtcgtaagtcacatcctgccagaccacctggggatcgaaatccttctctccccgcaggcgaaactcgacgcgcaccctgaagctttggtttttggcgaggccagcgggcagcttgaactttatcacgttgtccagatagtattccgtgaccgtgcccaaggtgtttttggcagtatcctggaaggtaaagcggagcctgtctatctcgtaatgctcgtttttggagagttcgtagttcaccctcagcttgtttttccgggagctggtataggaagcctgcgttatgaaggcaaagggcttgccgaaggaaacgatgaggttgtcacctttgtcgttgaccttgtcaatcacctggaaagccggcacgatgggcagttccgcggagttttttacctgcgcgcttttgcccagggtggctgcctggaaaccgccgtagtccataaagctgagcaccggaatgtagtcctgcaggctggaaggcagattgatgccttccgcggccgcgtccacctggtggtaaaaggtctggctccaatagggaggggtgtgttcaaagagctttatggagccgttttgccaggcggcgtaaaacacgctgtcaggggcggcggcgttcttctgctgttcctgccggtaaagcgggagtaggcttttgggcatcagccagccctgccagaggccgatatcggtggttcccgtgggagggctccattcaaacttgaactgcctggtgtcctggatgtaggtggtggcaaacaccgcgctggaatccggccggttgtcaacggggataacgctgcagacccgggcggcgggagtgcgcctgcctgtctcggtcaccgccaccacgctgtaatagtaggtgtttccaggcagggggttggcatagatgctttcaaactggttaagcttgtagccggcaaagacttccttgccctcttcgccatccttttccacccggcgggagccgttgtagaaaccgcgggcggtgagattgcccagcacgctgtaatggggaagcatggtgctcacgacgttcgcgtccctgggaactgcctggtagaggggactgtccggagcctggtgtttttcctttttcaattttgagggagcagtctcaaactggaccagggggagataatcccggtcgtagaaaaagaggtattcgcccatcacaccctgtttgggatcaacttcgatattgcccagcaggaagaggctgtccggcgaatggccgcgatagacgttgtattggatgatccggtggcttttgtccagaggcttccatctcaggagtactccgctgccatcgtcgtggggcatgtcgagagcttcaaagacctccaccccggcatttgcggaacggccgcggacgcagccgcccatggccagcaggagtgatatcagaactaagaggcagaataaaaagtatcttttcattgctttatcccttggagcattgctggtgtggcatcgacgcctgaacagagtccggggggaagaccgggcttcccccctcatgatctgtgtttatttagttgaatatcgctttgatgacgtcgttgaccaggaactggatacgtccgatcagcagtgagatacgcgccataacggttagtccgaatgacgcgccaaagccaaccatcatgtaccatttgccgatatccacaaacttcccataggcgccggtgtgggctttggaaaagaagaagtagagcaacacggcgatagttccgatgaagatcagcaacaggttgatgttttcgatcggcaccatagcctggcgcatctgcaccagaatgctgttgtgcatggccaagggaacggacgcgcccacccccatcatggaaaaggcgattggatagcgcgaaagccagctgtatttgcgggaaaagcggaacaggtagaaaattccaatgatactgggtatgatcagtatccattggtgtttgaggaagatgggctggacgaagaaggggatgaaggcgcgctcgtaggtgagtaccacggagtagcccagggatatccccaccagcagttgttcggacatctgatagaacggattgtccttgtaaaggaaggagaagatgcagagggtgaagaaggctccaaccaggttgctaaataattcaaaagacattttatcctcccttacttcttttgcgctttggcccggctgatgaagtagccgatgtttccgatgatgataaagagaattatcatgatgtgggccaccgactgggcgttcatgccgatacgggccgtcttgaatttatagatggtgttgtgggtcatgcggttgaggtcgttccaggctgtgtagccaagcttcttctggtcgtcctctttcaccttggtgacgtcgatgaccacgttgttgtcctcctcggtcttgtagctgctcatcaaagcctggacttccggaggatagttggccaggaacctgtcaaactccttctgcgagaaaacagccttggtttgagtggtgatcttgagcagtttctggatggattcgtcctccagaacgtcgctgctgaaggagcggccggggactatcttgttgccttcctcgtcgtaggtgacgcccatggggtcgccgggagcgcggtaagcggcaaagacatccaccagcttctcatattcggcagcgcctttcaagcccgccagcatgccgatgaactgtccggtttgcaggtagggatattcgtccgccgccataacggctgtgacgccgacggcgatgttggtgccgaacttgggcctggcataggtgagccagtagccgcccgccacggagccggaaaactccaccaccaggttcatctcgctgtagttgttgatccctttcataatgggcaggttttccaccttgcgcccttcggcgtcggtgggcaccgccgtggcaatgtcgtcgcccatgccgatgatggttggcatgatcagggcggcggggatatagccaaagttgcagtagtccactccagacttgatgtccggatactcttctttcacggagttcacggcatagtcgatgatgggggctccggtgggcaggaaggaaagcaggaagagcttcacattacgctcgaagcagtggcggatgatcgccacttccatcggatacagttccggcatggtggaagcatcgtgccagaagctgagcaggacagcgcggtcttcccggccggcataggagtctattagctgataggtgttctccgtgggaggagaggtgatgttgtcggagttataggggatcatcaggggaatgacgatcgccagggcgaccacgatgtagatccaccggcggtcgagcttttgcagtctttcaaatagattcattttcacctccgcctttaatctccgcccagatacgagcgttcgatgcccaataggatcttgagggtggtggccacgctgcccagacccacacccagcaggattccgcgcttggacgccagattcggcacgtccaggatccattgggagatatcaggcaggtatttgctgatcttgacgcccagaggcacctgagccagcatcaccactatcgccgccaccagcagcacggtggcttccgcggaacgggcgcggaaagccttgtaggcggcggaagccatataaaaagccagcagagcgaacatcgtggcgctcatcggcatctgcatattttcgaacagccacatatagaggccgcccttctgggttccgccgatgaatccagccaaagccgtgatgatgaaaccggcgaaaaagaagaaactgtattgccatttgggagctttgcggcgaatcttggatgtgtgcatcatgcaaaggctgatcacgcccaagagcatcccgaagggagacatggcacgaatccagggcacatagaaatcgtagtagaatacatcctgcagcagtctgtgcggcacaaagacccacagcacccagacgattcctcccaggatcactatcattaatggtattgtcttcttcatttacgacctcttctatttaatagggaatagttgcattaaacctgtgacctggaagcttgccaaaatgccgcccagaatcacgaagatcagaatcaggaacttgaaatagtcctgggctttcagagtccccagcagcatcggctcgcggttgaggtaggccgaggcggcgtaaagctcttctccgatcagggtgtagtcgcaggtggtgataaagaaaggtatctgcgtgatggcgtccgagccggcgatctgcacggctcccacggtgtttccggtttccgtcatcagcagggcttccgcggcgaaatagcccaggaaaaagttggtggccatgcgttcgcggatcatgatgccgttcacgccagccacataggcaaattgcaccgaggtgagatagaatatgttgtttttatcgtagctgtccggacgccccacggcgtagtgagcctctctcactatctcctgggcgatgggcatgacaatgtagtcgtagcaggggacgatcagcttggtgtcgtattccgcggcttttctggccaccagtcccaggattcccagggaagccagggtggccacatcggaaagaccgccgttacccatacaatacagcatcgggcgtcccatctccgtggcgcggccgatggcgttgtcgatctcctgcaagcccgcgatgggacggatatagagatccttgccttgcttggccagtcgcacgaagaccaccacccccacgccgaagatgatgcaggcgacgagggtgaccagtttgttccagtcgaaccagttggataccgccaggttgtaaatatagtcgccttgggcatccttttcgggataggattcggtgaagaggccgcggccgttggtcttgacgatcatgtaggattgcaggcggctgagcggttcgcggatggaagccacgaagttcattctgccgcggttgccgcggaaagtgagggatttcttgtaatccgggtcattctcgtagatcttgatggtcttggccagactctcgtttttcgctgttaaggcttcaatctgctgttgcaaagcctgcgcctggggattggcagccccgccgggaatagctttcatttccgcttgcttggtggctatttcggccttgttgtccttgatgtcctgccgcatcttatccagttccttcgcggcttcatccttgaacacgctggtacggatggtgcgggaatccttgggatcgtcctgcttgacatatttcaggtcgatctgcgattccaccaaagtcaggttttgaaccttttcgccagccttcagcttgcgggtgtagcgctcgccgcccatataggtgtaaagcgtgccgcccttcacaaagttgaagcccagcacgggcttgcccacgttggcaacgtaagggatggtgacatccaggctattatcgtaggaagtgttctttttcaccagggtaaactgcgagccgctgaatgttttacggaacaccgtattgtgcacggaggaaacatccactccattcctgaagagttcgttggaaggcatcagcgacatcatctggttgtcccagacaaggttttgctccaacacatagttgggtaccaaacggcctttctgatatgtgatccgcccgtttttggggttgatctcgtaagggctggtgttcatcgtgatgcgcaccttgaggcccttgttcagatcatagcccttgggcagggtgaccttgatgatgttgtcctgatagaattcgttcaccctggcaaagggcttgtccgaaccgggaaccagcagttcaaagtagatattgttgaccttctgcacgtcggtcttgttaagctggtaattgatcttcagcctggtgccgccctttcctgccagaccgagcttcgcgaacaggcctttgttaccgttctcgcgtttgataatggaggtcttgctgatgaatactatcggttcgttccaaacgactgtgagcctgtcgcccttgtcgttgggtttgtcttccaccacaaactgtgctgcctggggcagcttgctgctgtccgaaagaactacacaggcttggcgggacaagggggaggggttgtttctgtaatcataaaactggatcgcgtaacggctggtggaagcccgttcccaactcaagccggctggcaattcgtcatgtttgaccgccgcgtagtttttgaacgcgcctccattgatttgaccctgggctacaggcagcgcgttggccatggcctggggcgtgcccttgatcttgcaccattgcgaatccggcatctcgggcacagccatgatctggtagaaggcgaggtcggatttgttgaccggatactcccactcaaagcgcagcgtcatgctgtcttgcaaagcggtgcaatagagattgggagaagcctcgggcgcgtcatccacgggaaatccgcacttgggttcggcaattcccagatactggttgcgctcattcaccggaaccacggtatagtaatacaaaatcttgtcttcttcgctggcaggatcgtaggtcttcagggaagcagagatgctctgctggttgattttcacgccagaatagacggtcttgtcttccgaatcggcggaaaaagctttcttcgtccggcgatagtagtctttggattccattatcgagtaaaggttgtatccttcgctcaacctggctaccaattccatatcgcgggggatgttgcgatacaggatgctgcctttcttctgcttttcgtgcttgagctttccaggcgagttgatatccacaaaatcgttgtagccgctatcgtagtaatacatgctgtccgaggcaacgccggttttcacgttcaccgccacggatgcaagatagaacagggaatcgggggtgagtcccctgtaaatgcggtattcctggattctcttttcgcggggcaggggcttccagcctattaccaggccatcgcctccatcgttgggaatatcccgcacaaagagaccctgaaccgtatccagggtttgcccgttctgatccttgcctgttgaaaccttgcatccggccagagccagagcgaggacaagcatcagtccgaaaacacgtatgtacaatttcatacgcttactcctatgctttttcaatttagtaacttatattaaattgcatcaccttacaactgcgcaatattgtcaaatccttttttccttgcctgatggaacagcggggcttgaaagccctgtctctggttcttggctcgggcaacgcataagtctgaatccctacttgaaattctgttgattgccacagagaaaccagacgccatcctcccggtaaaaataggaagcgtcgccctcggtgtcgggatccagatagctgagagtgctgtccgcggccgtgaaggtcagcttcatgctcacgatcgcccgggagccagccaggtcaatatcccgcacttccacgtcaagcaggtcgaagcgtgccatacggtcctgccacagcccgcgcagttgaaagccatacatccctttgtggtaatagtccggatgcacctgggtcatgatgccctcaatgtctttccagcagaaatcgcgggcaatgcctttcaggatatcctcgatgcggattttgtccatgtcttcgggactgctggccaaattgcaggacagcaggaacaaacagagcaacaggacgccaagctgcttcataggcggctcaaccaggccagagtctcaatgtgccaggtttggggaaacatgtcaaaggtctggatgccttccagtttgtaacgcccgctgccaagcaggatcttgaggtccctgtgcagtgtcatgggcgcgcagctcagatagaatatccgcttgatacccgtgtcgattatggcttgcaaggctgccggtttcactccggaacggggagggtccagaatgatcacatccggcgttttgcaggggctgctttgctggtctgaaagcagcgcgggcagggcgtcctcaactctggcgcagagatggtcaacattcgccaggtcgttcagttcggagttcagttccccatccagtgccgcttcccggcattcttccacgcagagcacgcgttctgcctgcgcggccaggttcagccccagcgccccgattccgctgtaggcgtcgaagaccagtcccgcgccgcccatcagtttctgcaggcgggcgatgatctgttccgccgtgccgcggttgatctgccaaaagctgcggtagtggattcggaagcgtttgcccgccagttcgtcaaagagccagggattgccatacagcagtttgtcttccgggcccaggatcacgtttccccgttcccggttgatgttttgcacgatgccgctgatgcaggggaattccgcggtgatctgcttcacaaagaggttggaaaaaggcagcttggctcccctggtcaccaggatcagcagcaccgagctttgatctctgttgctgcggaggcctatgtggcgcaaagtgccggtgtggctggcttcagagtaggcctgcacacccgctttccggcagatttccaggcaacgctgggcgatggtgtcaaagagttggggatgcaggacgcagcgctgatgggggacgatcctgtgcgaccagcgcgcgtagatgccataatagaggccatcggcgccggaacccacgggcagaaaggctttgttgcggtagtttacgggatttggggaagcgggcatggcgccgatcttcaaatccggggccaggggctgcagcaattccctcaccagttcggtcttggctgccaactgcgccgggtagtccagcatcagccaatcgcagcctccgcaggggtcgtccaggtcaaaggaagcgcagtccgcttcccgcactcccttgccccgctccagccaacgcaggggcctggcaaaggcggtgtccttgcgttctttgaccagctccacttccgccaggtcgccgaccgccatccgctgggcaaagatcgccttgccctcgtgaaagcccaggccaaaaccgcccagagccagcttttctatccggaggatgaatctcttgttcacaccatcatcttacgcagggcttcaatccgcttctccaccggcggatgcgtcgcgaacagggagagggggctgaagttgttgatcttggcaatggcataggcgtctttgcggcgcgaaggcacgtaagctttgctgatcttttccagggcggtgatcatgtggccgggggtggtcagggcggctgagccggcgtccgccttgtattcccggtggcgcgaatgggctgccagcacgatgttggcaaggatcatcagcacattctggatgatcatcgcgatggcggcctggctggcggaatgcatcatcccggacgaagccccgtcatcatcgtttctgcctcttctgccgctcaggagggcggcgatgatattggccagaaagagcacaaaggtgttcatggtgcccatcagcagggtggtggtgaccatgtcgccttccgtgatatgcgtcatctcgtgccccgccacggcagccagttcctcctcatccaggttttgcatgatcccgctggaaaaggcgatcagcgatctgtttttggacgcgccggtggcaaaggcgttgttgtccgccgcctggtagatgccaaactccggcatcctgatgcctttgtgggcggccattttctctatcgtatcaaagagatagagctctttgccgcgggctgtctcccgggtgagcggtgtgatcctgtaggatgccttcgccatcgctttgctggaaagcagagaaatgaccgctccggcaaagccgaatatggcgcagtaaaccagcaacccgatccagtccgagcttttcacgcccacgatctgcatgataaaacccaagacagccaacaccaggatgttgactgtcaaaaacagcccccaacgtttaataatagtccacatggattatataatcctccttacaggtttatcggattcaggggcagccacgggaatgatctcagcccgtgccacccttggggtcacactaattgatagtgcgataacaaggcaagtaaaatttttggtgcccagagattagaaaggcttcatgcaaatatcggggcttcctttgaggtggaaaggtggaaaggagaccttcgtggtgaggtggtgtcgtggtgattgtaaaaaagagatagaacgcggatgacaggatcgacaggatcagcaggatatttgaaggtgaaatagcgaaaagaaggccacgaaacaagtccaccaagctatatacagtgtcatcccgggcaagccggggtcctcgacggatcggttacgatccgttggggtgggatagcttgacccgggatccagtcttttaataatgtccacgaattacacgaattatcacgaattaaaagaacaggataaggacagcgtccagcttcaaaaaaccacacaagacccaaaaaccgcgtcatcacggcctgccggggtcctcgccaaagcgcgtagcggtttggtggggtgtatagagccgggatccggtgcccaggggtggcaaagtctgtttgccacagagaccgaaggtctctccccaacaggcaactccgttgcctctgccgaacagacttcggcagcccacgaaacaaaccccaccaggctatatactgtgtcatcccgggcaagcttgcttgacccgggatccagtgctcagggggtggcaaagtccgtttgccacagagaccggaggtctctcccaaaaaggcaactccgttgcctctgccgaacagacttcggcagcccacgaaacaaaccccaacagactacataccgcgtcatcatgggcaagcttgcttgacccaggatccagtctttttatacaatactccccatttccggccagtttggccgctttttggccggattactttgtagttcggtaaactgtggatgggcccctaccctcacgggatacaaggccattctgagttaaagactccaagtatcttctaactgaacgaatgggaagttgcattgaatctgctatctgggttgatgataacacaccgtgcttctctattgtttgatatacagaccttttgagggaggaatatgcatcgggtctttcaaaccgatcccgagagatcaacttgagccttaataacagatcattctggactgtcatacatagtggcttcaagcgatgagctatgcgaggtatttatttggggaagtgctcgtgcatgatcttgatatcagcctggcttgcataattcacgataaagacctttacatttgcttgtgattcatacttaaccagcttgcctccggctattatttgggcgtttttctcttgcgatgcatattttacaaaatagaccttgtaatccgctttgcttgcgtatttcacgataaacactttagcctgacttgacattataacctccttgatttacatgatattgctttgcattcagacgtccaggattgttgcttttatcctgttggtcaatttctcgaccaaatcttcagcgttttcccagataatatgtttgtactgtcttgtgtcaaaaatatcagatatttgagttccttctttacaacaccagatcaccggttttctttggcccatcgcataaccggcttcaaagtggacgttgatattggggattgtggtatccgctataaggaaatcggatttgttaatctctgcaataatcttatcatcaattttgtcgttatactcttctttgtcaacacggtatggtatcagatcaagtgaaccaactgccttccgtattccattctcatatacgctatccagttctgtatctccaaatttcatagccacaaagacctgttttgttttcacactacccgagacaatctggctgattcgctcccagccttttagctctaatctgagagtatatgtcttagcgagaaaactatcattagaatcaacataccctatgttttttgcgaatctgactaagtaatacagttcttgtttgtcatgcataaacagcaagggacagtcagtttccgcaatggctttcacttgatcgactcgagtgatatgcttatgtaaatataacaataggatatctatcaactcaagtggaccggagggaaatctcacgctttgctttatcttgtcgatgtcttggtggtctgttattttcgaaataattttcgattcttcgtaaagatgcctgagcgcaatacaaagctccttatctctggctggtttgactcctggtttattaatattaaaatgacttaccatcctaaagccattgatctcaaattcaccacaataggcacagcggaaatggaaattattattgtaatctgtccctatgggtgattcactcagtgggttgcggcatatcggacattctgtaacaacgcagttcatgtgtgcatacctccttggtactatcgttacgttatgaatataaactgaaactgagcagggctaatctctgttattgaaaacctgggttggcgcaggaacagggaacccttgaaaagatcactttctttgaggacagaaagaacaacgggttccgccaaggttttgatgggcttgaaatccacgcacagacgttgcgtttcacaagcggtaaaatcctgaaaaggttcgcgggcaacttccaagactcccatgcaggaacgcttatgagggtcataatagatggccttatcatcgggaagcatagacgcaatcagtttttgagcgtatctacccttgatgccgtagaggctataactgtcccggaagagaacatcttcccagttatggtgcttatagggattcctgatcatccaataacgcattgttaaccaaacggggataacgtcgggcataccattgttccacaagctcaatatcttgatcacacagaccgtatagttcatagatgattttatctatttgcctttgttcattacttgaataatcgtagtatctatcagatatctgttttgttatgatcttacggactaatgagatgattttatcattgtttccacagataattggtatttctttgattgcatctatttctgcagctacaccatggtatatcaatgccttgaatataaatttacataattttgaacaaaggatagacaaaatgttgtctatttggagataaggggttgtaacattaattaatgatcctctaatatcataaacagaactactattgtatctaaatgttggggcatattgacctacaatcgaaaatgttattccgttactaaaatatgtgtcactgttctgaaaccttgaacagatagcatttgatcctttaccatccctttctctgatagtcagagttttcattcgagtgacagcccaagaactccaatctatgaagaaatcagttttaacatagtagtttggcagccaaccggattctgtataagaagcgccacctttgtcataggggacaatgtattttccaccgaaccaacggtcagggtcaaatggttgctcggagcgtgattgatgaaagccaaggttgattatcttgtggcggatattgtcattttgtgatattttttccagttctgcgtcggaaacgacatatttcaggtatggctcaatgcttctgtatgtgggtccagattcgggggtctggaaaagatacgatttattgtcgccagtggcaagtccttgagttaccgacgcaatatcagagagtttgacaagcgtgaccttcttaccattgatctctacagttctttcagctttattcttagggttccgatcaacgccaacatcatgcattaaactgaacaacttaggaggggcgacgaagaaaggcagcaaactgcatttatggataatgttttggtgataaatgaacacggcatggacattgtcggagtattcaactgctttttccgcgtctgaaatatcatacaggatttccaggaacttatccagatacttgtggatgctaatgttggtcatatccaccataaggcattgatgggaatctggtatgctataccctggctccgctttctggcacaggattaccacggtgttgaccacttgcttgaaggtgtccgggtgcatgcggattattttgtggatatagttgtcgagcaattgcctgcgcaattttttgtgggacttgatcgtcataaaagtgtcggaaacgatgtaagacaaaaccccatgcggtttcagcggagtgggaaaatcgttgaaattcatgaagcgggcgatgaaagcaccataagggtcatttgaacctaaaccaaggctacttctaacctccggggagattttatcgcctccatagggtggattaccgattacgatatcgaatcctccttccttcatcaccctgggaaagaaacattcgggatggaagaagggacaggcgatattgccatacataaaccatcgtttccaaaacactttgagcctgtctttgcttggatttttaagaccccacttgaagctttggtataagttgctaagttcagtggaaatacgttcagcgagctgttctttttctgccttggtatgttccgcctgatagtattcctcaatcgctcttgataagtcattagatactatttcttcgaatatatcagtttcaatatcgttgagagaatctgcgcagatcaggttggtctctaggttgggcagaggcatcactccaatgtctttgctacagtctgtattttggtcaaccaccagagatatgaagaatctcagttttgcgatatgtactgccaaaggttggatatccactccaaagattgagtcacgcaggatgccaatcttgcgggagtagtcgtcgtagtgttccttcaggtgtttgccaaaatcgtcgcgatattttccttccagcggttccagttttaggtgtaaccatttagagttatcgggatcgaccagattgagtatccgtgtgatcttgtgaagcatgcccatgggaaatgaaccgctgccgcaggctgggtcgaggatgcggattttatccagggcgtcaaccacaaaatcgtcaaaacgcttctcattggcattgacaacatcatggtaaactaggaatctgatgttgtctccatactccattagccccttttctttcgccttggactccagatacaacaccaacgagtcattgaccatgtaatcaatgacctccctgggagtgtaatacgcgccgctgcttctgcgagcgtttctggaaatgtcggggtccgggtcgagttcagccagaaggttttcgaagaccatacctaggagttccggatcaagcgcgacatcttcttccaggggtgtgttttcctcgatggtaaacttgaacttgcccagaatcacattcaacccgggaacatcatctgatctcctgtttccaggagcctgccagccgtagaagatcttgttgggtatgctgatatccgagtctgctatgttgttgttaagtatgcagtggtcttctaaaaactcatcgtcacggttgaacactcctccattcaaaaatggtattctttcgaaaacagtcaaatccagtgcaggatccaggtatttttcaattttgcctttatccagtttacgacttttcttaggctcgttcaggcaatcgaagaacactgtctgcagaatgccacgataatagctattgctttcgggattatcgttatcttttactatcggatagggaacatcggtgtctgagaacagctccagaatgctgctgtcaataaggcctttttcttttaggaaccaacagaacatcaaccggcaaagcaatttgaccagaaagtgcttcttggtctcgttttgctcttcttcagacagttgacactgaaacttgagcctgataatagaaagggaagtgcgataccaagctatgatttgattatagaattccctgtttagttcccggatagagagttgtttctgccaagctttatgcagttggttgatggatgaaacatccaagttcccaagacaaaacttctcaagaatgtcaatgtgccccctgtgcggagtggcgtatctgatatccttaaccaagctaactttatccaagacatctctcgtttcgtcgcgtttgttcagccttcggttgataacggatgtagtcagcagttcgccatatttgattagcagcagcacaggcatcgcgaagcagcggttgatttccctggttaatgcaaccaactcttttcttgtggcatgaagtcctttcagttcaattgatgcgaagatatacgacttaacctcattggagtcaaccgagttacttttaaaccccggtatagtcgtttgaacggagaaggagccagcttctctgatctcatcatttgtgagttgaaagtgcagattgatctttgtccagcgctctttcaaggcttgaacaggcctaagttgatggcgggtagaaaatgcttccgtaaattctgaataggtataggatacttcttcgaatctacgctgggattcatagcccaggactttccaaaaatcgtaggcggcatccacaaaaggacgggtttgaaagttattcaaagcctcctggatggaaagtttcatgtctgtctttgcgttcataggtcttctctctggtgcttatttgattatcagccaggtaatcagttcaaattcaccgccggggtcatgttgtttcaggggagggagcacagcatcgccatgggtttggagttgatcctgctttttctttgcaagggaggctttgatgctttttaaggctttctggatgagctcattataggctctcatgtcttcgcccgatttggtttcctggtcgaactggtcgcaaaggctttcgatgggacttcgccgtccgctggccaggatccggtacatatccaggatctgcttggcattaaagaaacggaaacggacggtgccgtcggtgcggatgtagatcataaaatagggatggagagggttgagcttttcgtattccctgccagattcgttgtggcggaggcagaagatcacaccgggccggatgatttccctgtgttcctggctgactttgaccgagtggtcccaaagttcgtggtcgggagagggcaccacggtgtacaggccaagaggggcttcgcgcagctctttttcgtttgctttgatatagttaagcagatcaacccggaaatcatccagagtgaaatcggtcaggctgatgccgtcttccatgtcttcgatgtcgataacctcttcctttagccttttcaactgcttggcgcggaacttcatttcgttggaaagcagttcttcaaattcctcttcggcgaagagattgtcctcgcctgtggcggtaatatccaccagagccatcctcgcctccactctcaacttgagggagatgtatttgtccaggtctttggtaggccagaagttcagcatctggattttggcattggggctgttgatgcgatcgatacgcccaaagcgctggattatcctcaccggattccagtggatgtcgtagttgaccacatagtcgcaatcctggaggttttgcccttccgagatgcaatccgtggcgatgatgatgtcaatctcttcatcctggggcaggatgggcatcttgtggcgctgcttggcaaaaggggcaaagcaggtgaggatggcgttgaagtcgttctggaaacctttgggcagcttgatggttgttttattatgagaacttccggtgaccagggcaacattgagaccaagctctttgtgaatgaaatccttgagctgctcatagaggtaatcggctgtgtcggcaaaggcggtgaagatcaatatctttttgttgtccttgtttaccggatgtttcagtttgttggtaatgatctgcttcagttcctcaagcttggcatccttgtccggagttaccaggctcgccgtgttgtaaagcgagatcaactggtctttgtccttgctcagggcttccttccatttctccagatcgaggtgttttagttcaaacttcagtttcttgccaactgtgaaatcatcgctgttatcctgttcttccggtgaaaccgcgtcctcatcgccaaaggagtaaatatccccatcttgagtttggccggattcaaatttggcgatcttgtcctgcaggctgttgatcttttccaaggcccgcccgagggtcagggtataggaatgaacgctgctttccaggcgcttgaggaagtttatcttcatcatctcaaccagaaaatcctcgcgttgggcttgggaaaactccttcactttctctgttggctcataaagttccttaaactcctccagaacgaagctggagggtttgaagagggaaagcttgtaagcctggatgtcttcattcactttgtcgtaggaacaaaaatccccttccaggtcgatattcgtgctcaccgagatcggcgttagccgcttgggaaagctctttttatcaatatccttgtagtaggagacaatatgcttgcggctgcgggctatggtaagttcgtcaaggagtttgaagagcgagctgtccagggcgctgaagagttgcgagcttttcttttgtcccgctttgttgctcttcacccagtttgtgaattggctctgggcttgtttcatggtgtaggagacactttctatacccaggctttcgtagaaggcgtcgtccctgccttcggtgatatagtgtatctggttgcgcaggtctttcaggttggtgttgaccggggtagcggagagcatcagcaccttggttttcaccccctctttgattaccttgtgcaaaagaaatccagcccggttatagctcaactcgtcgttttcgtcgatcttttcccgcggatttccccttagattgtgcgactcatctatcacgaccagatcccaggcgccccagttgaaattcgccaggtcgatggaattggcatccgaagttccccgcgctctgcccaggtcggtgtggtacataaccgtgtaggaatagcggtctctggtaaaggggctgagtttgttggcggccatggattggtaaacggtccaattatcttttaactttttggggcagagtaccagaaccctgtattgcagcctctcatagtattggatgattgccagggcttcaaaggtttttcccaggccgacactatcggcaataatacagccgttgtggcgttccaacttgttgatcgcccctttcacaccgtctttttggaagctgtagagcatgttccagatctcagtgtcgaaaaagccggtcttttcggttaacagccccttgtcagcttgctctcccaggaacttctcaaagaggtgatagagggttttataatagataaactctggggaattatgcacatagagttttgccaggtattttagaacttcgtctttgacatcctcaaccaaggatttatcctcgttccacagttcgtcaaaccaagccaggagatctgccctgtcgcgatcgtcggcaacctcgatattgagctcgatattgggtttgttcccgtatccgagaccattaactgtgaagttcgagctgccaagcagggctttctcaaccccgttttcatttgtgatgtgatagagtttgccgtggaggaaatttggcttgaccatggattttatctccaccttctccctgatccattccgcgcagtctcgggctgttttactctgcaccagcctgtttgccagggagatcaccagcttgttgtcctctatctcgaactgcttcttgtcggtcttgttgggatccatggaagccaggaatctgggctcgccaaagagaaagcgcaggtgatcgatcttgtccagcctgttcttcaactgctgataggcatagattgtaaaataggcggaaacaaaggccaacttgctgttgggagtaacgtttagggaaatgaagtcgcccactgtgccatatttacggttatcccgaatgcctgaattcttgttcataagatttatcctaatctccaaaataaagaaaaacctgttggcgtttatatgaagttccagagacgatttcatctataactcaaaacgcaaccccagtttgtttcgtctatttcagcaaggaaaatctgtcaacctaaaaaagcccggagttgagagctttactacaaacaataatcttaccatagatgaggcaggaaaaaactgaacccatatctcccgcaatgcgttagagaggcgttcccctcgtatttgggcaaacggactttgccattcccctcgggctgccgaagtccgttcggcagaggcaacggagttgcctgtttggaagagacctccggtctctgtggcaaacggactttgccacccctggacactggatcccgggtcgctgcccgggatgacgcggtttttgggtcttgtgtggttttttgaagctggacgcttgtccttgtatactgttttatttcgtgataattcgtgtaattcgtggatgtttcttttaaaagactggatcccgggtcaagctatcctaccccaacggatcgtaaccgatccgtcgagggccccgacatgccgggatgacgcggtttttgggtcttgtgtggttttttgaagccggacgcttgtccttgtattctgttttaattcgtgataattcgtgtaattcgtggatgtttcttttaaaagactggatcacgggtcggagcccgtgatgacacggttttttagtctggggggtggtctttttgggggtcggttgggacttgtatcgagagaacctttccaccattccaccattccacctttccacctcaaaaacacctttccaccttttcactatgataaaaataaaacgcaaacaatatagtattacattcaccaaaaacaccagcaatattccgcataatccttcatagcgccctcccttgctgctcctgcgtttgctgccatcatccttaggtcatccctcaccaagttaaggatgacctacggaaaatatagacttagcccaccctggcaaatgagggcaaagaggtgatcaatctacgctcattaaatgtataaaggttatccatagcagaggcggagcgcaaatgatcgcactggagatacacgattcgcgcagggcgcggattgccgggacaagaaaaacccccgggcagtgccgggggttgcaatctcagacagggtctgatcagtttactttgaaggttgtgtcgcctttttcaaagaaggcgatgatctgtttggcagccgccactccggcgttgacgttggcttccccggtctgggcgcccatcttttttggggtggcatagtagcggtcggcatagagttccatcagtttggcgccgcattccggttccacgtcgctcacatagcggaatttcttcttttcctcaaaggccttgagcagggcttcctcgtcaatcacctctttgcgggcggtgttgaccaggatgcagtcgggtttcaccaggctgagcaggttccagttgatggatttcttggtctcggcggtggcggggatgtgcagggagatgtagtctccggtgctgaagatgtcttccaccttatccaggtgtttgacgccgtctttggccatgatgtccgcgctgatgtagggatcgtaggcatagacgtccatgccaatgcctttggccattttggcgagaaagcggggcacatttccgaagccatggagcaccagcttcttgccagccagctcggagccgcttttgccgttgaacttgccgcgcgccatgtagatcatcatggccagcgccagctcggcgacggcgttggagttttggccgggggtgttcatggccaccacaccgtgggcggtggcagcggcgaggtcgatgttgtcatagcctgctccggcgcgcaccacgatcttgagttgtttggcggcgtcgaagacggcggcatccactttgtcgctgcggatgatgagggcttcggcatctgccacggcggcatggaagtctttcacgtcggtgtagctttccagccagctatggggatagccggccttgtccagttcagccttgatcttctgcacggcttccgcggcgaagggcttctctgtggcgatcagtacttttggcatattagcctccctatgtatattttatttctggtttcaagactttattttagtgcgttttatgtcaatgcaaatctctgtcatttgagcagcagcatacgccgtgactgcacctttccacccgcttgcaggcggtagagatagactccgctggagaccgggtcgccggaggcgtcgaggccatcccaggtgacggtgtgtgagccgcgggaacgatggccgtcgctcaggacgcgcaccaactggcctttgaggttgtaaattgcgagccggacggagccttcggatgccagttggaaacggatgctggtgctgggattaaagggattgggaaagttttgcagcagggcggtgcgcagggcgggagcttcttccgcgggattggagacgttaccggtggagacgtagctgccctggcgggtgagtgagccgcggtaaacggtccagggccggttgtccttttccgcgcggcgcaggttcagcaccagcactccggtggaatagccgctcaccagcttgagccagccgtcgccgtccagatcgcatagcgtggagggcgtgcagccgttgaagctggtctggaatggaaatccgtccaatacgctgccgtcgtggttgaagccataaaccgagttcacatagctggaaacgaggatttccaggttgggatcgtcgtcgaggtcagcgatgatgggcggggtctgcagcacggcgccggtctgcaccgggaagccgggaaggtctattccgctctggctgaccgcgtagagtgagccattggcggtgccgaacacgatatccagcgcgccgtcggcattgatgtccgccagggcggggctgccgcccatcgcggagctgatcggcttgctgaagaccaggctgcctgcgggcgttgccagatgcaggtggctggaggtgccgaaggctatcctgcggttggcgaggatggtgggcgcgccgttgattgcgccggagacctggagggggaaacccgccaggggagtgccgtcggatttgatcacgtgcagcttgccgttggagcagccgacgatgatctcattgccgccgtcgccgtcgatgtccgccacagccagttcgctgtggaaggcggagccaaggtcaagcgggaagcccggcagcaggtttccggaggaatccaggacgtggatcttgccatccagggagtgcgccaccacttccatcccgccctgccagtcgatctgggcgatcacgggggtgaagaggaactggctgccgccatcgtaatcgaaaagcacttcatcgcctgccagtgccagcactttaccggtgcggctggtgagtaccagagccggttcctggccgtcaatcaactggccataggcggcgctgcgcatcacatcctgctggagaggcgcgggaatggagccggtctgctgccctgcgttatccagcagatggctgttgccgaaattatcggtgtaaagtatgtcgaggctgccgtcgccgtcaaaatcgaagacgatcggggcggatttgctgcccacggggcaatcccagggaaagctgccgtcaatgagggtgatttcatattcgagctggaatctgcgggttccagtgctcaagttggtgacgggatgcagcgattgcagctccagggtgatctgatagctgccataatcgatgccggacggaagttgcacacggaaatagaggccgggatcggcggtctggcctggcaacaactgtggtatcaccagcgggtcgctcaaaagctgcgctccggctggcaggccgctgagggtggcggtcacgttgtgggccgcggcccaattctgatggttgctgatcacggggtggatgcggatgatctcgccgggattgatggtgccgtcgccgtcgccctccacatcgtcgatagtgtagctttccaggctgagcaggggcagggcggggtcaggcagtttgacctcgatggaaggatcgccaaatagcaccatctgatagtagcaccagcgcatcacgtcatagctgatggcggcattgaggttctgctcgcgggaatagctgagcgcggagccaaactgggtgttggccgtttggtagaggccgatgaagtagtcgcggtcatagaactgggaggcgccattggtgttgccgggggaataccagccatagcgggtgtttccgaggaaggcaaagacgccgcccgaggctgtgagcatgtgttccgcgatgctctcgccgtcgccgctggtggcctggtcgaaagcggcgggatagcagccctgggtgtaaagaaagccatattcggtgttctggagctgctggatgctgccgttgctctgtcccatcaggaaggtttggttggcgtgtcccatgtggttcatcacgtggacgccctcgttgatggcgttccagacgccctgctcgctgtaggtgccgtcgcgctgatacatggtgcgcaggtggtacagttccgggacgctggtggccacttcgtccttgtaatctccgccccaggtgagggggttgttgttcaggttttctccgaacatgatggcggtgttgttgctgaacgtggaattgctggtgtagtattggattttgcggatgatgttttcaaactcgggttgggtctcggcgggaaagcgtccgatatgcacttccggcagcatgtccacctggtcctgcggttcgccccagatgtcgtttccattggcgttccagtctccatccagattgctgaaatagaggtcggtaggcattctgagatcaaccgtgtcgcccacctggccgtagcagccgcgcaggggcacgatctcgtcatcgccgcccaggatcacatattgcagaggctggggggtgcttgcccaggcttgataggcgtcgctgatgaaggcgcgcaccttggcggcgttgtcggttccgggatagctggcatagatatccgcggtctggaatacgccggtgctgatgtcgttgccgtcacgccagttggcatagctttgcagccaggaggaggcggtggagttggtaatgatgaccatttggcgcggagtggaaaggtcaatcaggcggctttggggagcgtggttccgatagcgggaagcctgctggtagctggccagggcctgggggttgagggcaaatccttccacagagcgggcagccagggcgggggcgtagaagttggcctgttgggtggccagggcatcatcccatccggtttctatctcgatgctgaattcggaagccgcgtgaatctggcgggaaaccggattgtatttccaggggaagaggtccagcacggcatattggaggccgcgctgcaactgggtgcccagataacggtgattggcggccgggaacagcgcgtcgctctgccagatcgcgggatcgggctgagtagcgtccggacggggctgcgaagtgggctgctgctggcgcgcgtagtccagatacacgccatcgcgctgcaacaggtaaggggagctttgcacgctcacgttgagcaccttttccccaaaggggatcagcacccgcacggggtaatagttgagcgcgggaacgccgggctccagcaggggtgccgtgggctggccgcgcaggctgccatcccaggcggaggggtcaacgcttacattgagggtgagcgccaggctgattccgcagagcagcgtcaggccgatcagggcggtaagttttttcataatctgtattccatcttggtttatcgaaatgtagtcgaaaaattcttatgtgagaaatggcagaatcagtcaagtagttttttgagggcaaagaaaacagacgtctgggctgcgtttgtgatctgtgaatacctgcggaagacaagggatatgaaccaatccttagaacaatgctgccctagcaatttcagctcgcaatgggcgcctcacgctgtatatccggcgccttataaattttaaagaaagaagttgcgaatatggcggacttgtttaaactatcattctgtaagctgtttgttttgcgtctttatgtaagggcagcgcctgcccgcgggacttgttatcttttccaatctatttgaaaaggagtctttttcatgaaacacacggctatgctactactgctgctcgccaccagcctggcttttgccaaccctgtctggactgaggacgtcgtggtgcgggaagcgcaggatctgagttacactggctgcacgcagcaagcagatgacggcagcctgatcacgctctggacgcagatactggatggagaaaactgcctgatggcaaaccggatcagcgcgctgggcgaggaggtgtgggattccccactgcgtatagcgggttgcggcctgggcatcggcggagagcagatgaagagacctccggtctctgtggcaaacagactttcccacccctgggcaccggatcccgggtcaagcacgcttgcccatgatgacacggtatatagtctggtagggtctgtttcggggtctggtggacttgtatccaccattccaccttttcaccttttcacaaaatacttagaataatctccataatccttcatagcgccctcccttgctgctactgcgtttggtgccatcatccttaggtcatccctcaccgggttaaggatgaccccaggaagacagagacttagctgtctcgcgcgcgcgagagcggactgacaccagtcttagttttttgcgcccttgttttagaattgatttatccactcagtgttagagatagcctgattttctgccagaaaaggaataagctcaagtccctcccggcatttcctccgtgccagatcgtaaaatccgtttagattattcaatatcaagccttaaaaggagtatccctatgctaacagatcaagagatcgcgcgcagcgtaaccttgaaacccatagatgagatcgccgcccagattgggctaagcccccaggaactggaacattacggcgagcataaagccaagctcagctattccgcgctggagcgcatcaaagacaaccccagaggcaagctgatcctggtctccgccatcacgccgacccccgccggggaaggcaagaccacggtcgccatcggcctttcccaagccctcaaccagatcggcaaaaagagcatcgtcgccatccgcgaaccctctttgggccccgtgtttggcatcaagggcggagctgccggcggaggctggagccaggtgttgccgatggaggacatcaacctccacttcacaggcgacttccatgccgtcaccgccgccaacaacaccctcgcggccctggtggacaaccatgtttactttgacaactcgctaaatatcgatccccgccgcatgacctggaaacgggtgctggacgtgaacgaccgcatgctgcgcaagatcgtcatcggcctcggcggcagcaagcagggcttcccccgcgaagacggtttcgacatcacccccgccagcgagatcatggccatcctctgcctggcaaacaacatggacgagctcaaggagcgcatcggcaacattaccgtgggcttcaccttcgacggagaaccggtctatgtgaggcaactgggctatgaaggcgccatcgccgccctgctcaaggacgccctcaaaccaaacatcgtgcagaccaccgaaaacacagccgccttcgtgcacggcggcccctttgccaacatcgcccagggcgccaacagcatccttgccaccaagagcgcgctgcggctgtcggaatacactgtcaccgaggcgggcttcggtttcgacctgggcgcggaaaagtttttcgatatcgtctgcaaatatggcgggctctgcaccgacgccgtggtcttggtggcaaccgtccgcgcgctcaaggtgcatggaggggtcaagctcaaagacctcgccacccccaatcccgcggcggtggaagctggcctggccaatctgggcaaacatctggaaaatatcgacaagttcggcatgaagtccattgtcgccatcaaccgcttcgcaaccgacaccgatgaggagatcagattgatccgcgactatgccagctcccgcggattcgattcatctgtggtggaataccacgcccggggcggaaaaggcgggctggacctcgcccaacaggtggtggatatggtggacagggaaatctgccactaccacgggctttacgactgggacagcccggtggaagacaagattcacactatcgcccacgaaatctacggagcggagaaggtggattactccgcggacgccaaagcggacttgaagaggatcgccaaattcggcttcgacaagctgcccatctgcatcgccaagacccagaagtcgctttccgacaatcccgacctcatcggacgccccaaggacttcctggtcaccgtccgcaagatagtcatctcgagcggagcgggcttcctggtgcccatcaccggagagatcatgcgcatgcccggcctgcccagacacccctccgccgaaaccatctccgtggaagacgatggcgacatcagcggcctgttctgattaaccctaaagaccttgtgccgggacactaaaaacttaggttccggctttttttgcccttatcgccaaggcgcggatcgacagggtctttgaaggtggaaaggattatagaacgcggataacaggatcaacaggatatttaaggtgaaacagcgaaaagaaggccacgaaacaagcgtcaccaagctacattccgtgtcatcccgggcaagccggggtcctcgacggatcggttacgatccggtggggtgaaatagcttgacccgggatccagtgcccaggggtggcaaagtctgtttgccacagagaccggaggtctcttccaaacaggcaactccgttgcctctgccgaacagacttcggcagcccaatccgcgccttttatccgcgtatatctgcgtgaaccgtttgacccgggatccagtcttttgaggctccaaacagccatcctgtctttgaaaaatgccttccaaaaaataaagattcaacctgccgatatttttcttgacaaatctactaaaacccatccagtatatttccaaatgggaaacccatcatagggaggaaaaaatgaaagccttgcgaaactcatttttgtgtcttatcctgctctgcggagcgatggttttgggagcgcaggcgccccagtggcagtgggcagtccgcgcggggggaactgactatgaagaaagcatatccatagcgaccgacagccagggcaaccagtacatcactggtatgtttgatgaaatcgctacattcggcagccataccctgacgaccagcggtggcggtgatatctttgttgccaagctggatgcctccggtaattggctctgggcggtcagggcaggaggaacagagaatgactggggattgttcatcaccgtggatggagccgacaacgcttatgtgaccgggtatttccagaacacagctaccttcggtaaccataccctgacgacaaatggagagcatgatatctttgccgccaagctggatccctccggcaactggctttgggcggtcaaagcagggggtattgactgggatataggaggtggcatcgacgtggatgaagcgggtaacgtttatgtgacaggatacttttgctacaccgccactttcggcagccataccctgacagcaagcggaggcgctgatatttttgccgccaagcttgacccctcaggcaactggctctgggcggtaaaggcaggagggtcaggcaatgactttggaattagaattgccttggatggaacgggtaacgcttatgtgaccggattatttcaaggcacagtctctttcggcagccataccctgacggcaaacggagaatcggatatattcattgccaagcttgacccgtcaggtaactggttatgggctgtaatggggggagggaataacgatataaatgtatttggcttcgttgtggatggctcgggtaacgcctgggtgaacggttctttttatgacaccgccactttcggcagccataccctgacggcaaacggagagaaggacatcgttgttgccaggcttgaccctgccggcaactggctttgggcggtcaaagcgggaggaatagactatgataatggctatggcatcgctctggatagtgcgggtaacgcttatgcgtgcggttctttttgcgaaaccgccacttttggcagccatcccttgtctgcagtcggatggatagatatctttgttgccaaacttgactcctccggtaactggctctgggcgatcaatgtgggaggaaatgaatatataaataacgctggatctggtatcgctgtggatggcgcgggtaacgcctgtgtgaccggatatttttacgaaaccgctactttcggcatccataccctgactgcaagtggagaatctgatatctttgtcgccaagttgggaagcggaacccccgtggaagatgaactcgctccgcaagcggttgccaggctgcataacgcctatcccaatcccctaaacagagatggaagcgcgctgatcaaagctgacattccggaacgctcctccgctacactgagcatctttaacctgcgcggacagatcgtagcccgccacaagctgggttccggttcgcagcagatatccttcagcggggaagggcttcccgcgggggtctatctctacagcctgcaatgcggggactaccgggaaaccaggaagctggtgcttttgaagtaagataaaatggtggaatggaaccgtccgcgttctgtttccatttctccttccggctttagcatcataaatccgtaaatcggttaaatccgtcaatccgtataagattggcatgccaggcatcatacggatgaaacggattacacggattaacggataatactgtttagcttgcattattacaattgaatacaattatactattttacctttccacggccatttcaaaagactggatcacgggtcaagcggttcacgcagatcagcgcggataattgaagggctgccgaagtctgttcggcagaggcaacggagttgcctgtttggaagagacctccggtctctgtggcaaacagactttgccaccccccctgcgactggatcccgggtcaagcatacgcttgcccgggatgacacagtatatagcttgatggacttgtttcgggggaacctttccaccattccacctttccacctaaaaaacccctttccacggcgatagccaagatcgccatcggtaaaggcttggggggcagagcgaggttttttgttgacaaaaaagggctgcaatttgctattgcatcctgtcctgggtgattagctcagcttggttagagcgctacgttgacatcgtagaggtcactggttcgagtccagtatcacccaccaccctgattgttgggtgattagctcagctggttagagcgctacgttcacatcgtagaggtcactggttcgaatccagtatcacccaccactttcccccgcaaagcaacccggtcagagaaatttcttgacagaaagcttgcggagatatctactgttcatgttaatcacgagcaaacgaaagaagaggcaaaatccaacattatatacggaacacaggcatttacgcggtatgctgctgttgtgaataatatattttttcttacaccgagatttggagcatagctaatgatcaaagaaatgggacgtctgaatctggacgactacaaaataatggacgcccaggtggaaaagattttcaaaagcctggacaagggcaaacgggaacaggccatcaaggaaattgaggaaatggccaacacggcgaactatttcgtgcgcgaagaaatgggcaagaggctggccacctaccagggcaaggggcccttggacgagatttgcgccgaaatgctggatgatttcatctacggtatccgcgccacggcgctgttctatttctattacaagaggcaggacgacccgcgggtgatcgtgaagaccctggaaaagaccgtggagaccgttccctgggaaagcgagaccatctgtttcgagctatggaagaactatcccgaggtcatgaaggaagagatgccccattgggcgatgtctcccaacgaaaacaagcgttccatgtccatgcacggcatggaaaacatcgcggataaaaacccgcaatacatcctcaccttcatcggcaggctgctggacgacgaaagcgaagaagtgcaaaaaaagatcggccacatcctcacccaggtgggacggcaacgcccgctgcagacctatgccaatatccggcgctggctggtgggggccagtgaagaacgggtggacgccatctggcagaccctgcgcaaattgggcagcatcttcagccaaaagaaccagcgcgacaagggattcgactttatgaacgtcaccaagcgggtgatccaggaatggaaaaacgatcccgaccccaacgtggcgcagatgagcaaccgcctgggacaactgctgcgtaaacaatgatccacgtaatcctggtggaacccatctatgagggcaatgtgggcgccgtcgcccgcatcatgaacaactttggtttcaccagcctgcgcatcgtgggcagcgtgcccaaaaagaacgacttttacctggccatgcactccgaacatatcctggaggaggcgcaggtctttgacagcctcaaagatgccagcgccgacctggacaggctgatcgccttttcccgccgcgtgggacgctataaaccggtggatctgaacccgccccagatggcggactactgcgccaaaatccccaaactggagattggtctggtgtttggccgcgaaacattcggcctcaccgacgaagaggccgacctctgccccctgcgttgccacatccccgccaatcctgcctttccctccatcaacctcgcccaggcggtcaccatcgccctgtggcagatctacagcctccccctgcagggagcaaaaccgcggcagttaagggcggtggatggaaatgaacttgacagaatccgcaactatatgcttgatgtaatgcgcgactgcggttttttccgcagccacgagaccacgaactgggagcttttcctggacaagatgctggcacagctcaaccccggcaagatgatggtctggcgcctgcggcagatgtttaaccgctggcacgtgctggtaaccggcaagggaaagggctacggccaggatcaatagattgcgcggggcgattcagatgccccgcaagttatgcctacaaggaaacaagagatgatagcactcaccgccgtcacggaaatgaatgaacgccagttggaaatcttttgccactgcgaaaagtttttcttcgaccacgaaaaaccagcgttggtcaacaaatatgcccattatttcaccgaaggctatgacgcctttggcattagcgaagaagagatgaaacagctgcgcgacgaagtcctgtcaaaatgggagcccagcgtgcaggaactggcggaactgggcaggcacttctttgccacgggaaaatatgagttcggctcgctcgccatcatgctgctcaagaaacaccgtccccgcttcgaccgcgaggtatatgagagcgtcaaacgcttcaccgaggagtcccttgccaactgggcccacgcagacctgatctcgaccaagatcacccccgtgtttttggagctggagatagccaacatggaggatttcgcggagtggcggagttcgcccagcaaatggagccgccgggtgtccgcggtgaccatgctttggcagcgggggaaattgcctccggccgagctgctggactttatgcgccccctgatgtccgatccggaacgcgtggtgcatcagggcgtgggctggtttctgagagaactttggaggctgtttcccactgaggtggaagaattcctccttgaacacaaggacagcgcgccgcgcctgatcatccagtatgccacggaaaagatgagcaaggacaagaagaagcgcttccgcaagaccacggcgcgcgaacgctcccaggaccgccagggcaaaaagaacttcgcggacaagcggaacttaaaaaaccgcggcaaatcccaaaacaggcaggggttcaaatcccgtcgccgttccgcggacgatgccggcatgcccttcaggatcaggcacacggaggaatccgatgaataagctttgcaccatcttgctgctgtccctgcccctgctgctgtggggtggaaacctttccctgagcgtcgatctcggcctgcccgcctcctccagggatatggaactgcagggttggggcagcctcagcgccccgggatacccacaacttccatataagactataaatgtgatcctgccacccgcggcggaggaactgagcttcagctacaactggagcggagcgcagacctctggcctgcccgccccggaacgcaacggagcctttttgggtggagaacgcctgctggacagccccgcccgcgaagcccgggccggacaggtgcactatctgggcaagggacgctggggcgacgtgagctacgcccgcttccgcgtgctgcccgcggtctggaatggaaactcctggcagggttacagcaggttggaactcgatctgaactggagcgaatccgagcccgcgcccaaccgcatcccgcctgtcctggcagaactgagcaaatccaacgcgaacctgcgggcgaacttctttgccaatccccgtgatctggacaaatggtatcagcccccggcaggcaaaaactacgactacctgatcgtcaccactcccgcgctctatgacgtgttgtccccgttggtcagctttcgccagagccagggcctggtcacctccttcgcggatatctccgtgatcctggcctccaccccgggcgccaacgcggcggacaagctgcgcaactacctttgcaatcaatataacagccatcctttcacttatctgctgctggtgggcgatcacgacaccgtgccggtgatgtatctgacgccggagccggatggcggcgatacagtggcttccgacttctattatggtgacctcagcagtatcgtggacacggacggagacaaccgcctgggcgagtattcaccggttgaaggagtggatgactacctttgcgactataccccggaactgtttgtgggacgcatttcctccaataatcccgtccacgtgtatgacgttgccaaccgcaccgtgctctacgagcagagcgacgccccctggaagcgcagcgccctactgcccgctgcctacctgaactacggcggcgaaccggaaactatctatctgcagacggatggcgcggactttatggaatacgccaaagccaccgccctggcaggattccagaataccaccctgtacgagcaaaccggctggctgccctcccatccctgcgatcatcccctggactaccaaggactgcgaaacctgctcaacacccaaagctacgggctggtgaactggagcgcgcacggctcttccggttactctgtccgcaaggtgtggatgaacgatgacaactccaacggcttgccggacagttgggaaatggagtggatgagcatggtggacaggcagagctttgacaacctgaacaacagcgacggcacggtcatcttcatggcctcctgctacaacggcatgatcgacagcagtcagcagtgcatcgcggaatacgcgctgcaaaggaaggctgtggcggcgatggcggccacccgcacaggctggtacaagatcggctggcgcaatcccggctggggagggctaagctcctataacctgcactatctggaaaactttgcccgcaacgggctgtcctcgggagcttcactggcctgggccaacctcctccacacccaatattacctctttggcgatccggtggacggcgggggaatcatatatcccgaactgcaaaacgtttacacctacctccactacggcgatccagccatcggccacagcggcagccagatccagcccctgggcgaaatcctggtctatgaaccctcccgtcatggcggcttgagagtggtggatgcgctgaaccagatcggcgggctgaacgtggtctataccgataagctgatcccggattatgactatatcaaccgctttgaagccgtgttttgcctctttggctggggcgacgccgcctatgtcccgcatcccgattccctggactactcgctgctgcacggctatctgaacggcggcggcaagctctatctggaaggggatgtggcctggaatagccaggatcctttctggagcaagttcggcgccaacgccccgctgaatatgttcaccaatattgaagctgtaaaatgctatcaggatggcgaagcctggatctgggactacaacccccagtccaaccccaacgcgcaggtcttgctgcccgccctgcccgccgccgagaccatcttcagcacccacggcgccgcctccgcggatgccagcatcggaatcctgcacgcggttccggagcatagcaccatcgcctcctcctttgctttggcaggcctgcaaaacggcgagtgggaactgaaagacatgctgggcctcatcctggatcgctttggcgttttggaatacgtcaatacccaagtggacgagccacagataccgatggtgcaaacctccctgcgcggctatcccaaccccttccgcagccagaccagtctgcgcctggaactgcccgccaaagccagggtggacttgaacatctataacctgcggggacagaaggtgcgctccctggcaaggctcgacctggacgccggcaagcacgaactcaactgggacgggcgcgacaactccggaaaccggcttgctcccgggatctatttctggcgcttgaaagcgggtgacaccctacgtcaggggaaactgctcaaactggccgactgacctcccccacgactccccaatactatatatggataggtgcgatatgtcttgttgcaaaagaatcttcctgctcttcgccttgatctttgccgtcctgagcctcagcgccgccggacttcccgccgccttcaccaaaggcggcaatccatccctttacaaggaactgcacagccttgccaaagagaacctgaaacgcctgcgaaacgggcagggaaaagcctaccgccgcttgctgaaccggtacccggatgtggtgatggcctatctgctggcctatgaatcggacgctaacctgcaatgcgccgctcccgcggatgtggcaagcaactaccgggagatagtcaaactgcttgcggagcaaggctgcaaacacagcccggaattctttctttcctatgtggcggatcagactgtatccgatgaacgcatcgaggcctaccgcgccgcgctgctggatgacggcctgcgccagatcatgcgcgactccgtcgatgagctcgagctctaccgcaagatctcccaatggtgtgtgagcaaactcaagtttcaacagacctccgggcgcgaccagtcgcccctggacatcacccgcaggagcatcgtgggacgctgcgaggaaatgcaaatcctcttcgtggcagccgcccgcaccgttggcctgccatcccgcccggccagcaccccctggtgggcgcatatggacaacaaccacgcctgggcggaagtgtggctggacaacgcctggcactacacgggagacatggatgccgcctactatcccgatcagacctggtttagcggcatgatcgacaagacggtgctgatccttgccgacggttcccttccttcagaacaggacgaggtgctgagccgcggccgctacgactgtgtgatcaactcggtgcgcaactatgccggggaacgcgcccgcaccatcaggatcagaaccctggacgcgcagggcaatcccctgggcaaggtgccggtgcgcgtgatggtttacaactggtattccctgcgcgtgctggcggagtttatcaccgcggaggacggttctttcacgctcagcaccggtcgcggaggcttctatctctgcgccagcctggatggccgtcaggcgctggttcccgtcccttccaccgagcaaaacgagcttgatgtcgatctggttctgaacgaaggccccctgccacctcaagatatctttttggagtatccctccaaccccttcacctggaaacaggctccccctgagtgggatctgggcgtgaaggaagccaaggctctgtgggacgggcaggatagctcgtttaccgagcggggagcagcctgcgcggacaccctgcaaggcaaggtactgagcgcctgccggggcaatcatgccgcctgggaaggctttctgaagatgcagccccagcccggcccggactttttgaactatctgctggagagcgaccccaagttcctctggcaggcgaacgcggcgcagttcgcggcgctctatcagaactttcagcgcttcgatgccggacagttgaatccggaagaacagtcttcgctgctctcgccctcagttttttatgaagagctgccccgcccctttggcaagccagacagccccagcctctatcccacttcctttgccaaagcgggaaacaacgatctggagcggctgcacaacgccatgcgctggctgaagaaaaagcaccggatcgaccccgccaaagccctgcgcggcctcctgcccctggaagaggcatcccgcagcaagtatctgagcaactaccaatactgcatcctggctgtcagcctggcacgcgccaacggcatccccgcccagttcacccgcatccccgacctgatctatgtgctggtgaacgaccagtggcgctattgcaatgtccggctctgcgaatttgaggatggcgggaagaaggattctgcctccagcttcaccctgcgggtgcgcactctggatgaacagggcgcccctctggacatcgatccccaaaacctttccctggcacgctggcagaacgggctgctctacccgctcaaccacaaattcaccgccacaggaggcggaacggccacggcaaacctgccccggggagaatactatctgcaggcgggctaccgcgtctccgacgccaggacagcttaccagttgcagcatctcactgtggaaagtgagcttagccttgacctggtgctgcgcgagtttccccgcaaatgggaagaactgccggaagactccgaattgcgccccctactggctgaagcgggagattgcgactgcctgctgatcggcaactttgaccgcgaaaacagcctgcgcctggcggagaagctgaacgcggagggagtggtattcctctggctgggctatgaggaagctgccgccgcacccgccaattaccgggtcagccccgcctggcagactctggtggcggcagatcagatcaattcagtgcgcagcctgaccctgctacgcaaggacggcgtttggcaataccatcagggcatctgggaaaagctgccccgttaaacgttctttacagcttgccgcggctgaagcggtaaaactggttgcgcagcgccttcacgtgcattcccgtgatagatttgcgcattttgtccggaggatggatcaccgagattccgtccgggttgatgccgccgatctccaccaggaaagcgcccgtgtagtggatgtggaaaaagtagttgcgcgcgttgccttcccttgaactggggccggtggcaacctcatagcgtccgccgccaaaggccttgcgcgtctttttggcataggcctgggcaaagcgcagcagcgagtcgtaacgctctttctggctggcgacggagctgtcgatggcgggcaaaaatatcttttcggaataggctccggtggcagaactatggaagaagatcgccagttcaaaattgttttcctgggccagtaagacgctcgccttcacctctgcttcggacatcggagtgctgcctttgaaattctcgtgcgagcccggcacaaccgcgccctgttcccaaaacaccggatagttgcggttgaggtccaccccgtccgtccgccagtccaaacctttcctgccgtctgtttcctgattgtttttccgtttgaactgatattgcccgctggtcaccacccggtagccttccggattgagggtggggatgatggtgaactcgaactccgccaggatttttttgatcttgccggagtgcttgtaattcaccgccagttctcgtgcccatgccagggcggtttccacacccaaaacctcgcttccgtggtgctgcccgatgatcaggactttgcgccgggcgtccggtgtgccgatgcagagggcgtggatgggcagcttttccgtgccgctgaagccgatcacccgcagggtcaccagatcgggatgcttgctggaaagcgcctgcatctctttttgcaaactttcccaagtctgatatcccttgggaaggggataaacgttgccaaccgctgcggcaaaagcgctcgcgctcaacgccagcaggggcagaatgagtaaaatactgtatttattcatcatgagaccaagctgccgcagccccgcatttcgtcaacaaaatccgatcttatgaaaagtagtggaaaggtggaaaggtgaaatggtggaaaggaactcgtggtgaagtggtgtcgtggtgacgtgtagatggtggatgcagcccagaacaagcccccaagccccaaaaccgtgtcatcccgggcaagccggggtcctcgacggatcggcaacgatccggtggggtgggatagcttgacccgggatccagtcttttagaaacaaccacccagccccgaaacaacctccccacagactatatccgtgtcatcccgggcagacggggtcctcgccaaagcgcgtagcggtttggcggggtgatttgacccgggatccagtcttttgaagcccaaaaacaaccaccagaatcccaaagcaaccgccccttttataaccccaatccgcgctcatctgcgcctctatcccgtatatctgcatgaaccacttgaaccttgatcctgtcttttcaagtcccaaacaagcacccagaccaaaaacaaccggcatcatttatttgacaaccgcaaaaaatatccaatacattccgcaatatccttcacacctccctcctttgctgctactggctttggtgccatcatccttaggtcatccctcaccaggttaaggatgactgccggaagacccacgccggagagggggatgcaaatgaggccgccctctataatatataggtgctatgcccgaaaggtcatggaaggatgaaagcaaacgcgaaccgccaaacccaaatttccaattgacaaatatctgccgcccagatattggttcagtaaggtaaggaataaactatatgtgtataaacagcaagaagataagtgataaatataataccctgaatagaacaaaagcatttgcaaatcagcagatgctttttttttaccccggaggatagcatggatctggacaagatcataaaacttgccctggccgaagacatcggcagcggcgacatcagcacccagtatctggaactggaacccctcaacagcaacgcctacatgatcgccaaggcggaaggtgtgctggctggggtggaagtggcgaaagccgtgttcctgcaggtggacggcggcctcaagatcaccctctaccgcaaggacggagaccgcgtggttcccggcaacgagatcatgcgcctggaaggcaaagccgccagcatcctgcagggcgaacgcaccgcgctcaactttttgcagcgcctgagcggcatcgcaaccctcaccgactcctacgtccagcgcctcaaaggcaccaaagccaggctgttggatacccgcaagaccactcccctgctgcgcggactggaaaagtacgccgtgcgcgtgggcggcggtttcaaccaccgctttggcctctacgacatggtcatgctcaaggaaaaccacatccgcgcctgccgcggcatcaccgaggccgttaaacgcatcaaacgccacaacaccagctacaagatcgaggtggaagtcacctgccttgaagaactggaagaagccgtgaaagccggtgttgaccgcgtcatgctggacaatatggacctcgcccagatcaaagactgcgtgaaaaagttcggctcccaagtggaactggaaatctccggaggcgtcaccgcgtccaacatccgctccctcgcccgcaccggagtgcagtatatctccagcggagccctcacccactcatataaatctttggatataagcctgctttttgataaggagtaaaatatggaagaacaactgcgcaccctggttcaaatgcaaaaactggatgaccgcatcggcgctctgcgggtcctgcaaaaggaactgccccagcagcttaacgaaatcatcgggcatgtggaccaggcaaccgcgaatttgcttgcctgcgaaacagaacgcgccgaactggccaaaaaacaacgctcgctggaaagcgacatcaaacagcatcaggaacagatcaaaaaatacagcaaccaactctccgaaatcaagaccaacaaagaatataaggccctcaacagcgagatcgcctttctcaaggaaaagatttcagagcaggaaagccaccaactggaactgatggatgccgaaaaccaggccgcggcgcgggtgaacgaagccaaacaggaactggacaaagcggaaaaagctaaaagcgaacaggaaggcgaactgcgccgccaaatcgactcgctggaaggacagatcgaggatctgcgcgcccaacgcaacaccatggcacgcaccctgcccttgcagatcgtgaagctctatggcaacatgatcaaaaacaaaggcaacctggcggtggtcttctgccgcaagggcacctgcggaggctgcggtttcgtgatccgcccccaagtccgcatcgagctgcagttgcgcaaaaagataaactattgcgaaagctgcggccgcatcctggtggaaccgtttgaagacagctcatcccccaatgcggcggattagccccgtccttttctgctaaaggcttttgagccactatgcttggctactttggtgtccgaaataatggacggcaagcccgtttgccgcggcaaaagtttatgagcaaagttgggcatggaaaggccaaaaaagcactttaacaagttaacccaaacattatacttgacagatttatagaatgtaggcattagaatttaagagccaaaatatgctggcataccatagcagtgaaagactatatattaagtgattatataacgactgatggcataaatgtctctatcggcctggaggaagagtccgccggtaaagactcccgaaaatcggtcaataattagaaacaacccaaatagaaaacgggaataaggagatatcctatgagaaaaacccttcttttcgcgctgttgctgatcctgggcttcggcctgatcagtaatgtctatgcccaggttaacgttaccataggcagcgggaccagcaccaataccacaaccggtgctccagccccctatggaacctactggaagaatttccgccagcagttcctgctactggcctcggaaatcgaggatgccggcggcggagcgggcaacatcaattcagtcgccttcaatgtggccaacctgaacaactgttccccgatgccgaactacaacatccggctcaaacacaccacccagaccaccctgaccaccgcgtttgaggatggggactaccagaccgtgtacacgcaggctgagtatatgcctaccgttggctggaacacccacaccttcacgacccccttcgtctgggacggcacttcgaacatacttgtcgatatctacacctccatcattccgggatcctggacccagaatgcctctgtttattactccaccacagctttcaatagttccctgcgcttccaaagcgacagcgctgatgccagcaccgccaccagcggaaccacaagcaccaaccgctccaacatcagattcaacatggaagccctggtggttaccgatccgcccaacccggcgctgctcatttcacccgcggacggcgctgtggacgtgatgagctctgctaccctcaactgggcttccggcggcggagcacccactggttacaaggtgcattttggcacaaccaacccaccccccttcatcgaaaacaccattgaaaacagctacgcccccaccctggacctccacaccacctactactggcagataattcccttcaacgccattggtgacgcggcaaactgccctgtttggagctttaccacgggtggcccggtggtcatcatgaccaacggcacacagtcggtgccggatggaatggtctattccttctacgattcaggcggccccgacggcaattatcaaaactcagagaactacaccttcaccttctcagccgccaaccccaactcgatcatttacgtgttgttcacagaattcaatacggaaaacagctgggattacctgaagatctacaacggaccggatacctccgccccgcagatcggacctgctgacggctacaccggtaccactctgcctgaagagatctttggctccaacgctgtgaccttcgtcttcacttccgacacctctgtccagcgccccggctggtcggccttagtgactgctggaaatctcgaccacgaccttggcgcgaagagcatttccggtaacagcactccctccgtgggcgatcccactacctacacggtggcagtcaagaataacggaaacaacaccgaaaacacctacaccgtgaagctgatgggcaccggaaacgtggagctcgcctccattcccggcaccaccatcgctcctcagcagaccatcgaattcggcctcacctggactcccaccgaaaccggcccgatacagatttggggtgaagtggtgcttgccaatgacggcatcgctgccaacaatcaaaccttgcctctaaacgtggccgtgcaggcagcgggaatcgtggccattaccctcggtgacggcagcgctgtcggccgcatgcccatggacatgtactggaagaactccctgttcgaggccatttacctgggctccgagctcaacattggtggcctgataaccggcatccagttctacaacgacttcgtcagcaacctgcccaacatgcccactaatatttggttaggcgagaccacccagaccgatctgtcggctggctggatcccttcaacccagctcaccgcggtgttcgccggtaacgtcgattatcccagcggtccgaacaacatcaacattgccttcaccaccccttacacctacgcgggcggtaacctggtattgctggtggaacgcccgatggataccgaatggcacaattacaacgataacttcctcacccagactggggaccttgcggcccgttctctgaaggtccagtcggactcccaggactacgatcctgccgctcctcctaccggtacaagtccctccgctatgttccccaagaccactttcttcctggtcgtggacgacatgggcgcgcttaccggtaccgtgcgtgacgcgaacaacgttgccatgcccggcgctacggtttccatcactggaacccccctcaccaccctcaccgacgccaacggcgtttacaacttcccctacgtggcgatgggaccccagagcgtcgtggccaccaaacacggctacaacgtcgttacccacaacgtaaccatcatcgaagatgaaactgtcacccaggacttcgtgctcacccaactgcctcaggtcaccgtgaccggccgcatcgtgggcagcgaccaacccacagttggcctggctgacgccaccatcagcctcacaggttacgagccttaccaggctacaaccaacgccagcggccaattcaccatcactggcgtctatgccagccagacttacgaatacaccgctcaagccatcggttaccaagctgccatcggccaagccgtggttggcaccaccgacctgaacatgggcgacatcaccgtgaacgaactggccttccctccctgccaagtggttgccacagaagcagcggactattcgcacgtaaccgtcacctggatggctccggatcccaatgctcagggtatctccgaagactttgaggaatacgaagacttctccctcaccttcgatccctgggttctggtggacgttgatcaaagcggcacttatggtatgaccggctacacttggccgaacgtctattcccccatggcttacatgatcttcaaccccagcgctgccactccgccggttaccactattaccgcccacagcggaaacaaaatggctgcctgcttcgccagcactgatgctgtcaacgacgattggctgatctctccgccgatgatcgcgaccgcaagtcagttcctgaacttctacgcgaggtcctacagcgatgcttacggcctggaacgcttcaaagtgggtatttccaccggcggcactgcccccgcggacttcaccatcatcagcggccccagctacatccaggcgcccattgaatggacactgtacagctatgacctcagcgcttacgctggccagaacatccgcttcgccatccagtgcgtttccgacgacgccttctacttcgtggtggacgatgtgagcgtgggccccgttcctacagccaaggaacactttgcctccgcttcctccttcagctcccgtaataccaacacccagagcttctccaccagttcaattgttaccagaagcattggaaacgcggcttcggcatcccgcaacgtgggaaccagccatgccaataacccccgtattcaggtaccagacttccagatgttcactccttccaattcggaccgcgtacttggtggatacaaggtctatcgcctgcttgctgacaaccaggacaacgagtcactctggacgaccctgaccccatctgtcattcccagcactaccaccacctataccgacaacgcctgggccccgctgccttccggcgtttacaaatatgcagtcaaagctgtttacaccaacaacgtcctgtcccccgccgtcttctccggtgagatacacaaaggcatgatgggcaccctgaccggtaccgtgaccgaattcggcaccaacgtcccgatcgaaggagctaccatcaccgccggcgattacagcggcacctccgacaacaacggacattattccttcagcgtctatcagggagtttacaccgtcacctgctcgaaagtcggctatcaggccgcttcccagaccggtgtgagcgttaccggactgcaaaccaccacccaggacttcgtactcacagagatcaccctgcctccttgcgcggtggaagccgtggcagtgagcaacagcttggtcaacttgacctggatggagcctggcactggcggcggcgaatggatctactacgacaccggcgaaaacgatgacagcatcggcctcgtctccggtggtgaattcagtgtcgccattcgtttcccgccctccgctcttaccgactatgccggcatgagcctccacgccatatccctcttcccaggcgatgtgggcacctactccctgcgtgtctggaccggtggcaccgccagcgctcccgaaacccaggttgttgaccaacccttcaccgtgcaagccgtagacacgttccaaaccgtggttttggataaccccgtgcttatttcaggcaacgaggaactctggtttggctacaacgtcagccatgctgcgggcgcctatcccgcaggctgtgacggcggccccgccaccaacggcttcggcaacatgatctacaactccggtgaatgggcaactctgaccgacctggctccgagcctcaactacaactggaacatccgcggctacgtgggatattcagctcccaacgatgtgtgcgcgatcgatcccagcatcctcaaacacatcccgtccgacaacatcaaagccagcaaagacatcagtgcctgcaaagacaacgaccgtgtcctcgtcggctacagagtctggcgcttgctgcaaggccaggaaaacaacgattcagcctggactcagctcaccaccggacccatcaccgcgactgcctggccggacaacggatggggcggcgtgcctgacggctggtacaaatgggctgtgaaagccatctacaccggcgaagcgcaatccctgccagccttctccaatgctgtgcagaaacttacccagatcggaaccattgccggtatcgtccgcgatatggccaacgcccccatcatgggagcaaccgtatcttgcggcgacgtgactgccaccaccaacgccagcggagcctacagcatgcaggttcccgcgggcacctggagcgtaaccgccagccacccgaactacacacctgtcacccaggacggagtgattgtcgttaccaaccagaccaccacggtgaacttccagctgccgatcagcaatgtgctgctctcggacggatttgagtcctacgaaaacttcgttatcgaattcgcgccctggaccacggttgacgttgacggcagcgcgacctatggcatgaccaataccacctggcctaacacccaaacaccacaggcctacatcatcttcaatcccagtgccaccactcctcccgccactaccatcgtacctcacggaggagataaaatggcagcctgtatcgccgcaactacccctcccaacaacgactggttgattactcccgtactccacaatccgctggaacttcgcttctgggcacgctccctgacggcgcagtacggaggactggaaaagttcaagatcggtgtctccaccactggaaccaacccctccgacttcaccatcatcagcggcagcactcccctcgaagctccccttgattggacagagtatgtgtataatctcagcaactacgatggtgacacctacgtgggcatccagtgcgtgtcccatgaccactggatcttcatgctggatgacttccatatcaccggcagaactgacagcgacgatcctatcgtccctgtggtcgccaccgagttgcacggaaactacccgaaccccttcaacccggaaaccaccatcagcttcagcgttaaggataaaggccacgtaaaggtcaatatctacaacgtgaaaggccaactggtgaagaccctcgtgaacgacaacatgaacgccggcaagcacaccattgtgtggaacggccgtgacaatgctggtaaagctgtctccagtggcgtctacttctacaagatgagcgctggcaaatacagcagcaccaaaaagatgatcatgatgaagtaattcatcgggatataacctataaccaagccccgggaccgaaaggttccggggctttttctactctcctgaaaagaacgtggatgacaggatcgactggatctttgaaggtggaaaggtgaaaaggtggaatggtggaaaggttcccccgaaacaagtccaccaggctatatactgtgtcatcacgagtggggtggcaaagtccgtttgccacagagaccggaggtctctcccaaaaaggcaactccgttgcctctgccgaacagacttcggcagcccttaagttatctgcgtatatctgcgtgaaccgcgtgaaccacttgaaccttgattctgtcttttcaagtcccaaacaagcacccagaccaaaaacaaccggcatcaattatttgacaatcgcattaaatatccaacacattccgcaatatgcttcatagcgccgtcccttgctgctactggctttggagtcatcatccttaggtcatccctcaccgggttaaggatgactgccggatgacccacgccggagaggggaatgcaaatgaggcccatccctctataatatataggtgctacgataggtggaaaggaggacttcgtggtgacgtggtgtcgtggtaacgtggtgctgtcggaaaagagatagaacgcggatgacaggatcgactggatctttgagagtggaaaggtgaaaaggtggaatggaggaaagtttcccccgaaacaagtccaccatgctatatactgtgtcatcatgagtggggtggcaaagtccgtttgccacagagaccggaggtctctcccaaaaaggcaactccgttgcctctgccgaacagacttcggcagccctggtccgaaacctccccccataatactaatccgcgctcatctgcgcctttatccgcgtatatctgcgtgaaccgcttgacccgggatccagtcaccccagaggagccacccccgtttcccgcctgttcagcgtgcagacagcagtcgtgtcaggaaagcttgtccagttcttcgcggacgtttttgcagcggggatagtctttgccaaaggtgttttcccagatgctcagcaccctggtcagtagttcccgggcggtgtttgtgtcgccttgtctggcgcgcagcctgcccagagagaagaggtaatgggctgtctgggaatggttttcgccatagtggagggtatggccgtctatcgcctgcttgagcagtggttccgcttcttccaggcgtccctggcgcagcagcacactgcccagatttccggcgcagaccgccgtaaaccagtgcccctgtgggaaaaggctttccatcatttccagcgcggcgcggagcatctcctccgctttgtccggcctgtccatcagactgtagagcgaggcgaggttgttcatgcggtctgccacgttggaactgggcccggggcgtttttcgatattcagcgagcggcgcagcagtttttcagcctgctcgtagcggctggtatctttgtaaaagcgtcccaggttgttcagatagggggagaggcgggggctgcgtggcccgagctggcgggttctggcctccaccaccttcagatagagcggctcggcatcgtccatgcggtgcatatagtgatagagcagggccagatggaagagccgttcgatgtgttccgggctgtccccgccccaggcctggcaggacaactcggctgccagcagcatacattcctcaatcttggccagcagcatgcggtcccagaagtaatcggccgccatctcatagtaatgggcggcttttttgagttccccggcggctttgaagtggcgggcgatctccgcggaatgctccttgagtgcctgttcaaagacggtttccatggcttcggcggccgccaggtgcagttttttaagctccttttcgcggatgctggcatagaccgccttctgtaacaggctgtgggaaaagatgtaaaagagttcatcggcatcctgccagattttccgtccccccgctttgcccagttgctggatggggttgccttcgagcatgtgggagaggaggacaacattgaagcggaagcccagcacactggcgccgcggacgctttcctgaacctttttggagagccgggcaatgcgccgggaaatcacctcgtcgatgcctcccgccgccgcttccaagccctcttgcgctatttcgccgtggggactgagcagcttgttttccagcagataagcggcaagctgttcggcattgaaaggattgccgcccgcgcaggcgtggaaagcggaaaaggcctcgcggggcaggcggggaaggcccagcagattgaggtagagcttgcggctggcgctggagttgagggagcccagggcgaggctctccaagccatcttttttgacggcaagctccgcgggcagcctgcccttttccgtccgggcggtagccagcagaaagagcgggcgcacgccgtgttgccacagcagttccaggaattgacggctcaggggatcgagccattggacatcgtcaataaagataagcacaggggatttggcgcacagccagcgcaggtaatccagccaggcctgctgctgacggggcagcctggcttcgggggcgatcccgcgccagggcgagccatcccaggagagattcagcagcgaggcgagggcggcttcgcaatcctgtcccagcgaggaaccgcgggtgcgcttttgccacgcttcgcggaaatgctgcaccgcctgcgcgggagcctcatcctccaaaagccccaaactggcacgcagcaactgggatacgatatccagagggaggggggaatcctgcctgcaagccagcagatacacctgccgccggggagtctcgaaggcgcgcaaagcttcgcgtgccaacctgcttttgcccactcccgccgttccatgcaccaccatcgcctggggcgaggaggccgccaaaccatcgcgtatcctgctatgcagcagagcggtctccttctccctgccaatcatgcaaagcggttgtccggtgatcagttgccccggcagcatgcccagacggtaggcgcggggcgcggcttttgaggcggctttttcccttttgaggggggtgaagatgaaggagttgtgctgctggttgcgcagcttgtggtcggcgagggcttcgccggggcgggcaagctccaggagcttctgggcgcgggtgatggcttcgcccgggaagaaggttgccttccacaggtctttgccggcagccatggaaaagatgtagccggtgcagcaggcggcgcgggctttgtggcgcgtggcagcttccaaagccaggcggcaggcgcgctgcattttgttgaccttgttgtgggggaaatcgaagagcaggatggcatgcagccgcttgtgccgcacatagatggctgccaaaaaggcgtcgtagatcaccgccagcagttccagcgcctggatggttggctccagggggccgtccggaggctcgtccaggctgaggcagcagcaaacgctgtgccggacgtcagccgcgggattgagtctgtgaaagcgggaatgaatgaagtggtggccgtgttgcttgcccaagcgcttcctttccggaatatcaggcaactggggaaagggcggatgctcggcaagtttgccaggcctggcatccaactcccagcccagtctgttcaatgcctggggagagtaataaggttggttgggctggccggggttttcacgcaggacatccagttggggagaccagaacacatattcaaactggagggggttctcaaagatgcgccaggacagggtgccaaaacccacggccaggcggattacattcggcattccatgatgggggctggcgtagctgttgatcgcaccgatagtgtgattgatgcgtgccagcagcgccgcgatcagcaccggagtgctttccggcaacagggcgtggatgcagtttccctcatactggaagagcagtccgcctgcgttcctgatcaggctcagcatcctttcataggcttcggtgaaagttgcttccatcctgtcaatcacctgctgccgctgcttgagccttactcctttgatattgtaagtggcaacggtgcaaaagcgcaggatatagccggtgatctgcccctgcaggatgttttgctcatactgctgcaggatgtagctgggcaccacgcggttcatatctggctacctgccttgcctggcttaactataatctcctttctgcctacttatcccccaggctcagattggcgaaggcggtgagggtgatctccgcgtccgcgctttccagatagctgacgcgtgcccggtcgcccgcgcgggtgatgggcagacggctgctcaggttgctggaggcgataaagattatatccggcgcttcggtcagggtaaggtagtagtaggtgcgtccatccgtggtgtccgagccaaagcgggcgatggagcctgtgagggtggcctgcttgtccgctgcctccggggatatccccatccggcttccggccagggccatctgatagttgtcgcgcgcgctgcgcacgctttcacccactcccaccagggaaaagtcgcgcactgaaacgaagctgaacatcttgattagcccggcgctgtccttgagggtcataaaataggtcggcttgccgttcatgttcaccaggatggggaaggtggcatagtatttgaagttttgcaccttgccttcggcggagcgcatggcggcagtctcggtggcaccggagaccaggtagaggtggctgcttttggtgcgggtgtccgtgagcgcaaagcccaccgttccctcgtccgaacccacgctggtgaggccggagtagaaatagctgcgctgatcgcggccatagatcacgttgtaaccgggcgtcacccgcagcaggtcgcgtttgccgaacacgctgttccaaaagccgtgcacatatttgccccaccaggaaagctggggaagcacaaagtaggagggctggatgcggtcaacccaggcgggaatcttgctgtcgtcatagatgccgccgctttttttgaggggaaagtatttgatctcacccgtgccggcatgcacgatggcgagtccggtggcttccggggcactcactccgatcttgtgggtgtaggtggtgatggtccagtagggttcgccattgtcgtccagttcaaaggtatcgcctgccaggccgatgcccgcgaagccgttccaccagagatggcggtagaggtcttgtccaaagtaggcgttgcgctgatagcggatttggatgggtttgcctttcagctcgcgcacaaaggtgatatcctgcggattggtggccgagaccttgatgtagcccggggtgcctttgcttgtgttggtgatccacttccagaagccgctgtgcagcaggggacagacccagaaaagcttgccatccaccatctggatggtcgggttgccgagcaccacccggctgccgagggcgaagtcctcgcccagtttcttggctgccaaatccttggcgaaagcggaatccaggatcggcacctgatccagattgaccggcgccaccaggtcggaaaactcggtcttttccacctcgccgatcatgcggcggtagctgccggaattgaagatgccggaagagaagaagggcgccaagatcagccacagcgccagaaggggatagaccacatagaggatcttgcgcaggcgccggattgccagcagcggagccaggcagatcatcagggggacgatccagtccaaaaagcggatatgcagcaccggaagcacaaagtaaagcataaaacccagcagcaggacggacagcactatggcaggcagggctttgatcctgaacttgggaaacttgatcacgacaggtttgggcgtttgttgttgaaacatggtaacctccctgaactaagctttgtttttatactctaccagatggcggcggatttgtcaagccggaatcgctgcccgcctccaatacagaatggaaaaaagtggactcggctcgaagaccgctcctatccttgcggatacagaggcgcgaccgcccgctcaaacactccctgaaccttggaaatggccagcccgtaattggtgatcggcactccgcgccgctgggcttccacgatgcggcggctcatctccatctggttgagcatgcaggctccgcagtggatcaccagcgcgaattcctccagattgggcggaaagtcgtgtcccgcgtaaacttcatactccagttccttgcccgtgaactggctcagccagcgcggaatcttcacccgcccgatgtcatccgcctgcacgtggtgggaacaggcttcggcgatcaggatcttgtcgccgtcgcgcagcttgtcgatctgcctcaccccttccgccaggacgtccagatcgcctttgtagcgggcaaagaggatggaaaaggtggtcatcttcacctcggggggcaggtcattcaccaccttcagcaccacctgcgaatccgtgatcaccagatcaggcggctccttcagggtttgcaaggcataggccagttcccgctctttcaccaccgtcaccaccgcgtcgtgatccagcagttcgcgaatcacctgcacctgcggcaggatcaggcgtcccttgggcgcggcgaggtcgatgggagtcaccagcagcaccctgtccccggccttcaccaagtcacccgccagggggcgctcctccagcagatgggcgggcgccagcttgatcagcagttccttggcggcatcgatgttttcccccttgagggcggagacggagacccagggcagtccccgttcctcgcaccaggcgatattggcgggggcaggctcgcgcaaatccctgtggttaaagaccattaacagcggtatcttcatctcgcggatgcgtttcagggaggacagctcgctctccgcgaaggggcggccatcgttcacaaacacggctatgtccgtgcggtaaagtatcttataggtggcgagtacccgtttttcgcccagttcgccgctgtcgtccagtccagcggtgtcaaagaaggtcaccgggcccaggggcagaagttcatagcgtttgtccaccgggtctgtggtggtgcccggggtgctggaaacgatggctatctcctgtcctgccagggcgttgatcaaggacgattttccagcgttgcggttacccagcagggtgatgtttacgcgttctccgcggggtgtgctcatctatcttctcccaaaaagtcttgcggcttgcggccgctaatagcttttattatcagttctttcatgtttctttccttgtcggactggataccagcccatgtaaaaataatatatgtgaaaagcgcgaatctgtcaagcaaagagaattctggcagacaggggcctgtgtttttgatatatccacaaattacacaaattaacacggattaaaagaacagaataaggacaagtgtccagcctaaaaacaacaaccagaccctgaaacaaaccgccaccaagccctaaagccgtgtcatcccgggctgtcggggtcaccgccaaagcgcgaagcggtttggtggggtggcttgacccgggatccagtcttttaaaaacaaccagcaagccccgaaacaaagcacaacagactaaaaaccgtgtcatcccgggctgtcggggtccccgccaaagcgcgaagcggtttggtggggtggcttgacccgggatccagtcttttagaaacaaacgcgtaaggttttaaaaaagcaggcacctttccacctcaaaacacctttccacaaattctccccccatatatataggtgctacgaccccttcatgccaggcgggaagcggatcccagggcaagtatatatatacttgcccgtaattgcgcggccatgggctggctgccctccctttcccctcgcgcgcgggtggctctcatttgcatccagcgttttggcgtgagtcttccttaggtcatccttataatttataaggttgacctaaggatgatggcatcaaatccagtagcagcaaaggagggcggtatgaaggattatgcggaaggttgtggtatttttgtggaaaggtggaaaggtgcccccgaaacaagtccaccaagttatattttgtgtcatcacgggaagtcggggccccctctggggtggcttacccgtgatccagtctttttaaaagaaacatccacaaattacacaaattaacacgaattaaaagaacattaaagagtcaacacacccgactccggaacaaaaccctccagactaaaaaccgtgtcatcacagcctgcgagccgtgatccagtgcccaggtgtggcaaagtccgtttgccacagagaccggaggtctcttccaaacaggcaactccgttgcctctgccgaacggacttcggcaacccttatattacaccaatccgtgtcaatctgcgccctttatccgcgtttatctgcgtgaaccgtggaacccgggatccagtcttttggaatgtttgaacttcgctgaaaacatttttcgctaccaggaatgaaaactggacaacaaacgcagcttgggatatctgacactaagagtgtaattcacacgatcaataagaacatagcgtgctgtgcatacaaaacatattaccgacggacttctgttctgaaatatggacgttttgaacttggtaaacagtccgtatatggactaccagctgggacttgccattaggcatatgcccgaatgtaaagctatattcttatataacgcattgtagacagcacaggttgttctctgctctttccatattacactagtggtcatcatttcaccagtaggggtttttttacgcttttttcccgggagttttcatgtaaagcaccctactggacaaagagatgggagccggaaaacacagcctgaactgggacggcaccgactccaacggcgcccaactggcaagcggagtctatatctaccgcctcagcaccggaaagacgagcgccagccgcaaaatgatattgctgaagtgacggacagccgcccttccaagtccgataattaacttgaaccgccgcgcattacacacggcggttctttccaacaagccaagtatcagcagcgggaaaactgcgctgaaaaagccgctggtggggctccgtaaaatgggagtggaagccgccgcatggaacaccttgaaagtaacaagataccgccccaaattgatctttcctaacccaaaatccgcaaagcaaatttcttgacaatgatctttggcttaaatataaggttcctatcgaacaaaaggagcatgttatgtacaatcttctttgtgataattgggtaaacgtggtctatctttcgggcaaaccagatagaatatctttagttcaaactcttgaagacgcacactgtctgcaactggcatacagcaatcctatggaccggttcgctgttttcagattcctgcttgctcttggctactggtgtttcgccaacaccaacggggagcctgaacctgataagccgcttccgacctcctggatatcctggctggaagaaaacaaggggtatttcgagctttttggggatggacagagatttttccaagccgatcccagttccaggatcagagccattaccgaccttattcatgagataccaacagctcacaacctatgccatttcaatcatgtcaccgactatatcgatgggctctgcgaagcttgctgcatcaagggactgctgagattacctgtctttaccactgtcggtggcagagggataggcgcgggaatcaacaacactcctccattttacctgctctggcatgcaaatgacctcgctggcatgctggttcaaaattggcaaccctgggataatatggggattccggcatggttgggttcttttcaaaaagaaagcaggaaagtgggcttacttgccggaatgacctggctgccgcgcaaggtgcatctgcatgatcctgtctcaggtcaggcagcatgttgttcctgcggcttaccctccaaagctctcgtctattcctgcagcataaaacctgaaccagtgccggaaggccttaaatggaaagaccctcatggtgtttacaccgatcagggaaaaagtctccagtccaaaatcaaactgatgtccaatgatagatacactttcgcggaccgggattggtatagcccgttgttcagctatttgcacgcggaaggaaactccagacaaggaaaactatggttggttggatttgccagcgataaagcaaaaagcatagacatctgggacaagatcatcgagcttgagggaactgatacaaatgatgagctactggctcaattggcaaacagggctactgcccttaatgccatgcgcaagaagcctctcagaggtgatttcaaaaagtcagtgggcactccccagattgctgacattatcccccacgccgaaagcagaattgccatcaatgcgggtaaaatgactgagaacaggggctattcctggcaggatgccgatactgaatacggagaactgctcaccaaggttgcatgctctttggagccggctcaaacagtggacgccaggctcaagagaggtaaattcatttcccgcaagccctggccagttataccagaatccaaaacaaaacccgcagaggaggaccagaatgaatagaggaaccgttgacttcattgcaagcctggagaacctcaaagaaggcgatttgggcattcttagaaaactcaggggagcccggcttgatgaaaagcttcccggatttgacctgttttccgccctatggtggcctttgcggcaaaagaatcaacgcgctcccaagcgtgaagtggcttggttgatcgccaaactttttgctgaattccgctttgaacagcgcgagggagccacattgcccattcttatgggaggcatctgccggaagttggaacccaaaaaggaattaccccgtgtattggcacgctttgatcaactcgcatcgcttgacattatgcagatggaagagccgctgtcggtcattatgggtatcttgcgcaagcaccagcaggtctgcctggactgggtagggcttactgatgttctgtcattttgggagcaggaacctgtcaaaagagaatggtcggattcatttattaaagcatacaagatcaacaaggaggattcagatgttgattgaaattcatatgattcagaatcacagcccggcaaatcttaaccgggacgacttgggcgcccccaagacctgttatttcggtggagtattacgttctcgcatctccagccaatgcatcaagcgcagcatccgttttgccccggaattcgcggaccttagaggaggtatccgaacaaggcgtctggcagagaaacttgaagaaatgctggaaaacaaagataagaagctggttgccaagtttcttgaagcctgcggaatcaaaaccaaatcttccaagaaagctgcaaaaaagtccgaaaagatacccgcggaagccgatgaagatcaggatgagcagcaggcggctgatacatctgacatgctggtttttaccacttatgatgccctgcgccaaatggcagagctgctttccgactccaaactaagtgaaagcgaaaaactgctgcagttcaaagatttgctcacaaactgcgtccattctccggatatagcactttgcggcaggatgttggagaccaaagagcttaaaaacactggcgttgaaggcgccctacaggttgcacatgcgatctccacccacattgccagacctgagatagactattttgtggcggccgatgatgttcccggtgaagacgccggagcgggtcatattggcgaatccatgtttgcctcagcctgtttctacaaatacttctccattgattgggaacagttggtcaagaacctgaaaggggacacgaatctggcagcccacaccgtgggtgcctttctcctcgccgctgccaaaaccaaccccagtggcaaacagaacagcttcgccgctcataactatcccgatggcatccttgttgagttcaagaattcccctattagctacgccaacgcattcgtcaggccagtttccgtggtcaaggaatcggacctggtggaacaaagcatcggccagctttccaactacgtgaacgacatcaggcttggctattatgatgagcaatccccagttatcagcttctggttttctccaaacaatcgctattcccttggcaatgagcattccaaactggcttccagaaacattggcaacctcaatgagcttgtaggcgctgtgttggattatattggcggcttcaagtgggaagaagttcagaaaagcaaggcttatgttggcggctgacatgagtgcgccacccaacaccttattcttgcgcttggagggggctttgcagtcttggggcagcaacgaggctaagtttgctttgcgcaggactaccgacgctcccacaaaatcaggtgtcctggggctgctttgcgcggccatgggaattgggcgcgcggaggctgctgattcatggctcccaaaactcgccaacctgcgcatgggcgtgcggatagaccgccccggcatacgctggtgggacttccatactgttggagcgggacaaagaatgcgcatggcagagctgaaggcacccaaaaaaccttccatggttggagctgccctggctgataccctgacaccaagcaaagtaaaaaccagggcagagaccttgctctcacgccgcgaatatcttgccgacgccagttttctggtcgccttgcagggtgagccggaacttgtggaaaagctctccgccgctctggccaagccggtctgggcaatttatctggggcgcaaatcctgtcccccttcacgtcccgtgggcgagcatgctccgggcttttataacactttggaggaggcgctgtccgcggttcccctgcaaaagcgctggcacaatgaacccctgccgcaaatactgccttgcgtcatggactggatccccagccaggacggagaacatgcgcctgatgacgcggagattcattacgatctgccggtttcttttcagccgccccgccatttgccgcgcttcgtgatcaggcgtgagctggttgtgggagaggatgtgcaagtgagcagggaaaccggaaccagcgtttggaggcccaaaggaacccgggcggattataacaattccgagtataagaaggtcagggcggagcggcttgtgatggaccatgccgcgtgcatggtatgcaaagctcccgccacgactgttcaacacgtgaattaccgcagggcgggaggcaaggaaataccggaagacctgcgggcgctgtgccgcctctgccacgacgcctgcaccatgctggaatacggttccggcatgaccaccgaccgcatcgacccctgcgaccccatctggcgggagcgaatactggcaaagcgcaaagatatagtcgagttccgttcgcgcgggcagcgtttccgcaaaatgaagccagaggaggaaaacggatgatctacttgtccaagctattgatcgatactggaggcaatccagaccgtccccgccccggcagaaagtggctggacaatatctataacgtccaccgccgcctttccatggcgttcccttcaggtttgcgccgggagcaggatccgcatttcctgaagcccttttcgccaaacgacttccaaaaaactcccttccttttccgggtcgataacaacatcgacggaaacgataaaagggcgattattatcgtccagtccgttcttgagccggattgggattattgcttccaaaacgcgcttgatttcctggcagcgccaccggaaacaaaggagtataatccagagtttcaagcgggacaactgctccggttcaggctgcgggtaaacgccagcgtacgccgtcatattcctgagaaggtgcaacaggacggtcaaaccatagaaactggcaacatcctgcacaaaagggtttctctcacctgggatccctcttccaccccggatcaggcccttgccgactggctggctgccaaaagcccaaagctgggcttcacccttcagcgctgtgagcttcttcaactgggttgggtttatggctccaagcctgaacctaaaaatgtcaaagcaaaggaacagggacagggctactggcgtgaacacacatacaatcctctgcgcttccgttcggctctactggagggaattctcaaagtggatgacccgaaactgttcctggaaacgcttagaagcggcattggaaaagcgaaaagcttcggctttggcctgctgtccgttctgccaatcaggaatgatgaataaagacctgcactctatcccccggatcagagatcggcttagctatctctatgtggagcatgccaaaattgatcagaacgggcaagccatcgccattcacgatgccctgggagaaaccccggttccttgtgccggcttggctatgctgatgctgggaccgggcataaccatcacccatgcggcaatactttcactggctgcctgtggctgtctggtagcctgggtgggggaacatggcgtcaggttctatgccgcaggcacaggtacaacccgtagcgccgtcaatcttatgaaacaggcaaagtactgggcagacccggttttgcatttacgggttgtgcgctccatgtatcagttgaggttccaggatgagctttctcctgatttaactttgaaccagatcaggggcaaggaaggtgcccgggtgcgcgatacatatttccaactctcccaaaagtatggtgtgcccatgcagggcagaaactatcaaagagacaactggaataaagcggatcccataaaccgggcattatctgtggcaaactcctgcctctacggcatatcgcacgctgccattgttgctgcaggattctctcccggattgggctttgtccacactggcaagcaactgtcatttgtctatgatatcgcggatctatacaaaatggaaatggctgctcccgccgcattccgggcgaccgctgaagggatcggcgaactcgaccgcagagtcaggcttgcctgccgtgatgaattccacaggcagaatctactcaaacgcattgtcgctgacattagttctctcttcggtgatattatgccagaggatagcccggatgactgttttgccgaagaaccagccttgcctggaggactctggtctccagatggagaagtgtccccagggggcatatcttacgggcaggatgatctgccaaaggaagattgatggtggttttggttttggaaaacgtgccgaactccttgcggggtcagatcacacgttggctgctggaagtaaaggcgggggtgtttgtgggtaaagtctcagcaatggttagagacaaactgtgggacaaggttagaagcaactgcagcggtgggacttgcctgatgatctggagtagccagaccgaacagggttttgatatcgaattctggggtgccgcatcaagagtcgttacggaatgggagggtatcaaactaatgaccaaacatccttgaactaaggcttgaaggagctcaatgacctgttagctctctattgatcaagtgtattccccacgcatgtgggggtgaaccaggagaattaaaatgaatctcaaccagtatcaagtattccccacgcatgtgggggtgaaccgtgatagagcagctgggagaccagtcgtctatcgtattccccacgcatgtgggggtgaaccgttcaacactccgattgcagagcgcgctgatgtgtattccccacgcatgtgggggtgaaccgaccaaattgctgcttcaaacgacaatcgtgttgtattccccacgcatgtgggggtgaaccggttcaacaggcaaacgtattgtaaagtgttaggta

SEQ ID NO: 957 - DNA, 103604 bp, Artificial Sequence
  Synthetic Oligonucleotide
  misc_feature (1)..(17019): n is a, c, g, or t
nnnnnnnnnnnnnnnnnnnnnnnnnnnnnnnnnnnnnnnnnnnnnnnnnnnnnnnnnnnnnnnnnnnnnnnnnnnnnnnnnnnnnnnnnnnnnnnnnnnnnnnnnnnnnnnnnnnnnnnnnnnnnnnnnnnnnnnnnnnnnnnnnnnnnnnnnnnnnnnnnnnnnnnnnnnnnnnnnnnnnnnnnnnnnnnnnnnnnnnnnnnnnnnnnnnnnnnnnnnnnnnnnnnnnnnnnnnnnnnnnnnnnnnnnnnnnnnnnnnnnnnnnnnnnnnnnnnnnnnnnnnnnnnnnnnnnnnnnnnnnnnnnnnnnnnnnnnnnnnnnnnnnnnnnnnnnnnnnnnnnnnnnnnnnnnnnnnnnnnnnnnnnnnnnnnnnnnnnnnnnnnnnnnnnnnnnnnnnnnnnnnnnnnnnnnnnnnnnnnnnnnnnnnnnnnnnnnnnnnnnnnnnnnnnnnnnnnnnnnnnnnnnnnnnnnnnnnnnnnnnnnnnnnnnnnnnnnnnnnnnnnnnnnnnnnnnnnnnnnnnnnnnnnnnnnnnnnnnnnnnnnnnnnnnnnnnnnnnnnnnnnnnnnnnnnnnnnnnnnnnnnnnnnnnnnnnnnnnnnnnnnnnnnnnnnnnnnnnnnnnnnnnnnnnnnnnnnnnnnnnnnnnnnnnnnnnnnnnnnnnnnnnnnnnnnnnnnnnnnnnnnnnnnnnnnnnnnnnnnnnnnnnnnnnnnnnnnnnnnnnnnnnnnnnnnnnnnnnnnnnnnnnnnnnnnnnnnnnnnnnnnnnnnnnnnnnnnnnnnnnnnnnnnnnnnnnnnnnnnnnnnnnnnnnnnnnnnnnnnnnnnnnnnnnnnnnnnnnnnnnnnnnnnnnnnnnnnnnnnnnnnnnnnnnnnnnnnnnnnnnnnnnnnnnnnnnnnnnnnnnnnnnnnnnnnnnnnnnnnnnnnnnnnnnnnnnnnnnnnnnnnnnnnnnnnnnnnnnnnnnnnnnnnnnnnnnnnnnnnnnnnnnnnnnnnnnnnnnnnnnnnnnnnnnnnnnnnnnnnnnnnnnnnnnnnnnnnnnnnnnnnnnnnnnnnnnnnnnnnnnnnnnnnnnnnnnnnnnnnnnnnnnnnnnnnnnnnnnnnnnnnnnnnnnnnnnnnnnnnnnnnnnnnnnnnnnnnnnnnnnnnnnnnnnnnnnnnnnnnnnnnnnnnnnnnnnnnnnnnnnnnnnnnnnnnnnnnnnnnnnnnnnnnnnnnnnnnnnnnnnnnnnnnnnnnnnnnnnnnnnnnnnnnnnnnnnnnnnnnnnnnnnnnnnnnnnnnnnnnnnnnnnnnnnnnnnnnnnnnnnnnnnnnnnnnnnnnnnnnnnnnnnnnnnnnnnnnnnnnnnnnnnnnnnnnnnnnnnnnnnnnnnnnnnnnnnnnnnnnnnnnnnnnnnnnnnnnnnnnnnnnnnnnnnnnnnnnnnnnnnnnnnnnnnnnnnnnnnnnnnnnnnnnnnnnnnnnnnnnnnnnnnnnnnnnnnnnnnnnnnnnnnnnnnnnnnnnnnnnnnnnnnnnnnnnnnnnnnnnnnnnnnnnnnnnnnnnnnnnnnnnnnnnnnnnnnnnnnnnnnnnnnnnnnnnnnnnnnnnnnnnnnnnnnnnnnnnnnnnnnnnnnnnnnnnnnnnnnnnnnnnnnnnnnnnnnnnnnnnnnnnnnnnnnnnnnnnnnnnnnnnnnnnnnnnnnnnnnnnnnnnnnnnnnnnnnnnnnnnnnnnnnnnnnnnnnnnnnnnnnnnnnnnnnnnnnnnnnnnnnnnnnnnnnnnnnnnnnnnnnnnnnnnnnnnnnnnnnnnnnnnnnnnnnnnnnnnnnnnnnnnnnnnnnnnnnnnnnnnnnnnnnnnnnnnnnnnnnnnnnnnnnnnnnnnnnnnnnnnnnnnnnnnnnnnnnnnnnnnnnnnnnnnnnnnnnnnnnnnnnnnnnnnnnnnnnnnnnnnnnnnnnnnnnnnnnnnnnnnnnnnnnnnnnnnnnnnnnnnnnnnnnnnnnnnnnnnnnnnnnnnnnnnnnnnnnnnnnnnnnnnnnnnnnnnnnnnnnnnnnnnnnnnnnnnnnnnnnnnnnnnnnnnnnnnnnnnnnnnnnnnnnnnnnnnnnnnnnnnnnnnnnnnnnnnnnnnnnnnnnnnnnnnnnnnnnnnnnnnnnnnnnnnnnnnnnnnnnnnnnnnnnnnnnnnnnnnnnnnnnnnnnnnnnnnnnnnnnnnnnnnnnnnnnnnnnnnnnnnnnnnnnnnnnnnnnnnnnnnnnnnnnnnnnnnnnnnnnnnnnnnnnnnnnnnnnnnnnnnnnnnnnnnnnnnnnnnnnnnnnnnnnnnnnnnnnnnnnnnnnnnnnnnnnnnnnnnnnnnnnnnnnnnnnnnnnnnnnnnnnnnnnnnnnnnnnnnnnnnnnnnnnnnnnnnnnnnnnnnnnnnnnnnnnnnnnnnnnnnnnnnnnnnnnnnnnnnnnnnnnnnnnnnnnnnnnnnnnnnnnnnnnnnnnnnnnnnnnnnnnnnnnnnnnnnnnnnnnnnnnnnnnnnnnnnnnnnnnnnnnnnnnnnnnnnnnnnnnnnnnnnnnnnnnnnnnnnnnnnnnnnnnnnnnnnnnnnnnnnnnnnnnnnnnnnnnnnnnnnnnnnnnnnnnnnnnnnnnnnnnnnnnnnnnnnnnnnnnnnnnnnnnnnnnnnnnnnnnnnnnnnnnnnnnnnnnnnnnnnnnnnnnnnnnnnnnnnnnnnnnnnnnnnnnnnnnnnnnnnnnnnnnnnnnnnnnnnnnnnnnnnnnnnnnnnnnnnnnnnnnnnnnnnnnnnnnnnnnnnnnnnnnnnnnnnnnnnnnnnnnnnnnnnnnnnnnnnnnnnnnnnnnnnnnnnnnnnnnnnnnnnnnnnnnnnnnnnnnnnnnnnnnnnnnnnnnnnnnnnnnnnnnnnnnnnnnnnnnnnnnnnnnnnnnnnnnnnnnnnnnnnnnnnnnnnnnnnnnnnnnnnnnnnnnnnnnnnnnnnnnnnnnnnnnnnnnnnnnnnnnnnnnnnnnnnnnnnnnnnnnnnnnnnnnnnnnnnnnnnnnnnnnnnnnnnnnnnnnnnnnnnnnnnnnnnnnnnnnnnnnnnnnnnnnnnnnnnnnnnnnnnnnnnnnnnnnnnnnnnnnnnnnnnnnnnnnnnnnnnnnnnnnnnnnnnnnnnnnnnnnnnnnnnnnnnnnnnnnnnnnnnnnnnnnnnnnnnnnnnnnnnnnnnnnnnnnnnnnnnnnnnnnnnnnnnnnnnnnnnnnnnnnnnnnnnnnnnnnnnnnnnnnnnnnnnnnnnnnnnnnnnnnnnnnnnnnnnnnnnnnnnnnnnnnnnnnnnnnnnnnnnnnnnnnnnnnnnnnnnnnnnnnnnnnnnnnnnnnnnnnnnnnnnnnnnnnnnnnnnnnnnnnnnnnnnnnnnnnnnnnnnnnnnnnnnnnnnnnnnnnnnnnnnnnnnnnnnnnnnnnnnnnnnnnnnnnnnnnnnnnnnnnnnnnnnnnnnnnnnnnnnnnnnnnnnnnnnnnnnnnnnnnnnnnnnnnnnnnnnnnnnnnnnnnnnnnnnnnnnnnnnnnnnnnnnnnnnnnnnnnnnnnnnnnnnnnnnnnnnnnnnnnnnnnnnnnnnnnnnnnnnnnnnnnnnnnnnnnnnnnnnnnnnnnnnnnnnnnnnnnnnnnnnnnnnnnnnnnnnnnnnnnnnnnnnnnnnnnnnnnnnnnnnnnnnnnnnnnnnnnnnnnnnnnnnnnnnnnnnnnnnnnnnnnnnnnnnnnnnnnnnnnnnnnnnnnnnnnnnnnnnnnnnnnnnnnnnnnnnnnnnnnnnnnnnnnnnnnnnnnnnnnnnnnnnnnnnnnnnnnnnnnnnnnnnnnnnnnnnnnnnnnnnnnnnnnnnnnnnnnnnnnnnnnnnnnnnnnnnnnnnnnnnnnnnnnnnnnnnnnnnnnnnnnnnnnnnnnnnnnnnnnnnnnnnnnnnnnnnnnnnnnnnnnnnnnnnnnnnnnnnnnnnnnnnnnnnnnnnnnnnnnnnnnnnnnnnnnnnnnnnnnnnnnnnnnnnnnnnnnnnnnnnnnnnnnnnnnnnnnnnnnnnnnnnnnnnnnnnnnnnnnnnnnnnnnnnnnnnnnnnnnnnnnnnnnnnnnnnnnnnnnnnnnnnnnnnnnnnnnnnnnnnnnnnnnnnnnnnnnnnnnnnnnnnnnnnnnnnnnnnnnnnnnnnnnnnnnnnnnnnnnnnnnnnnnnnnnnnnnnnnnnnnnnnnnnnnnnnnnnnnnnnnnnnnnnnnnnnnnnnnnnnnnnnnnnnnnnnnnnnnnnnnnnnnnnnnnnnnnnnnnnnnnnnnnnnnnnnnnnnnnnnnnnnnnnnnnnnnnnnnnnnnnnnnnnnnnnnnnnnnnnnnnnnnnnnnnnnnnnnnnnnnnnnnnnnnnnnnnnnnnnnnnnnnnnnnnnnnnnnnnnnnnnnnnnnnnnnnnnnnnnnnnnnnnnnnnnnnnnnnnnnnnnnnnnnnnnnnnnnnnnnnnnnnnnnnnnnnnnnnnnnnnnnnnnnnnnnnnnnnnnnnnnnnnnnnnnnnnnnnnnnnnnnnnnnnnnnnnnnnnnnnnnnnnnnnnnnnnnnnnnnnnnnnnnnnnnnnnnnnnnnnnnnnnnnnnnnnnnnnnnnnnnnnnnnnnnnnnnnnnnnnnnnnnnnnnnnnnnnnnnnnnnnnnnnnnnnnnnnnnnnnnnnnnnnnnnnnnnnnnnnnnnnnnnnnnnnnnnnnnnnnnnnnnnnnnnnnnnnnnnnnnnnnnnnnnnnnnnnnnnnnnnnnnnnnnnnnnnnnnnnnnnnnnnnnnnnnnnnnnnnnnnnnnnnnnnnnnnnnnnnnnnnnnnnnnnnnnnnnnnnnnnnnnnnnnnnnnnnnnnnnnnnnnnnnnnnnnnnnnnnnnnnnnnnnnnnnnnnnnnnnnnnnnnnnnnnnnnnnnnnnnnnnnnnnnnnnnnnnnnnnnnnnnnnnnnnnnnnnnnnnnnnnnnnnnnnnnnnnnnnnnnnnnnnnnnnnnnnnnnnnnnnnnnnnnnnnnnnnnnnnnnnnnnnnnnnnnnnnnnnnnnnnnnnnnnnnnnnnnnnnnnnnnnnnnnnnnnnnnnnnnnnnnnnnnnnnnnnnnnnnnnnnnnnnnnnnnnnnnnnnnnnnnnnnnnnnnnnnnnnnnnnnnnnnnnnnnnnnnnnnnnnnnnnnnnnnnnnnnnnnnnnnnnnnnnnnnnnnnnnnnnnnnnnnnnnnnnnnnnnnnnnnnnnnnnnnnnnnnnnnnnnnnnnnnnnnnnnnnnnnnnnnnnnnnnnnnnnnnnnnnnnnnnnnnnnnnnnnnnnnnnnnnnnnnnnnnnnnnnnnnnnnnnnnnnnnnnnnnnnnnnnnnnnnnnnnnnnnnnnnnnnnnnnnnnnnnnnnnnnnnnnnnnnnnnnnnnnnnnnnnnnnnnnnnnnnnnnnnnnnnnnnnnnnnnnnnnnnnnnnnnnnnnnnnnnnnnnnnnnnnnnnnnnnnnnnnnnnnnnnnnnnnnnnnnnnnnnnnnnnnnnnnnnnnnnnnnnnnnnnnnnnnnnnnnnnnnnnnnnnnnnnnnnnnnnnnnnnnnnnnnnnnnnnnnnnnnnnnnnnnnnnnnnnnnnnnnnnnnnnnnnnnnnnnnnnnnnnnnnnnnnnnnnnnnnnnnnnnnnnnnnnnnnnnnnnnnnnnnnnnnnnnnnnnnnnnnnnnnnnnnnnnnnnnnnnnnnnnnnnnnnnnnnnnnnnnnnnnnnnnnnnnnnnnnnnnnnnnnnnnnnnnnnnnnnnnnnnnnnnnnnnnnnnnnnnnnnnnnnnnnnnnnnnnnnnnnnnnnnnnnnnnnnnnnnnnnnnnnnnnnnnnnnnnnnnnnnnnnnnnnnnnnnnnnnnnnnnnnnnnnnnnnnnnnnnnnnnnnnnnnnnnnnnnnnnnnnnnnnnnnnnnnnnnnnnnnnnnnnnnnnnnnnnnnnnnnnnnnnnnnnnnnnnnnnnnnnnnnnnnnnnnnnnnnnnnnnnnnnnnnnnnnnnnnnnnnnnnnnnnnnnnnnnnnnnnnnnnnnnnnnnnnnnnnnnnnnnnnnnnnnnnnnnnnnnnnnnnnnnnnnnnnnnnnnnnnnnnnnnnnnnnnnnnnnnnnnnnnnnnnnnnnnnnnnnnnnnnnnnnnnnnnnnnnnnnnnnnnnnnnnnnnnnnnnnnnnnnnnnnnnnnnnnnnnnnnnnnnnnnnnnnnnnnnnnnnnnnnnnnnnnnnnnnnnnnnnnnnnnnnnnnnnnnnnnnnnnnnnnnnnnnnnnnnnnnnnnnnnnnnnnnnnnnnnnnnnnnnnnnnnnnnnnnnnnnnnnnnnnnnnnnnnnnnnnnnnnnnnnnnnnnnnnnnnnnnnnnnnnnnnnnnnnnnnnnnnnnnnnnnnnnnnnnnnnnnnnnnnnnnnnnnnnnnnnnnnnnnnnnnnnnnnnnnnnnnnnnnnnnnnnnnnnnnnnnnnnnnnnnnnnnnnnnnnnnnnnnnnnnnnnnnnnnnnnnnnnnnnnnnnnnnnnnnnnnnnnnnnnnnnnnnnnnnnnnnnnnnnnnnnnnnnnnnnnnnnnnnnnnnnnnnnnnnnnnnnnnnnnnnnnnnnnnnnnnnnnnnnnnnnnnnnnnnnnnnnnnnnnnnnnnnnnnnnnnnnnnnnnnnnnnnnnnnnnnnnnnnnnnnnnnnnnnnnnnnnnnnnnnnnnnnnnnnnnnnnnnnnnnnnnnnnnnnnnnnnnnnnnnnnnnnnnnnnnnnnnnnnnnnnnnnnnnnnnnnnnnnnnnnnnnnnnnnnnnnnnnnnnnnnnnnnnnnnnnnnnnnnnnnnnnnnnnnnnnnnnnnnnnnnnnnnnnnnnnnnnnnnnnnnnnnnnnnnnnnnnnnnnnnnnnnnnnnnnnnnnnnnnnnnnnnnnnnnnnnnnnnnnnnnnnnnnnnnnnnnnnnnnnnnnnnnnnnnnnnnnnnnnnnnnnnnnnnnnnnnnnnnnnnnnnnnnnnnnnnnnnnnnnnnnnnnnnnnnnnnnnnnnnnnnnnnnnnnnnnnnnnnnnnnnnnnnnnnnnnnnnnnnnnnnnnnnnnnnnnnnnnnnnnnnnnnnnnnnnnnnnnnnnnnnnnnnnnnnnnnnnnnnnnnnnnnnnnnnnnnnnnnnnnnnnnnnnnnnnnnnnnnnnnnnnnnnnnnnnnnnnnnnnnnnnnnnnnnnnnnnnnnnnnnnnnnnnnnnnnnnnnnnnnnnnnnnnnnnnnnnnnnnnnnnnnnnnnnnnnnnnnnnnnnnnnnnnnnnnnnnnnnnnnnnnnnnnnnnnnnnnnnnnnnnnnnnnnnnnnnnnnnnnnnnnnnnnnnnnnnnnnnnnnnnnnnnnnnnnnnnnnnnnnnnnnnnnnnnnnnnnnnnnnnnnnnnnnnnnnnnnnnnnnnnnnnnnnnnnnnnnnnnnnnnnnnnnnnnnnnnnnnnnnnnnnnnnnnnnnnnnnnnnnnnnnnnnnnnnnnnnnnnnnnnnnnnnnnnnnnnnnnnnnnnnnnnnnnnnnnnnnnnnnnnnnnnnnnnnnnnnnnnnnnnnnnnnnnnnnnnnnnnnnnnnnnnnnnnnnnnnnnnnnnnnnnnnnnnnnnnnnnnnnnnnnnnnnnnnnnnnnnnnnnnnnnnnnnnnnnnnnnnnnnnnnnnnnnnnnnnnnnnnnnnnnnnnnnnnnnnnnnnnnnnnnnnnnnnnnnnnnnnnnnnnnnnnnnnnnnnnnnnnnnnnnnnnnnnnnnnnnnnnnnnnnnnnnnnnnnnnnnnnnnnnnnnnnnnnnnnnnnnnnnnnnnnnnnnnnnnnnnnnnnnnnnnnnnnnnnnnnnnnnnnnnnnnnnnnnnnnnnnnnnnnnnnnnnnnnnnnnnnnnnnnnnnnnnnnnnnnnnnnnnnnnnnnnnnnnnnnnnnnnnnnnnnnnnnnnnnnnnnnnnnnnnnnnnnnnnnnnnnnnnnnnnnnnnnnnnnnnnnnnnnnnnnnnnnnnnnnnnnnnnnnnnnnnnnnnnnnnnnnnnnnnnnnnnnnnnnnnnnnnnnnnnnnnnnnnnnnnnnnnnnnnnnnnnnnnnnnnnnnnnnnnnnnnnnnnnnnnnnnnnnnnnnnnnnnnnnnnnnnnnnnnnnnnnnnnnnnnnnnnnnnnnnnnnnnnnnnnnnnnnnnnnnnnnnnnnnnnnnnnnnnnnnnnnnnnnnnnnnnnnnnnnnnnnnnnnnnnnnnnnnnnnnnnnnnnnnnnnnnnnnnnnnnnnnnnnnnnnnnnnnnnnnnnnnnnnnnnnnnnnnnnnnnnnnnnnnnnnnnnnnnnnnnnnnnnnnnnnnnnnnnnnnnnnnnnnnnnnnnnnnnnnnnnnnnnnnnnnnnnnnnnnnnnnnnnnnnnnnnnnnnnnnnnnnnnnnnnnnnnnnnnnnnnnnnnnnnnnnnnnnnnnnnnnnnnnnnnnnnnnnnnnnnnnnnnnnnnnnnnnnnnnnnnnnnnnnnnnnnnnnnnnnnnnnnnnnnnnnnnnnnnnnnnnnnnnnnnnnnnnnnnnnnnnnnnnnnnnnnnnnnnnnnnnnnnnnnnnnnnnnnnnnnnnnnnnnnnnnnnnnnnnnnnnnnnnnnnnnnnnnnnnnnnnnnnnnnnnnnnnnnnnnnnnnnnnnnnnnnnnnnnnnnnnnnnnnnnnnnnnnnnnnnnnnnnnnnnnnnnnnnnnnnnnnnnnnnnnnnnnnnnnnnnnnnnnnnnnnnnnnnnnnnnnnnnnnnnnnnnnnnnnnnnnnnnnnnnnnnnnnnnnnnnnnnnnnnnnnnnnnnnnnnnnnnnnnnnnnnnnnnnnnnnnnnnnnnnnnnnnnnnnnnnnnnnnnnnnnnnnnnnnnnnnnnnnnnnnnnnnnnnnnnnnnnnnnnnnnnnnnnnnnnnnnnnnnnnnnnnnnnnnnnnnnnnnnnnnnnnnnnnnnnnnnnnnnnnnnnnnnnnnnnnnnnnnnnnnnnnnnnnnnnnnnnnnnnnnnnnnnnnnnnnnnnnnnnnnnnnnnnnnnnnnnnnnnnnnnnnnnnnnnnnnnnnnnnnnnnnnnnnnnnnnnnnnnnnnnnnnnnnnnnnnnnnnnnnnnnnnnnnnnnnnnnnnnnnnnnnnnnnnnnnnnnnnnnnnnnnnnnnnnnnnnnnnnnnnnnnnnnnnnnnnnnnnnnnnnnnnnnnnnnnnnnnnnnnnnnnnnnnnnnnnnnnnnnnnnnnnnnnnnnnnnnnnnnnnnnnnnnnnnnnnnnnnnnnnnnnnnnnnnnnnnnnnnnnnnnnnnnnnnnnnnnnnnnnnnnnnnnnnnnnnnnnnnnnnnnnnnnnnnnnnnnnnnnnnnnnnnnnnnnnnnnnnnnnnnnnnnnnnnnnnnnnnnnnnnnnnnnnnnnnnnnnnnnnnnnnnnnnnnnnnnnnnnnnnnnnnnnnnnnnnnnnnnnnnnnnnnnnnnnnnnnnnnnnnnnnnnnnnnnnnnnnnnnnnnnnnnnnnnnnnnnnnnnnnnnnnnnnnnnnnnnnnnnnnnnnnnnnnnnnnnnnnnnnnnnnnnnnnnnnnnnnnnnnnnnnnnnnnnnnnnnnnnnnnnnnnnnnnnnnnnnnnnnnnnnnnnnnnnnnnnnnnnnnnnnnnnnnnnnnnnnnnnnnnnnnnnnnnnnnnnnnnnnnnnnnnnnnnnnnnnnnnnnnnnnnnnnnnnnnnnnnnnnnnnnnnnnnnnnnnnnnnnnnnnnnnnnnnnnnnnnnnnnnnnnnnnnnnnnnnnnnnnnnnnnnnnnnnnnnnnnnnnnnnnnnnnnnnnnnnnnnnnnnnnnnnnnnnnnnnnnnnnnnnnnnnnnnnnnnnnnnnnnnnnnnnnnnnnnnnnnnnnnnnnnnnnnnnnnnnnnnnnnnnnnnnnnnnnnnnnnnnnnnnnnnnnnnnnnnnnnnnnnnnnnnnnnnnnnnnnnnnnnnnnnnnnnnnnnnnnnnnnnnnnnnnnnnnnnnnnnnnnnnnnnnnnnnnnnnnnnnnnnnnnnnnnnnnnnnnnnnnnnnnnnnnnnnnnnnnnnnnnnnnnnnnnnnnnnnnnnnnnnnnnnnnnnnnnnnnnnnnnnnnnnnnnnnnnnnnnnnnnnnnnnnnnnnnnnnnnnnnnnnnnnnnnnnnnnnnnnnnnnnnnnnnnnnnnnnnnnnnnnnnnnnnnnnnnnnnnnnnnnnnnnnnnnnnnnnnnnnnnnnnnnnnnnnnnnnnnnnnnnnnnnnnnnnnnnnnnnnnnnnnnnnnnnnnnnnnnnnnnnnnnnnnnnnnnnnnnnnnnnnnnnnnnnnnnnnnnnnnnnnnnnnnnnnnnnnnnnnnnnnnnnnnnnnnnnnnnnnnnnnnnnnnnnnnnnnnnnnnnnnnnnnnnnnnnnnnnnnnnnnnnnnnnnnnnnnnnnnnnnnnnnnnnnnnnnnnnnnnnnnnnnnnnnnnnnnnnnnnnnnnnnnnnnnnnnnnnnnnnnnnnnnnnnnnnnnnnnnnnnnnnnnnnnnnnnnnnnnnnnnnnnnnnnnnnnnnnnnnnnnnnnnnnnnnnnnnnnnnnnnnnnnnnnnnnnnnnnnnnnnnnnnnnnnnnnnnnnnnnnnnnnnnnnnnnnnnnnnnnnnnnnnnnnnnnnnnnnnnnnnnnnnnnnnnnnnnnnnnnnnnnnnnnnnnnnnnnnnnnnnnnnnnnnnnnnnnnnnnnnnnnnnnnnnnnnnnnnnnnnnnnnnnnnnnnnnnnnnnnnnnnnnnnnnnnnnnnnnnnnnnnnnnnnnnnnnnnnnnnnnnnnnnnnnnnnnnnnnnnnnnnnnnnnnnnnnnnnnnnnnnnnnnnnnnnnnnnnnnnnnnnnnnnnnnnnnnnnnnnnnnnnnnnnnnnnnnnnnnnnnnnnnnnnnnnnnnnnnnnnnnnnnnnnnnnnnnnnnnnnnnnnnnnnnnnnnnnnnnnnnnnnnnnnnnnnnnnnnnnnnnnnnnnnnnnnnnnnnnnnnnnnnnnnnnnnnnnnnnnnnnnnnnnnnnnnnnnnnnnnnnnnnnnnnnnnnnnnnnnnnnnnnnnnnnnnnnnnnnnnnnnnnnnnnnnnnnnnnnnnnnnnnnnnnnnnnnnnnnnnnnnnnnnnnnnnnnnnnnnnnnnnnnnnnnnnnnnnnnnnnnnnnnnnnnnnnnnnnnnnnnnnnnnnnnnnnnnnnnnnnnnnnnnnnnnnnnnnnnnnnnnnnnnnnnnnnnnnnnnnnnnnnnnnnnnnnnnnnnnnnnnnnnnnnnnnnnnnnnnnnnnnnnnnnnnnnnnnnnnnnnnnnnnnnnnnnnnnnnnnnnnnnnnnnnnnnnnnnnnnnnnnnnnnnnnnnnnnnnnnnnnnnnnnnnnnnnnnnnnnnnnnnnnnnnnnnnnnnnnnnnnnnnnnnnnnnnnnnnnnnnnnnnnnnnnnnnnnnnnnnnnnnnnnnnnnnnnnnnnnnnnnnnnnnnnnnnnnnnnnnnnnnnnnnnnnnnnnnnnnnnnnnnnnnnnnnnnnnnnnnnnnnnnnnnnnnnnnnnnnnnnnnnnnnnnnnnnnnnnnnnnnnnnnnnnnnnnnnnnnnnnnnnnnnnnnnnnnnnnnnnnnnnnnnnnnnnnnnnnnnnnnnnnnnnnnnnnnnnnnnnnnnnnnnnnnnnnnnnnnnnnnnnnnnnnnnnnnnnnnnnnnnnnnnnnnnnnnnnnnnnnnnnnnnnnnnnnnnnnnnnnnnnnnnnnnnnnnnnnnnnnnnnnnnnnnnnnnnnnnnnnnnnnnnnnnnnnnnnnnnnnnnnnnnnnnnnnnnnnnnnnnnnnnnnnnnnnnnnnnnnnnnnnnnnnnnnnnnnnnnnnnnnnnnnnnnnnnnnnnnnnnnnnnnnnnnnnnnnnnnnnnnnnnnnnnnnnnnnnnnnnnnnnnnnnnnnnnnnnnnnnnnnnnnnnnnnnnnnnnnnnnnnnnnnnnnnnnnnnnnnnnnnnnnnnnnnnnnnnnnnnnnnnnnnnnnnnnnnnnnnnnnnnnnnnnnnnnnnnnnnnnnnnnnnnnnnnnnnnnnnnnnnnnnnnnnnnnnnnnnnnnnnnnnnnnnnnnnnnnnnnnnnnnnnnnnnnnnnnnnnnnnnnnnnnnnnnnnnnnnnnnnnnnnnnnnnnnnnnnnnnnnnnnnnnnnnnnnnnnnnnnnnnnnnnnnnnnnnnnnnnnnnnnnnnnnnnnnnnnnnnnnnnnnnnnnnnnnnnnnnnnnnnnnnnnnnnnnnnnnnnnnnnnnnnnnnnnnnnnnnnnnnnnnnnnnnnnnnnnnnnnnnnnnnnnnnnnnnnnnnnnnnnnnnnnnnnnnnnnnnnnnnnnnnnnnnnnnnnnnnnnnnnnnnnnnnnnnnnnnnnnnnnnnnnnnnnnnnnnnnnnnnnnnnnnnnnnnnnnnnnnnnnnnnnnnnnnnnnnnnnnnnnnnnnnnnnnnnnnnnnnnnnnnnnnnnnnnnnnnnnnnnnnnnnnnnnnnnnnnnnnnnnnnnnnnnnnnnnnnnnnnnnnnnnnnnnnnnnnnnnnnnnnnnnnnnnnnnnnnnnnnnnnnnnnnnnnnnnnnnnnnnnnnnnnnnnnnnnnnnnnnnnnnnnnnnnnnnnnnnnnnnnnnnnnnnnnnnnnnnnnnnnnnnnnnnnnnnnnnnnnnnnnnnnnnnnnnnnnnnnnnnnnnnnnnnnnnnnnnnnnnnnnnnnnnnnnnnnnnnnnnnnnnnnnnnnnnnnnnnnnnnnnnnnnnnnnnnnnnnnnnnnnnnnnnnnnnnnnnnnnnnnnnnnnnnnnnnnnnnnnnnnnnnnnnnnnnnnnnnnnnnnnnnnnnnnnnnnnnnnnnnnnnnnnnnnnnnnnnnnnnnnnnnnnnnnnnnnnnnnnnnnnnnnnnnnnnnnnnnnnnnnnnnnnnnnnnnnnnnnnnnnnnnnnnnnnnnnnnnnnnnnnnnnnnnnnnnnnnnnnnnnnnnnnnnnnnnnnnnnnnnnnnnnnnnnnnnnnnnnnnnnnnnnnnnnnnnnnnnnnnnnnnnnnnnnnnnnnnnnnnnnnnnnnnnnnnnnnnnnnnnnnnnnnnnnnnnnnnnnnnnnnnnnnnnnnnnnnnnnnnnnnnnnnnnnnnnnnnnnnnnnnnnnnnnnnnnnnnnnnnnnnnnnnnnnnnnnnnnnnnnnnnnnnnnnnnnnnnnnnnnnnnnnnnnnnnnnnnnnnnnnnnnnnnnnnnnnnnnnnnnnnnnnnnnnnnnnnnnnnnnnnnnnnnnnnnnnnnnnnnnnnnnnnnnnnnnnnnnnnnnnnnnnnnnnnnnnnnnnnnnnnnnnnnnnnnnnnnnnnnnnnnnnnnnnnnnnnnnnnnnnnnnnnnnnnnnnnnnnnnnnnnnnnnnnnnnnnnnnnnnnnnnnnnnnnnnnnnnnnnnnnnnnnnnnnnnnnnnnnnnnnnnnnnnnnnnnnnnnnnnnnnnnnnnnnnnnnnnnnnnnnnnnnnnnnnnnnnnnnnnnnnnnnnnnnnnnnnnnnnnnnnnnnnnnnnnnnnnnnnnnnnnnnnnnnnnnnnnnnnnnnnnnnnnnnnnnnnnnnnnnnnnnnnnnnnnnnnnnnnnnnnnnnnnnnnnnnnnnnnnnnnnnnnnnnnnnnnnnnnnnnnnnnnnnnnnnnnnnnnnnnnnnnnnnnnnnnnnnnnnnnnnnnnnnnnnnnnnnnnnnnnnnnnnnnnnnnnnnnnnnnnnnnnnnnnnnnnnnnnnnnnnnnnnnnnnnnnnnnnnnnnnnnnnnnnnnnnnnnnnnnnnnnnnnnnnnnnnnnnnnnnnnnnnnnnnnnnnnnnnnnnnnnnnnnnnnnnnnnnnnnnnnnnnnnnnnnnnnnnnnnnnnnnnnnnnnnnnnnnnnnnnnnnnnnnnnnnnnnnnnnnnnnnnnnnnnnnnnnnnnnnnnnnnnnnnnnnnnnnnnnnnnnnnnnnnnnnnnnnnnnnnnnnnnnnnnnnnnnnnnnnnnnnnnnnnnnnnnnnnnnnnnnnnnnnnnnnnnnnnnnnnnnnnnnnnnnnnnnnnnnnnnnnnnnnnnnnnnnnnnnnnnnnnnnnnnnnnnnnnnnnnnnnnnnnnnnnnnnnnnnnnnnnnnnnnnnnnnnnnnnnnnnnnnnnnnnnnnnnnnnnnnnnnnnnnnnnnnnnnnnnnnnnnnnnnnnnnnnnnnnnnnnnnnnnnnnnnnnnnnnnnnnnnnnnnnnnnnnnnnnnnnnnnnnnnnnnnnnnnnnnnnnnnnnnnnnnnnnnnnnnnnnnnnnnnnnnnnnnnnnnnnnnnnnnnnnnnnnnnnnnnnnnnnnnnnnnnnnnnnnnnnnnnnnnnnnnnnnnnnnnnnnnnnnnnnnnnnnnnnnnnnnnnnnnnnnnnnnnnnnnnnnnnnnnnnnnnnnnnnnnnnnnnnnnnnnnnnnnnnnnnnnnnnnnnnnnnnnnnnnnnnnnnnnnnnnnnnnnnnnnnnnnnnnnnnnnnnnnnnnnnnnnnnnnnnnnnnnnnnnnnnnnnnnnnnnnnnnnnnnnnnnnnnnnnnnnnnnnnnnnnnnnnnnnnnnnnnnnnnnnnnnnnnnnnnnnnnnnnnnnnnnnnnnnnnnnnnnnnnnnnnnnnnnnnnnnnnnnnnnnnnnnnnnnnnnnnnnnnnnnnnnnnnnnnnnnnnnnnnnnnnnnnnnnnnnnnnnnnnnnnnnnnnnnnnnnnnnnnnnnnnnnnnnnnnnnnnnnnnnnnnnnnnnnnnnnnnnnnnnnnnnnnnnnnnnnnnnnnnnnnnnnnnnnnnnnnnnnnnnnnnnnnnnnnnnnnnnnnnnnnnnnnnnnnnnnnnnnnnnnnnnnnnnnnnnnnnnnnnnnnnnnnnnnnnnnnnnnnnnnnnnnnnnnnnnnnnnnnnnnnnnnnnnnnnnnnnnnnnnnnnnnnnnnnnnnnnnnnnnnnnnnnnnnnnnnnnnnnnnnnnnnnnnnnnnnnnnnnnnnnnnnnnnnnnnnnnnnnnnnnnnnnnnnnnnnnnnnnnnnnnnnnnnnnnnnnnnnnnnnnnnnnnnnnnnnnnnnnnnnnnnnnnnnnnnnnnnnnnnnnnnnnnnnnnnnnnnnnnnnnnnnnnnnnnnnnnnnnnnnnnnnnnnnnnnnnnnnnnnnnnnnnnnnnnnnnnnnnnnnnnnnnnnnnnnnnnnnnnnnnnnnnnnnnnnnnnnnnnnnnnnnnnnnnnnnnnnnnnnnnnnnnnnnnnnnnnnnnnnnnnnnnnnnnnnnnnnnnnnnnnnnnnnnnnnnnnnnnnnnnnnnnnnnnnnnnnnnnnnnnnnnnnnnnnnnnnnnnnnnnnnnnnnnnnnnnnnnnnnnnnnnnnnnnnnnnnnnnnnnnnnnnnnnnnnnnnnnnnnnnnnnnnnnnnnnnnnnnnnnnnnnnnnnnnnnnnnnnnnnnnnnnnnnnnnnnnnnnnnnnnnnnnnnnnnnnnnnnnnnnnnnnnnnnnnnnnnnnnnnnnnnnnnnnnnnnnnnnnnnnnnnnnnnnnnnnnnnnnnnnnnnnnnnnnnnnnnnnnnnnnnnnnnnnnnnnnnnnnnnnnnnnnnnnnnnnnnnnnnnnnnnnnnnnnnnnnnnnnnnnnnnnnnnnnnnnnnnnnnnnnnnnnnnnnnnnnnnnnnnnnnnnnnnnnnnnnnnnnnnnnnnnnnnnnnnnnnnnnnnnnnnnnnnnnnnnnnnnnnnnnnnnnnnnnnnnnnnnnnnnnnnnnnnnnnnnnnnnnnnnnnnnnnnnnnnnnnnnnnnnnnnnnnnnnnnnnnnnnnnnnnnnnnnnnnnnnnnnnnnnnnnnnnnnnnnnnnnnnnnnnnnnnnnnnnnnnnnnnnnnnnnnnnnnnnnnnnnnnnnnnnnnnnnnnnnnnnnnnnnnnnnnnnnnnnnnnnnnnnnnnnnnnnnnnnnnnnnnnnnnnnnnnnnnnnnnnnnnnnnnnnnnnnnnnnnnnnnnnnnnnnnnnnnnnnnnnnnnnnnnnnnnnnnnnnnnnnnnnnnnnnnnnnnnnnnnnnnnnnnnnnnnnnnnnnnnnnnnnnnnnnnnnnnnnnnnnnnnnnnnnnnnnnnnnnnnnnnnnnnnnnnnnnnnnnnnnnnnnnnnnnnnnnnnnnnnnnnnnnnnnnnnnnnnnnnnnnnnnnnnnnnnnnnnnnnnnnnnnnnnnnnnnnnnnnnnnnnnnnnnnnnnnnnnnnnnnnnnnnnnnnnnnnnnnnnnnnnnnnnnnnnnnnnnnnnnnnnnnnnnnnnnnnnnnnnnnnnnnnnnnnnnnnnnnnnnnnnnnnnnnnnnnnnnnnnnnnnnnnnnnnnnnnnnnnnnnnnnnnnnnnnnnnnnnnnnnnnnnnnnnnnnnnnnnnnnnnnnnnnnnnnnnnnnnnnnnnnnnnnnnnnnnnnnnnnnnnnnnnnnnnnnnnnnnnnnnnnnnnnnnnnnnnnnnnnnnnnnnnnnnnnnnnnnnnnnnnnnnnnnnnnnnnnnnnnnnnnnnnnnnnnnnnnnnnnnnnnnnnnnnnnnnnnnnnnnnnnnnnnnnnnnnnnnnnnnnnnnnnnnnnnnnnnnnnnnnnnnnnnnnnnnnnnnnnnnnnnnnnnnnnnnnnnnnnnnnnnnnnnnnnnnnnnnnnnnnnnnnnnnnnnnnnnnnnnnnnnnnnnnnnnnnnnnnnnnnnnnnnnnnnnnnnnnnnnnnnnnnnnnnnnnnnnnnnnnnnnnnnnnnnnnnnnnnnnnnnnnnnnnnnnnnnnnnnnnnnnnnnnnnnnnnnnnnnnnnnnnnnnnnnnnnnnnnnnnnnnnnnnnnnnnnnnnnnnnnnnnnnnnnnnnnnnnnnnnnnnnnnnnnnnnnnnnnnnnnnnnnnnnnnnnnnnnnnnnnnnnnnnnnnnnnnnnnnnnnnnnnnnnnnnnnnnnnnnnnnnnnnnnnnnnnnnnnnnnnnnnnnnnnnnnnnnnnnnnnnnnnnnnnnnnnnnnnnnnnnnnnnnnnnnnnnnnnnnnnnnnnnnnnnnnnnnnnnnnnnnnnnnnnnnnnnnnnnnnnnnnnnnnnnnnnnnnnnnnnnnnnnnnnnnnnnnnnnnnnnnnnnnnnnnnnnnnnnnnnnnnnnnnnnnnnnnnnnnnnnnnnnnnnnnnnnnnnnnnnnnnnnnnnnnnnnnnnnnnnnnnnnnnnnnnnnnnnnnnnnnnnnnnnnnnnnnnnnnnnnnnnnnnnnnnnnnnnnnnnnnnnnnnnnnnnnnnnnnnnnnnnnnnnnnnnnnnnnnnnnnnnnnnnnnnggcttcagaacccaggccggacaccctccggttcgcggcaaagaatgagatccagccgtgacatagccacggaaatcgccgtcaaataccagatcctgagcgagtttaccagctttgtggtgagcgatccccgccgtaacgaatccctcaagggaggcatcgaactgcgccgggtgcctgtggtggccactttggcatatcatgcggaacggatatgtgcgtgcgcctatccccccacagaatcagtcatgttttataacacgctattggataaccagaactctctcagttctaaagaagatgatcctatccttagcaggttggtgcttacgcaaacggcaaacggctactgggataaatcccaattactgcgcctggtattgggaaacaataaaataaaatccaaagacgtcgccgatcggctcgctctgacaggcaagttcaaaccggcagtcgccaaaaggatcggcatcaccctggttgtggtctattacctggaatacttcgccatgatttcgagtgaggaatatcaaaccatgctggataaggctaaggagtggctggcaaaaaataaaatccagccagaacagtaccgggaaaagatttgcaggctgttcttagattagatatacctcgttccgggcaaacggaggctacaggcgtagtctccgttttttgcgccagggctgcgagccgccatcttatgccgctgtcgcgagaagctgctcccaccgtctggagtgcaaatccaggccccggtattcgttttggatggtgtcccaggcaagctgctggaggaggttagccgtggcggcgtcgatctgtggggggaaatacctgttgcccacagggttgacgttccagatgcgggccagcatcaggcaggctaccaagtaggtgccatagatgctggggtggtagttgtccgcttcatagagatttggcatgccggggatggaatcggcgttgtgccacgccactcctgccggcaccacgggggcatccagccaggctccgatgtagcggtaggcgtctctgatcggcacatacatttccgggttgttgcgccaggcccaggtcatgtagaaaccggtgagggcgcccgcctggtggatcagggtgttcagcgaatcggcatagctgtaaaagagttccggattcagcatggggcggctgctctgttcctggaggatcaccaggtcccaatctcccgtggcgatggtgctgagggtgttctgatcgtgataatggttttccagggtgtatccgccactggttctggcatccaccaccacattccattcgggatgcgccatgtcgatcagggcttgcaagtgagtatccaccccatcgttgaagtaggtgtggctgtttcccaccaggaggacgcggcggctgtcttcatagggaagcccccaccccacaaccacttccaggcctccgggaacaaactgcagggtgatgtgcaccgtggtggtctgagagggtgagaccagtccgctgccctggccggtggcgatcagggtgaggccgtcaaagacctgtacatcgatggcgtaaacgcccggctccaagtcctgcaaagtcccctcagccatattgccgctgatggcgaggtccatgctctggctgtaagtccctttgacgacagtgactgccaccctcgagacgttgaaattgagctgtgccgccgggctgaggtccatgcggatcggcagctcgcccgtctggtcgggaagcgtggaaacagtgttgcagcctgccaaaaacagggctgccagtaagctgaaaatgactaatcttggcattttggctccttgaatgaacggattggttatctatcatgttttcaaggcaatctgtcaagaaaaatccgattccccgcacggcaagatacttgacagaaatggacatttatttataaatgcaattgctcgtacaggatttttccccagcggaacctgacacaatcagttacagaatggagcggaagcatgacagacatagaactttcaatagtcacccaagcagacccggaggcgatcctggccttgtatcgccacgcgggatggtggcaaaccgatgacaatccggagtatctgaggacggtggaaaagataatcgcgaactcccactgcttcgcgatcgccgcccacggctccaggatcatcggcatgggcagggcaatcagcgacagggtgagcgacgcctacatccaggacgtgacggtacacagcgactaccgcggccggggcatcggcaaggccatcgtgcgcaaactgctcgaacgcctgcgcggggacggaatgcagtggataggcctgatcagcgaaccgggctacgacaggttttacgaagggctgggctttgcccggatggagggatacacgccgttcctgttgaagcaggactaagcgcgcgacacagtatgctaaagctcgagcctcttaccactgcccagattcccctcctgcgcgagttcctcagccgctatccgcgccagtcctgcgactacaacatctgcaacctcctaagctggggcaaaatctacaacaaccaatacacgctctgggaaggccatctggtactggtcaatccgcaatactcctatctgctctacccggtgggaccgggcttgggcgcggacaagacgagggaactttttgacctctaccgcgaggacgctccggaggcgaaactgctgatcatcccggagaactggcaggaaagctgcccgggcctggacaggcactttgagatcagcgacgacagggactggtatgactacgtctatgcgacggagaaaatggtgaacctgagaggcaaaaagctgaccaagaagaaaaacctgatctcccagttccggcgtgcctatccgaactatcatgtgctgccgataagcaaggaaaaacacgaggtgatcgagcgcttcaccgaaaaatggcgccgcgagaggcacgttgaaggcagctatctggacaccgagatgaaagccatccaaaacacccttgagatgtgggacgaactgcccgtggagggaataatcgtctgcctggaccaaaggatcgccgcctattccatcttcagcccgcagacgcaggacatggtgacggtacacttcgagaagtttgatcccgacaaaaagggcagcgcccagctaatctattgggaaaccgcccgctatctgcaatcccgctacaaatggataaaccgcgagcaggacatcggcctcgagggtttgaggcaagccaagaccagctatgcgccggactttatggtcaagttcctcgtgggaatagcaaagtaagcagccacccgattcccacgcatcccgccagggaaagcaggaaggcggctatccgcttggggcgcggattgtaaaaaagctgcaaacccaccggcagcagatcgtgggcctgccagcggacggtgtattttttcagctccggatggggtttgatacggttcagcttcctgagataggaaatatgcttctgatggtaattccggctggcaatgccgccattcaggtcgtagtagctgaaaccccggtaatcgaactcacccagcctggccagcaagcccgcgtatcccgcttcaaaaagcctgtgagcctcttcctgcccggtgattttgtatgtgtcccaaaggcaaagcaggatcgccaacatcccgttgagcacaaagggttgcccctcgccgggatactcctgaaaccagagggagccatccggcaagcgcctcgtcaggctgcttccgggcgcgagggtgcgcatcgccatgacgctgttttgcagccagtcgtcctgggcggtcagttcatagcgccgggcaaaggcaagcatgcttctggcctgggccagggcgctgcaccagggcgcgcgcagccccagcctgggcaggtcgaagcgatagggaagccacagcctgccctcttccacctcggagtgttccagcagccaatcggtgagcttcagaaagcttgcgcgcctggcgggatccttcctgcgctggtagtcgcgattggcctgtgccgccacgaagaggggattgtattgcaagcccagatcccggtaaagctggatgggaatgccccgctcatcgaatctgcgagtctggttcaggggcctgccagtcagcaatgtgaccgccctttccccccaggcctgcattttgggctcggcaacctgccagatgagagcgtgggcgacgactgtccagaggcgcggatcgctcagcatctatccctccggaaagccctgggaagcaggctcagcaaaaacatgacaaactccagcaccacaacgctcgcccccgtgggcaggttcagccaccaggaaagggcgaagccgccaaaggaagccagcagcgaaaagacaacgcagaaaaccagggccctgtccaaacggtcaaccagattgaacgccgccgccgcgggcaggatcagttgggcgctcaccaggatgatgcccgccgcccgcacgttgatcacgatgttcaccgccagcaggatcatgaacaggcggttgaccaagccggcatgcaggcggtaaaaccttgccagttctggattgtaggaatagtaaaagagttctttgtagaatcccaggataaagatcaggttcagcacggccgccgcgcccagcagccacagatcggtggaattggcaagcagcacgttgccaaacagataactggccagatcgaaggtgtagcccttgttgagcgagatcaggatgatgccgatggccatggaaacgctcaggaagatggtgatggcgttggcctcctccagcctctggcggcgcgagagccaactgattgccaggctcacccccaccacaaccagcatggcggtgaactgcatattccagcctgccagaatcgccagcgcgatgcccgcaaaggcgatgtgggaaagcgcttcgcccatgtaggaaatccgccgcagggtcacaaagggcgaaaaaagcgccagcgagagcgaggagagcgaggcagccgccagagcgcggatcagaaaggaatattccagcatcagtagtccttgtcgatcagtttcaccgcttcgccgaaggttttgcggatgatctcggcgttcaccagttcggtcttgctgtggcagtgcagttttcggttgaggcagatcagcgagctgcagtgttcggaaagcgtgtgcaggtcgtgggagatggtgatgatggtcttgcctgccttgttcagatcgtgcagcaaagcgaagaagctctgcaccccgggacggtcaaccgaggcttcaggctcgtccaggatcagatagttgctgcgcgagaccagcgcccgcgccagcagcaccctctgcaactgccccccggaaaggcttcccaggcgtttggacgccagctccgccgtgctggtggtttccagggctgccagggcgcgctcccgctgggattttgtgaatctgcctcccaagggcagttccgccgccaatcccatcagcacgatgtccagcgcggaagccggaaaaccgcggtcaaactcttccctttgaggcagatagcccatcgggttgtgccgcagccagtccagatgcgcctcaccatcgatgtggatggtgccgctctgcacgggcagcaaacccaggatcagcctgatcagggtggactttcccgccccgttggggccgattatggccacaaactccccccgcgtgatctgtaagtctatgtcttccagaatcaggctgttgccgaagcgatggctgagcccccgcacctcgatcatcatatccccctcatatcaatccttaccttttgcttgggacaaccttaggtcaaccttataatttataaggaatacctaaggatgtctcctcccggggttaaggacgcgaagtagggccgaatgggaaggcaggcggaaaaaggcggaaacatcattcccaacccagctttaacccctcccagttgttgaggataacgtccatgatgctcttgggtttgaagctgtgccccagcggatccagttgcacgatggagaggtcgaactcactggccagggcgcgcgccgctttgtcgctcatctggacttcggtgtaaacggctttgagattgtggctcttgaccagcgagccgatgcgagccagctcccggggagtgggttccttgccaggggagctttgcacggtgcccagatcctcgatgtcgtaatccttgagcagatagtggaagctgtcgtgccaggtgaccaccggagtgcgggtgaaagtgctccgttcgctctgcatgcgctgatgcagggcggcgaggtcggagatcaggcgtcccgtgttttcgctgatggtggttttcaggtggggaaaacgcgtctgcaactgatcggagaggatcagggtgatgtgggtcagcagccggggcgagagccagatatgcggattggtatcatcggcgggaatgacgtgctgccgccggagctgatcctcgatcttcacatgcctgtcgcccaaggcgtcaaaagcctgccccagattggtttccaggccaaagccgttggatactgcgagggccgccccgttcaaggcacgcagcccggcgggcttggggctgaaggtatggggcgagctgttgggcggaatgagggtgaccacgttcaggctgtcgccggtcagttgcctcaccagtaattcatagggatagatcgagaccaccacggtctcccgctcgttccggggcgagccggaacaggccaggagagccagtagcgccagcgatcccaacagtagcggcaagattctgcgcatgggcttactccagttcacgcagcagttgggtcagcaaacgcactcccaccccggtggccccgtaggtgttgatgccgctttccctgtccttgtgcgcggttccggcgatatcgatgtgcagccagggtttcttgtccacaaactcgcggatgaacagaccggcagtgatcgctccagccagaggcccgccgctgtttttgaggtcggcgatgtcgcttttgatcagatccagatattcttcatgggagggcagttgccagatcagttctccggtgaagtcggccgcgtgtttcgccttgttcagcaaggcgtcgttgttgctcatcaccatcgaaatctgattgcccaaagctcccacggcggctccggtgagggtggcgatgtcgatgaccttggagacgcgttccttgctgaccgcgtaatggatggcgtccaccagggtcaggcggccttcggcgtcggtgttgttgacctcgatggtcttgccagccatgctgcggatcacgtctccggcgtggtaggcgtggccggagaccatgttttcacaggcggcgatcacgccaaagacgtttaccttcagcttgagggtggaaatggccacaaaggtgcccagcacggccgcggctcccgccatgtctgttttcatgttcaccatgccctgggggcttttgaggcagtatccaccgctgtcgtaggtgagccctttgccgatcaggccgatgcttttgctgcgggaatcgggattgccgtggtaggacatcaggatcaggcgcggttcggcggcggaacccctggctacggcaaggaaggcgtccatcttgatgcgtctcagcttgtccgggccaaagacatcgatggaaaaaccgtgtttcagagccagcttgcgggctgtctccgccagtgtatcgggattgaccacgttggcaggttcgttcaccagatcgcgggccagattggtggcgtcggcaaagatgcggccttcaaggatgccgcggttgatgtggcgggtggtcttgagctccatcaccagatgcaccgcttccaggccgcaggtttcggcgtccgcctggtatttgttgaatttatactcggccagcagggcggattccgccagaatgtggccaaactgcacatctcccaggggattggcaaaggcggggaagagatacacttccctgccattcagcttcatcaccgcgcgcagggcgttggcaaacagggttctcagtttcgcgccgttcaactccttggcgttgcccactccgcagagcaccacgttgttgcagtgcttgggcagcacgatgggaaagctgcggattctgttgaactcaaatttgaattcgttttgtttaagatagagctggatcgcctgtctgatattctccggcaggtattcgacactgtccaggtcgcctttttcgtctatcatcacgatcacgctttccatgtgttcggtaagcttgcgtaacaagtcgattttcatcgtttctcctcgtttatatcttaacttatttaaaaatcttcacttaagctcaggtaataggtgggctttgaggttttggaaagatcggtctgccaggcgatgtcgaagcgcaaaaccacatagcccaggttgagtcgcggcccgaagccatagcccagtttgaggtcatccagcctgccgtcctccgtggtggcgttgaagtctgagaaattgtcgaacaccgtgcccaggtcggcaaagaggctgccgcggatgttggggatgttgagcgggatcgggaaggcgaggttgatgtattcaaaaaagggaaagcgaagttcggcgctcagcagggcctttttgtagccgctgaggttatcccggtaagcccgcaccccatagtagccgctgaggttgaagcgctggggctcctttcccgtactcactccggcaatagcgcgcaaagcgatggcatagcgccggctgaacagggtgtagctgcgcagatcgatgtagttggtgaagtattccacccttccgtcggcgagggtggcgctcacgttatacaggctcctccaacccacaagcggcccggtggagccatagagggcgttgtcgtgcaccagcgaaagaccgggagtgtaaacaagatcctggctgaggctcacctcctcgctcagctcgtagccctccacatagggcgcccaggacaggtattgcccgcgctgatagagcatgtggtcaaactccagccgggtgaagcgcgtgaagggatagcgcagcagcatgtagaggccgctcttgcgttcccggtagcgcaacaaattgttggggaggtaattctcgtccagatagtaggcgtcgtccacgaggttgtagattccgaccccgtagtccatcctgtgcttcaaatacatataggtgagcagcaggttcgactcctccagcttgcccgccacgccgacgttcgcgccgatgccgtggttccccatgatgtcgctgaggccaagctccacatagccgattgttcccacggcggaggaataggccaggccaccccagatgctgtccaaagagaagcggggcttgtatccgcctattgtgggaggattgtctttgctggtggggcggtcgtcatagctgtaatcccgggtgagaaacagggaatcctcgcgggtaagttcaaaggggcggtattccccgctgagggggaagcgttcgtcatactggcgggcggggttgatcctgggcagaggagcgggtttgcgcttgccaaagtagtccagttgccccaaatccacccctgccatgaggtcgggagaggggacggaaagctgttgcgcggtgctgtcgctccaggccaggtttttcaggggatcgtgggcaaagtagatgttccacgccttgtcgaaatagttggaaaccagcaaatagcggttatcaggggagatatccgccgcaaagacccccgccagcacatcggtcaccttcgcctgggcggagctttgcagatcaagggcgtggagattgttgaccttgtcctcataggtgaggtagagcagtttgtcgccgctgccgtcaaacatgggccagctacagtccctgatcctgaaagtcaactgccggggctcccctccatccagatccaggctgtagatattggccaccacattggcaaagaagcccttgcgctgggattccgggttgaggctgcgctccgaggaaaagacgatcgtctgcccatcgggggaaaacctgggctgggcgtcgttgaaatagtcatccgtcaactgcctggtctgcctggtctccaggtcatggagatagatgtcgcagcgcatttcccgctgtccggcaaagaccagcttctgcccatcgggagccacgtccagttcatagatcgcgtcaaattccggcagtttgaccgtctgcacgatctttcccctgtccacgtccaggatgtggatctggtcgccccaggaggtcttggcggaaaaagccacccgtttgccatctggaaaccagctcaggttggagcggaagtaatagaattcctcggctttgccggtggcctcaccggtgaatatcttctttgccctgtccatttcatggatgccagccatccacacgctgtatctcgccccggcggtggaaaaatagacgtagcggtctcccttgggggaaaagcggggcatgaagttgaagtaggagccatccttatcggagcgggtgcgctgctccatcgcttcctggggcactccatggtcgttgacgcggggatagaagtcccgtttcaactgaaagcgccagcgggattccaggctctcgaaatcgatgccaaagactttcttggttgccgcgtccatattgtgtgaggagtggatggtgaaatagtattccgacaccttttcccggccataggtcttggcgatgtaggccagaaagctctcccccagccggtaggcaaaatagccgtccgaactgcccagtggcaccaggtagtcgttgaccaccatatccaggatgaacatgttgttatagtcgttttcgccgccaatggagaggaattccggcagtccttccgaaaaccagaagggaaaggacacaggccggagggacagataggagttgatcatgcctttgtccaaagcgttggcgtaggcatgggtgagctcgtgggcaatcaggtcttccaggttgcggtaactgccgtcgaaggggatcaccacccggttgcgcaggctctcggtgaatcctcccacgccttccgtgaggaggggatagatgatattggtgctctgaaactggctcttgctgcggtaaaagatgatcgggatgcgggacgagatgggatatttgaggtcagcccgcaggttgtagtaggtctcttccgcgagcagcgccgccaggcggccgaagtcgttctcgccccggggaaagtaaacatcaaagtgcatggtctggagggttgaccacgcctcgggtgtggtgttgaccttgttctggccaaagttgtaagcatggcacaaagcggaaatcagcaggaaaagcagggcgaatcttaatttcatcggcatctttaaaagagactgaatttcacatatttcttgggatgggcgcggatatccagcaccagcgaatcgagattggccaccgagcgcaacagcttgtgatacagggcttcatcgttcagcagcagtcccgcgctgccctgtccgctattcagcgccttgacggtttgggaaaggttggcggaaagcgttttgaggctgtccagggtgccgctcacgttttccagggcctggggagagcgttgcagcaccgtgttgatctgctcctcgttggctttggcgacgcggtttatccgctccgagagcgaatctatcttttgcagggtggccgccagccgcgctttggcatcctgggaaagctcctccactgacctggccgcgctgcccgcatcgtcaagcagagaggaagacttcgcaatcaatccattctcccgcctcagctccgatagcacagcgttgaactctcccagagtggcgttcgccttgcccagcagggccatcactccgctggggtcttcaccccgttgggccttgcccagatcgagcagccccggcccctctccctgggcgatgttgagtaccgttccgcccatcaggctgctgtccgagatgtaaaagaccgcgccctctttgaggccgagcccccggttgacgcgcgccgtcaccaggatgtcgtccccgcgggccgcgatgctcttgatgcgccccacttccatgccccggaacatcgccttgtcgcccacttccagccccatgacgtcggtgaagcccacctgcaggtcttgctgcgaacggatcgaaatgcgcttgctcagccacagatagccaaacacggctattaacagcatgataaccgtgaacagcccaaccttgagctgggtctgatagagcttggaataaaactttgccatcgcgcgtcctcaggtctttagctgtttcttctccgcggcgggaaagaggatgttgttcaggatcagcctgtagccgggagaattcttatggagttccaggatggtttccgggtcgccaaccttgtgctggtaatcctcgggatcgtggcctccgtaaaaggtgaaagtgcccttgccgatgttgccgtggatatacttgacctcattttgccccggcacttccgccaggatgatcacgctctttttcaccttgtccttaaagaacgaggtcgtctgccccaaaaagccgttgataacgttcgtatggcactgggtgagcatggtgggcacggggtcgtatttggcggaaaagtcgaagagctgaaaatagtccgcctccgctcccctcaggcgggagtagtcgctggcgtcgatatcggaaaattcgtattcgtagggattggtcttgagggtaaagttctcgaacgcgaagcagcgctcatagttgagcttgcttttatactggggatcgatgccgtcgccgtcgatgagggcgtccacgatatccacaccccgcgccgccagggcgatgtcgaaggtgtccgtgccggcgcacatggcaaagaggaagccgccggcaatcacaaactcctctatcttctgcgccacggcatgcttgagctgccacaccttggcgtagccgtgtttggcggccattgcctcgttggtgcgcacatcgttctgataccaaggcatgtgccggtaggagccataaaacttgccatactgcccggtgaaatcctcatgatgcagatgcagccagtcataatcggccagtttgccttccagcacctcgtcatcccacacgcggtcgtaatccacctgggcatattccagggcgagggtcacggcgtcatcccagggcagggagttgggcgggatatagatgccgatcttgggttctttctccagcaccacggcttccatattggcgttctggatctccagcatgatggcggccacctgggaggacgacacctgctcgaagcgcaccccccggatgttgcacagcgcggaaatctccggcgcgtccgggatcaggaagctgccgccccggtagttgagcagccactttatcacatgctgctctttgagcgcttcaaaagcgactccataggccttgaggtggttgctctgcgtcagatccatggggatcagaatctcagcccgcaacccggcgctcagcagcaaggccagcagcagcgtcaggagcgtgattcggggcagtcggtgcttatgtatcgtggtcggcattcctttgagttttttcattccgtcaaatttactttgggggtaaccaaaagcctgaaaactatgtatatatgtcaaggattttcttttccgatggagggaatttccggctgtcaacgccatcccaaaatcgcaagtttctctcgcttgggcaaatgggaatcccgctttccgaggcaggtctttttgcctgcacccgcgcttgtccggccgccgcccgggattttgtccttgacataaaaatgcgccattttaagtctggcagcgtcatcgagcgagcaaatctaaacctttggcaggattgctcgccgtcagggtatatccggaaacagatatgccttccagtgtgaaaaggtgacacgcaagcaaactttcatttttcctgcgactggcgcagtgtgtctccctttccaagctgaaaatactaaaaataaataaaggagttgaagatgtttttcactgttgctacacctgaaaatgaaccgatcaaatcttacgcacccggaaccaaagaaagagacgccttgaaggcaaagctgaatgaactcggcagccagttcatcgaaattcccgcgattatcgatggcaaggaagtgttcagcggcaacaccgccgactgcatcgaaccccacaaccacaagcacgccatcggcaaataccacaaatgcggcgaaaaggagatcaacctcgccatccaggcggccgtgaaggcaagcaaggattgggagcagatgtctttctaccatcgctcggccatcttcctgagagccgccgaactgctttccaccaaataccgctatctgttgaacgccgccaccatgctggggcaaagcaaaaacgccttccaggccgaaatcgactccgcctgcgaactgattgacttctggcgtttcaacccctattacgctcaaaagatttacgaacagcagcccctcatctcccccaagggagaatggaacttctcggaataccgcgctttggaaggctttgtcttcgccatcacgcccttcaatttcacctccatcgccggcaaccttcccacagccccggcgctgatgggcaacacggtggtctggaaaccttccggaaccgcggtttacagcggctacttcatcatgaagatattgatggaagcaggactgcccgctggtgtcatcaactttgtccccggctcgggagcccagatgggagacctgatcaccgattccccctacctcgctggcatccatttcacgggaagcacccaggtgttcaaccatatctggaagcgcaccgccaacaacatccacctctacaaatcctatcccagaatcgtgggcgagaccggaggcaaggacttcatcttcgcgcacgcttccgcggacatcaagaccctggcggtggcatccctgcgcggagccttcgagttccaggggcagaagtgcagcgccgcgtcccgcctctacattcccgacagcctctacggcaaatggttcgaggaaatcagcgccatgctcgcgacggtcaagatgggcgaagtccaggatttctcgaatttcgtcaacgccgtgatcgacaaaagcagcttcacaaagataaaggaatacatcgacaaagcccgcaacgcgtctgacgccgagatcgtttggggcggaaagtgcgatgacagcaagggctacttcatcgaaccgaccatcatcaagaccaccaatcccaagtttgtcaccatgcaggaagagatcttcgggccggtgctgactgtctatgcctaccccgaaaaagagttcaccgagaccctcgacctctgcgacaaaacctctccctatggcctcaccggctccattttcgcgcaggacagaaccgcgatctccgtcgcctccgaactgctgaagcatagcgcgggcaacttctacatcaacgacaaacccaccggcgccgtggttggacagcaacctttcggcggagccagatcttccggcaccaacgacaaggcgggatcggccatcaacctctaccgctgggtttcggcaaggtcgatcaaagaaaccttcgttcctgccgacgactaccgctatccctttatgggctaaacataaaccacataaccggagacgggatgattcattcgtcccgtctcttcgttttggcattattcaggcttcccatgtcgccgcaacctgacagcggtgtgaaaatatgctgtttttctaatgccttctgtaccatgcagttagaatctgacagccagacccttgccaattaatgcgcccgcctgaaataaatgccgctcccatttgacgggatgggctaagtctatattttccgtaggtcaaccttataatttataaggatgacctaaggatggtggcagcaaatgcaggagcagcaagggagggcgctatgaaggattatgcagattattgccgttgtttttggtgaatgttatactatattgtttgcgttcttttctgtgatggtgaaaaggtggaaaggttccccaaaataagtccaccaggctacatactgtgtcatcccgggcaagcgcacgcttgacccgggatccagtcttttgaaatggccgtagtaaagtggaactgtgaaatggtgtcgttagcaatgaaatacaacactgcgcaaaacgatttatccgttaatccgtgtaatccgtttcatccgtatgatacttggcatgcaaatcttatacggattgacggatttgacggatttacggattactatggtaaaagaataaggcttttcacccagccccgaaacaagtccaccaggctacatactgtgtcatcccgggaagtcggggccccctctggggtggcttacccgggatccagtcttttaggaacaaagcacaccaagactacaaagcgcgccaggcgaaaattattacttgacagccgctttatgtgcaaatataagtatttcaaatggtccgtaatctaaaaggaggatccgatttgagcaagaaatgtattttggcaatggctttgttctgctttcttggcgcgttgggcgcggcatcataccagggatttgcctggaacgggcttgagccgtcgtcggtcaacatggctctgggtggcagtcctgtgggtgtggtaaaccactggcacaaagaccccctttgcgcttacggcaaccccgctttcgcttccctgggagagggcatcgcgtattcacacacgagctatctgtatatgcacaaaagcgatatactgaaaacggaaaacctggaataccgggctgctttactcgggatgtcgtatcacggtttcgcgctgctgcttccagctttgggaaacagcaacagcgccggagtcgagttgggagagtttgccgtctcggacagcactggcgagcttgtggataacttttccctgaacgaagattcctcgaccctcggtttctcggtgaacctgcccgcggcactggccttgatggcacctggcgtgtttccaagatgcgtcaggcatctggctctgggcgcaaattgggtaagtaacgcgagcgatccacatcccgatcctgataatgagggggttctctttagcttgaagaaagcggaaagcgtcaatctgggactgtctgcctgtctgggcagcacgctccaatccggttttgagctggaatactccttcggagcggcgtatatcaatgcttttgacggcaaggcggaatactcggggcaagcatcccgagatccaatttacaagcgtctgagcgttggcggagctatttcgctaagcgcggaaaatcctcactactcccaagggcacggccttgcctcggcagtccgcaacttgtgcagcggcagagtgttgttaggcgcggcggaggagttcagcgatgacgcgccgcttctgggattcggctgcgaagccggggttttcgacaccatcttcctgcgcgcgggataccaccatgacaaggctggaaacattagcggccaaacctacggctggggcgtcaatctccactatcgcgacctcttttcggtgcgcctgaatcacgcactttttcccaggggcaggctgaggaaccaaaaaaacgcctacgattatggcgtttcggcaaacatcctgggcttgtatcaactgctaagcaaatgacgcgtatccgcgattgaaggaattatgaacaagataatgctatatacatcggcagccatcttgatcctaagctgcctgtcgctcatgagctgtgaacctgccaccaaaccggactcccccgctgcctcggaatgctggctggaaaaggtggaacccaatcccatgcccgagggaggcagttgcgagatagtttgcggggtcaaagacggcctgcaagcaaggttggccatattgaattccgtggggcaggaactgagagactggaacctaacagccggaaccagtttcgtaaactgggacggaaaggacaggcacggcaacatctgcgcgagcggtgtgtactactgcctgataagcaccgggagccatagtatctctctcaagatgttggttgcgcgggcaaagtaaacacccgacctataaacagaccacacccaagctatacagtgtgtgatcccggggcgagcagttcgcgcagatacacgcggataaaaggcgcagattgccacggattgacataaaaggattatttcggggctggctggttgtttccaaaagactggatcccgggtcaaaccaccccaccggatcgttaccgatccggcgaggaccccggtaggccgtgatgacgcggaatattgtcgggtatgatttgttttgtagcttggtggttgtgtttggattggacgcttatccttgtatcctgctttttaattcgtgttaatttgtgtaatttgtggatgattattcaaaaagactggatcacggctttatggcctggtggccgattctttcagcggcgcttgatgatcgcgtccgaaaacttggtcttgaaaagggccgtcctgagcagagccttgaaacctgtgctcaccgagtggaacttcaatgtccctgagcgaaatcccttgtagagcatggggatcagccgccatttcttgcccagatagatgctgaggtaggctttggactggaagcgttccagatccttggggctcatcccttggggctggtaaacgcagtgggtgaggtcatacttttcccagtcgtaatggagcagcctgccttccttttgcagcctgtcaaagacctccgtgccggggaagggcgtgagcagggagatcaccacaatgcccaggggcagggaacggaaaaagcggatgttctgacggatatagcggggatggtcaaattcatcgccgctgcccaggatcatataccagacatggctgatcctgagccggttgagcgtgtccaccgcctttttcacctgggtgctgtcgatctgcttgtgcatcttttccagcacttcgggaacgccgctttccaggccgatggtgatcagcgaacagccgcaggccgccatcctggcaaaaagctcgggatgcttgtagataacgtccacgcggctcatgcagttccagcgaatcttgaggcggcgctcttcaagctggcggcaaaattcgttcacccatctgatatcggcggtgaggttgtcgtcgtgaaaccagaaatccttgtagccccaggaaacgaactcctccagctcggaaatgacagtctccacgggacgctggcggtatttgccgccataaaaggaagagatggagcagaaggaacagcggaaggggcagccgcggctggaaaccagcttgggcgtgaagctgaactccggggccaccagatccatggagatgcggggcaggcggctgaggtcgtccaaaatagcgatgtggccgtcgttgtggtagcggccgtccttgaggaagacgataccggggatttcaggatagcgttcacccttttccagagcagccagaagggcgggaaagacctcctccccctcaccccggcagacatagctgacgccggtctccgccaaaacttcgcggtacatgaaggtggcgtggtgcccgccgatgatggtgggcaggccgggatagttttgcgccagatcgatgaggatttcgcgggcgacgggataggtggcggtcacgcaggaaacgcccaccaagtcaggctgatagcgcctgatatagcggggcagggtctcgcggtcggcaatcaccaccgtggccttgtgcccggcatccctcgccgcggcagccacatagaccaggccctggataatctgatgccccttgcgcaggctttccaggccgctggtgcgcgcgcggggtgaaacaagcaggactcgcatcgttcgatctccctttatattgggtgtttaacccgaccgggagcgaccccgccgcaggggcaggatcactcgaagggcaggaagttaaggaacgcgttgacgtgggcagtggataagaccacccctattatcacgcagacgacgataatcagcttaaaatagtcctgagccttgagcatgctcaccaggctcgggtcgcgggaaaggtaggcggaagcggcgtagaactcttcaccgatgagggtatagtcgcaggtggtgataaagaagggaatctgggtgatggcatcggtggcggcgatctggatggctccggactggtttccggtttcggtcatgagcagggcctcggcgtagaagtagcccatatagaagatggtggcgaccctttcgcgcacggtgattccatttaccgccgcgcagaacgcgaactgggtgtcggaaacgaagaagatgtcgttttggttgtaggcgtcaggcctgcccatttcgctgtaggcggtttggaccatttcctgcgccaaggggacaacaaagtagtccacatggggggagatgagcctgatgtcgtattcagcggtctttttggcgatctggttgaggatcatcatggcagagatggtgcacacatcgcccagggtgccccagccgggaacgaacatgaccgggcgtcccatctcggtggcgcggcccacggcgttgtcaagctcagccaatcccgcgatggggcggatatacaattctttgcggcgggatattgatacggtgtaaaccaccagcgcgagcattacaaacgaagcgatcagggtggcccatttggtgttgtcgaaccagttgcccacgggatagttccaaatctctccaccttcgccggaggctggttcggcgatgttccagaagcccttgccatcggtcatcagcagttgataggcgtagctgcggctgtttctgtccttttcagcccggaagaccttgcgccaggttttgtccgactttgcgtctttggcctgggcgtaggcgggatggttgcgcgcgaaatccagttcggcctgtttgtcccgcaattcctgggctgcctcggaaaggctgtctccgggcgccagcccggctttgagcgcggccagttctttctccaaattggtcagatagggggcaaaatcctgtttgtaaaggggaacccacaaaaccgctccgctgacggggtcctttgccactttgaaattgggttcaagcagcagcctgccggtcttctggtcaaagccgacgatctcgggggtgacggtgtcctcaaaggggatggtgtggtcaaaggcgcgggaaatgccgccgatgcgcatgacggggctgtaatccgaatccagtttgcttttggcaaaaacatcgaagaaatacttgttgagcaactggccgttgagggtgaccccgctgccgttgaaacgcaaggccttggcgtcgtaagtcacatcctgccagaccacctggggatcgaaatccttctctccccgcaggcgaaactcgacgcgcaccctgaagctttggtttttggcgaggccagcgggcagcttgaactttatcacgttgtccagatagtattccgtgaccgtgcccaaggtgtttttggcagtatcctggaaggtaaagcggagcctgtctatctcgtaatgctcgtttttggagagttcgtagttcaccctcagcttgtttttccgggagctggtataggaagcctgcgttatgaaggcaaagggcttgccgaaggaaacgatgaggttgtcacctttgtcgttgaccttgtcaatcacctggaaagccggcacgatgggcagttccgcggagttttttacctgcgcgcttttgcccagggtggctgcctggaaaccgccgtagtccataaagctgagcaccggaatgtagtcctgcaggctggaaggcagattgatgccttccgcggccgcgtccacctggtggtaaaaggtctggctccaatagggaggggtgtgttcaaagagctttatggagccgttttgccaggcggcgtaaaacacgctgtcaggggcggcggcgttcttctgctgttcctgccggtaaagcgggagtaggcttttgggcatcagccagccctgccagaggccgatatcggtggttcccgtgggagggctccattcaaacttgaactgcctggtgtcctggatgtaggtggtggcaaacaccgcgctggaatccggccggttgtcaacggggataacgctgcagacccgggcggcgggagtgcgcctgcctgtctcggtcaccgccaccacgctgtaatagtaggtgtttccaggcagggggttggcatagatgctttcaaactggttaagcttgtagccggcaaagacttccttgccctcttcgccatccttttccacccggcgggagccgttgtagaaaccgcgggcggtgagattgcccagcacgctgtaatggggaagcatggtgctcacgacgttcgcgtccctgggaactgcctggtagaggggactgtccggagcctggtgtttttcctttttcaattttgagggagcagtctcaaactggaccagggggagataatcccggtcgtagaaaaagaggtattcgcccatcacaccctgtttgggatcaacttcgatattgcccagcaggaagaggctgtccggcgaatggccgcgatagacgttgtattggatgatccggtggcttttgtccagaggcttccatctcaggagtactccgctgccatcgtcgtggggcatgtcgagagcttcaaagacctccaccccggcatttgcggaacggccgcggacgcagccgcccatggccagcaggagtgatatcagaactaagaggcagaataaaaagtatcttttcattgctttatcccttggagcattgctggtgtggcatcgacgcctgaacagagtccggggggaagaccgggcttcccccctcatgatctgtgtttatttagttgaatatcgctttgatgacgtcgttgaccaggaactggatacgtccgatcagcagtgagatacgcgccataacggttagtccgaatgacgcgccaaagccaaccatcatgtaccatttgccgatatccacaaacttcccataggcgccggtgtgggctttggaaaagaagaagtagagcaacacggcgatagttccgatgaagatcagcaacaggttgatgttttcgatcggcaccatagcctggcgcatctgcaccagaatgctgttgtgcatggccaagggaacggacgcgcccacccccatcatggaaaaggcgattggatagcgcgaaagccagctgtatttgcgggaaaagcggaacaggtagaaaattccaatgatactgggtatgatcagtatccattggtgtttgaggaagatgggctggacgaagaaggggatgaaggcgcgctcgtaggtgagtaccacggagtagcccagggatatccccaccagcagttgttcggacatctgatagaacggattgtccttgtaaaggaaggagaagatgcagagggtgaagaaggctccaaccaggttgctaaataattcaaaagacattttatcctcccttacttcttttgcgctttggcccggctgatgaagtagccgatgtttccgatgatgataaagagaattatcatgatgtgggccaccgactgggcgttcatgccgatacgggccgtcttgaatttatagatggtgttgtgggtcatgcggttgaggtcgttccaggctgtgtagccaagcttcttctggtcgtcctctttcaccttggtgacgtcgatgaccacgttgttgtcctcctcggtcttgtagctgctcatcaaagcctggacttccggaggatagttggccaggaacctgtcaaactccttctgcgagaaaacagccttggtttgagtggtgatcttgagcagtttctggatggattcgtcctccagaacgtcgctgctgaaggagcggccggggactatcttgttgccttcctcgtcgtaggtgacgcccatggggtcgccgggagcgcggtaagcggcaaagacatccaccagcttctcatattcggcagcgcctttcaagcccgccagcatgccgatgaactgtccggtttgcaggtagggatattcgtccgccgccataacggctgtgacgccgacggcgatgttggtgccgaacttgggcctggcataggtgagccagtagccgcccgccacggagccggaaaactccaccaccaggttcatctcgctgtagttgttgatccctttcataatgggcaggttttccaccttgcgcccttcggcgtcggtgggcaccgccgtggcaatgtcgtcgcccatgccgatgatggttggcatgatcagggcggcggggatatagccaaagttgcagtagtccactccagacttgatgtccggatactcttctttcacggagttcacggcatagtcgatgatgggggctccggtgggcaggaaggaaagcaggaagagcttcacattacgctcgaagcagtggcggatgatcgccacttccatcggatacagttccggcatggtggaagcatcgtgccagaagctgagcaggacagcgcggtcttcccggccggcataggagtctattagctgataggtgttctccgtgggaggagaggtgatgttgtcggagttataggggatcatcaggggaatgacgatcgccagggcgaccacgatgtagatccaccggcggtcgagcttttgcagtctttcaaatagattcattttcacctccgcctttaatctccgcccagatacgagcgttcgatgcccaataggatcttgagggtggtggccacgctgcccagacccacacccagcaggattccgcgcttggacgccagattcggcacgtccaggatccattgggagatatcaggcaggtatttgctgatcttgacgcccagaggcacctgagccagcatcaccactatcgccgccaccagcagcacggtggcttccgcggaacgggcgcggaaagccttgtaggcggcggaagccatataaaaagccagcagagcgaacatcgtggcgctcatcggcatctgcatattttcgaacagccacatatagaggccgcccttctgggttccgccgatgaatccagccaaagccgtgatgatgaaaccggcgaaaaagaagaaactgtattgccatttgggagctttgcggcgaatcttggatgtgtgcatcatgcaaaggctgatcacgcccaagagcatcccgaagggagacatggcacgaatccagggcacatagaaatcgtagtagaatacatcctgcagcagtctgtgcggcacaaagacccacagcacccagacgattcctcccaggatcactatcattaatggtattgtcttcttcatttacgacctcttctatttaatagggaatagttgcattaaacctgtgacctggaagcttgccaaaatgccgcccagaatcacgaagatcagaatcaggaacttgaaatagtcctgggctttcagagtccccagcagcatcggctcgcggttgaggtaggccgaggcggcgtaaagctcttctccgatcagggtgtagtcgcaggtggtgataaagaaaggtatctgcgtgatggcgtccgagccggcgatctgcacggctcccacggtgtttccggtttccgtcatcagcagggcttccgcggcgaaatagcccaggaaaaagttggtggccatgcgttcgcggatcatgatgccgttcacgccagccacataggcaaattgcaccgaggtgagatagaatatgttgtttttatcgtagctgtccggacgccccacggcgtagtgagcctctctcactatctcctgggcgatgggcatgacaatgtagtcgtagcaggggacgatcagcttggtgtcgtattccgcggcttttctggccaccagtcccaggattcccagggaagccagggtggccacatcggaaagaccgccgttacccatacaatacagcatcgggcgtcccatctccgtggcgcggccgatggcgttgtcgatctcctgcaagcccgcgatgggacggatatagagatccttgccttgcttggccagtcgcacgaagaccaccacccccacgccgaagatgatgcaggcgacgagggtgaccagtttgttccagtcgaaccagttggataccgccaggttgtaaatatagtcgccttgggcatccttttcgggataggattcggtgaagaggccgcggccgttggtcttgacgatcatgtaggattgcaggcggctgagcggttcgcggatggaagccacgaagttcattctgccgcggttgccgcggaaagtgagggatttcttgtaatccgggtcattctcgtagatcttgatggtcttggccagactctcgtttttcgctgttaaggcttcaatctgctgttgcaaagcctgcgcctggggattggcagccccgccgggaatagctttcatttccgcttgcttggtggctatttcggccttgttgtccttgatgtcctgccgcatcttatccagttccttcgcggcttcatccttgaacacgctggtacggatggtgcgggaatccttgggatcgtcctgcttgacatatttcaggtcgatctgcgattccaccaaagtcaggttttgaaccttttcgccagccttcagcttgcgggtgtagcgctcgccgcccatataggtgtaaagcgtgccgcccttcacaaagttgaagcccagcacgggcttgcccacgttggcaacgtaagggatggtgacatccaggctattatcgtaggaagtgttctttttcaccagggtaaactgcgagccgctgaatgttttacggaacaccgtattgtgcacggaggaaacatccactccattcctgaagagttcgttggaaggcatcagcgacatcatctggttgtcccagacaaggttttgctccaacacatagttgggtaccaaacggcctttctgatatgtgatccgcccgtttttggggttgatctcgtaagggctggtgttcatcgtgatgcgcaccttgaggcccttgttcagatcatagcccttgggcagggtgaccttgatgatgttgtcctgatagaattcgttcaccctggcaaagggcttgtccgaaccgggaaccagcagttcaaagtagatattgttgaccttctgcacgtcggtcttgttaagctggtaattgatcttcagcctggtgccgccctttcctgccagaccgagcttcgcgaacaggcctttgttaccgttctcgcgtttgataatggaggtcttgctgatgaatactatcggttcgttccaaacgactgtgagcctgtcgcccttgtcgttgggtttgtcttccaccacaaactgtgctgcctggggcagcttgctgctgtccgaaagaactacacaggcttggcgggacaagggggaggggttgtttctgtaatcataaaactggatcgcgtaacggctggtggaagcccgttcccaactcaagccggctggcaattcgtcatgtttgaccgccgcgtagtttttgaacgcgcctccattgatttgaccctgggctacaggcagcgcgttggccatggcctggggcgtgcccttgatcttgcaccattgcgaatccggcatctcgggcacagccatgatctggtagaaggcgaggtcggatttgttgaccggatactcccactcaaagcgcagcgtcatgctgtcttgcaaagcggtgcaatagagattgggagaagcctcgggcgcgtcatccacgggaaatccgcacttgggttcggcaattcccagatactggttgcgctcattcaccggaaccacggtatagtaatacaaaatcttgtcttcttcgctggcaggatcgtaggtcttcagggaagcagagatgctctgctggttgattttcacgccagaatagacggtcttgtcttccgaatcggcggaaaaagctttcttcgtccggcgatagtagtctttggattccattatcgagtaaaggttgtatccttcgctcaacctggctaccaattccatatcgcgggggatgttgcgatacaggatgctgcctttcttctgcttttcgtgcttgagctttccaggcgagttgatatccacaaaatcgttgtagccgctatcgtagtaatacatgctgtccgaggcaacgccggttttcacgttcaccgccacggatgcaagatagaacagggaatcgggggtgagtcccctgtaaatgcggtattcctggattctcttttcgcggggcaggggcttccagcctattaccaggccatcgcctccatcgttgggaatatcccgcacaaagagaccctgaaccgtatccagggtttgcccgttctgatccttgcctgttgaaaccttgcatccggccagagccagagcgaggacaagcatcagtccgaaaacacgtatgtacaatttcatacgcttactcctatgctttttcaatttagtaacttatattaaattgcatcaccttacaactgcgcaatattgtcaaatccttttttccttgcctgatggaacagcggggcttgaaagccctgtctctggttcttggctcgggcaacgcataagtctgaatccctacttgaaattctgttgattgccacagagaaaccagacgccatcctcccggtaaaaataggaagcgtcgccctcggtgtcgggatccagatagctgagagtgctgtccgcggccgtgaaggtcagcttcatgctcacgatcgcccgggagccagccaggtcaatatcccgcacttccacgtcaagcaggtcgaagcgtgccatacggtcctgccacagcccgcgcagttgaaagccatacatccctttgtggtaatagtccggatgcacctgggtcatgatgccctcaatgtctttccagcagaaatcgcgggcaatgcctttcaggatatcctcgatgcggattttgtccatgtcttcgggactgctggccaaattgcaggacagcaggaacaaacagagcaacaggacgccaagctgcttcataggcggctcaaccaggccagagtctcaatgtgccaggtttggggaaacatgtcaaaggtctggatgccttccagtttgtaacgcccgctgccaagcaggatcttgaggtccctgtgcagtgtcatgggcgcgcagctcagatagaatatccgcttgatacccgtgtcgattatggcttgcaaggctgccggtttcactccggaacggggagggtccagaatgatcacatccggcgttttgcaggggctgctttgctggtctgaaagcagcgcgggcagggcgtcctcaactctggcgcagagatggtcaacattcgccaggtcgttcagttcggagttcagttccccatccagtgccgcttcccggcattcttccacgcagagcacgcgttctgcctgcgcggccaggttcagccccagcgccccgattccgctgtaggcgtcgaagaccagtcccgcgccgcccatcagtttctgcaggcgggcgatgatctgttccgccgtgccgcggttgatctgccaaaagctgcggtagtggatgcggaagcgtttgcccgccagttcgtcaaagagccagggattgccatacagcagtttgtcttccgggcccaggatcacgtttccccgttcccggttgatgttttgcacgatgccgctgatgcaggggaattccgcggtgatctgcttcacaaagaggttggaaaaaggcagcttggctcccctggtcaccaggatcagcagcaccgagctttgatctctgttgctgcggaggcctatgtggcgcaaagtgccggtgtggctggcttcagagtaggcctgcacacccgctttccggcagatttccaggcaacgctgggcgatggtgtcaaagagttggggatgcaggacgcagcgctgatgggggacgatcctgtgcgaccagcgcgcgtagatgccataatagaggccatcggcgccggaacccacgggcagaaaggctttgttgcggtagtttacgggatttggggaagcgggcatggcgccgatcttcaaatccggggccaggggctgcagcaattccctcaccagttcggtcttggctgccaactgcgccgggtagtccagcatcagccaatcgcagcctccgcaggggtcgtccaggtcaaaggaagcgcagtccgcttcccgcactcccttgccccgctccagccaacgcaggggcctggcaaaggcggtgtccttgcgttctttgaccagctccacttccgccaggtcgccgaccgccatccgctgggcaaagatcgccttgccctcgtgaaagcccaggccaaaaccgcccagagccagcttttctatccggaggatgaatctcttgttcacaccatcatcttacgcagggcttcaatccgcttctccaccggcggatgcgtcgcgaacagggagagggggctgaagttgttgatcttggcaatggcataggcgtctttgcggcgcgaaggcacgtaagctttgctgatcttttccagggcggtgatcatgtggccgggggtggtcagggcggctgagccggcgtccgccttgtattcccggtggcgcgaatgggctgccagcacgatgttggcaaggatcatcagcacattctggatgatcatcgcgatggcggcctggctggcggaatgcatcatcccggacgaagccccgtcatcatcgtttctgcctcttctgccgctcaggagggcggcgatgatattggccagaaagagcacaaaggtgttcatggtgcccatcagcagggtggtggtgaccatgtcgccttccgtgatatgcgtcatctcgtgccccgccacggcagccagttcctcctcatccaggttttgcatgatcccgctggaaaaggcgatcagcgatctgtttttggacgcgccggtggcaaaggcgttgttgtccgccgcctggtagatgccaaactccggcatcctgatgcctttgtgggcggccattttctctatcgtatcaaagagatagagctctttgccgcgggctgtctcccgggtgagcggtgtgatcctgtaggatgccttcgccatcgctttgctggaaagcagagaaatgaccgctccggcaaagccgaatatggcgcagtaaaccagcaacccgatccagtccgagcttttcacgcccacgatctgcatgataaaacccaagacagccaacaccaggatgttgactgtcaaaaacagcccccaacgtttaataatagtccacatggattatataatcctccttacaggtttatcggattcaggggcagccacgggaatgatctcagcccgtgccacccttggggtcacactaattgatagtgcgataacaaggcaagtaaaatttttggtgcccagagattagaaaggcttcatgcaaatatcggggcttcctttgaggtggaaaggtggaaaggagaccttcgtggtgaggtggtgtcgtggtgattgtaaaaaagagatagaacgcggatgacaggatcgacaggatcagcaggatatttgaaggtgaaatagcgaaaagaaggccacgaaacaagtccaccaagctatatacagtgtcatcccgggcaagccggggtcctcgacggatcggttacgatccgttggggtgggatagcttgacccgggatccagtcttttaataatgtccacgaattacacgaattatcacgaattaaaagaacaggataaggacagcgtccagcttcaaaaaaccacacaagacccaaaaaccgcgtcatcacggcctgccggggtcctcgccaaagcgcgtagcggtttggtggggtgtatagagccgggatccggtgcccaggggtggcaaagtctgtttgccacagagaccgaaggtctctccccaacaggcaactccgttgcctctgccgaacagacttcggcagcccacgaaacaaaccccaccaggctatatactgtgtcatcccgggcaagcttgcttgacccgggatccagtgctcagggggtggcaaagtccgtttgccacagagaccggaggtctctcccaaaaaggcaactccgttgcctctgccgaacagacttcggcagcccacgaaacaaaccccaacagactacataccgcgtcatcatgggcaagcttgcttgacccaggatccagtctttttatacaatactccccatttccggccagtttggccgctttttggccggattactttgtagttcggtaaactgtggatgggcccctaccctcacgggatacaaggccattctgagttaaagactccaagtatcttctaactgaacgaatgggaagttgcattgaatctgctatctgggttgatgataacacaccgtgcttctctattgtttgatatacagaccttttgagggaggaatatgcatcgggtctttcaaaccgatcccgagagatcaacttgagccttaataacagatcattctggactgtcatacatagtggcttcaagcgatgagctatgcgaggtatttatttggggaagtgctcgtgcatgatcttgatatcagcctggcttgcataattcacgataaagacctttacatttgcttgtgattcatacttaaccagcttgcctccggctattatttgggcgtttttctcttgcgatgcatattttacaaaatagaccttgtaatccgctttgcttgcgtatttcacgataaacactttagcctgacttgacattataacctccttgatttacatgatattgctttgcattcagacgtccaggattgttgcttttatcctgttggtcaatttctcgaccaaatcttcagcgttttcccagataatatgtttgtactgtcttgtgtcaaaaatatcagatatttgagttccttctttacaacaccagatcaccggttttctttggcccatcgcataaccggcttcaaagtggacgttgatattggggattgtggtatccgctataaggaaatcggatttgttaatctctgcaataatcttatcatcaattttgtcgttatactcttctttgtcaacacggtatggtatcagatcaagtgaaccaactgccttccgtattccattctcatatacgctatccagttctgtatctccaaatttcatagccacaaagacctgttttgttttcacactacccgagacaatctggctgattcgctcccagccttttagctctaatctgagagtatatgtcttagcgagaaaactatcattagaatcaacataccctatgttttttgcgaatctgactaagtaatacagttcttgtttgtcatgcataaacagcaagggacagtcagtttccgcaatggctttcacttgatcgactcgagtgatatgcttatgtaaatataacaataggatatctatcaactcaagtggaccggagggaaatctcacgctttgctttatcttgtcgatgtcttggtggtctgttattttcgaaataattttcgattcttcgtaaagatgcctgagcgcaatacaaagctccttatctctggctggtttgactcctggtttattaatattaaaatgacttaccatcctaaagccattgatctcaaattcaccacaataggcacagcggaaatggaaattattattgtaatctgtccctatgggtgattcactcagtgggttgcggcatatcggacattctgtaacaacgcagttcatgtgtgcatacctccttggtactatcgttacgttatgaatataaactgaaactgagcagggctaatctctgttattgaaaacctgggttggcgcaggaacagggaacccttgaaaagatcactttctttgaggacagaaagaacaacgggttccgccaaggttttgatgggcttgaaatccacgcacagacgttgcgtttcacaagcggtaaaatcctgaaaaggttcgcgggcaacttccaagactcccatgcaggaacgcttatgagggtcataatagatggccttatcatcgggaagcatagacgcaatcagtttttgagcgtatctacccttgatgccgtagaggctataactgtcccggaagagaacatcttcccagttatggtgcttatagggattcctgatcatccaataacgcattgttaaccaaacggggataacgtcgggcataccattgttccacaagctcaatatcttgatcacacagaccgtatagttcatagatgattttatctatttgcctttgttcattacttgaataatcgtagtatctatcagatatctgttttgttatgatcttacggactaatgagatgattttatcattgtttccacagataattggtatttctttgattgcatctatttctgcagctacaccatggtatatcaatgccttgaatataaatttacataattttgaacaaaggatagacaaaatgttgtctatttggagataaggggttgtaacattaattaatgatcctctaatatcataaacagaactactattgtatctaaatgttggggcatattgacctacaatcgaaaatgttattccgttactaaaatatgtgtcactgttctgaaaccttgaacagatagcatttgatcctttaccatccctttctctgatagtcagagttttcattcgagtgacagcccaagaactccaatctatgaagaaatcagttttaacatagtagtttggcagccaaccggattctgtataagaagcgccacctttgtcataggggacaatgtattttccaccgaaccaacggtcagggtcaaatggttgctcggagcgtgattgatgaaagccaaggttgattatcttgtggcggatattgtcattttgtgatattttttccagttctgcgtcggaaacgacatatttcaggtatggctcaatgcttctgtatgtgggtccagattcgggggtctggaaaagatacgatttattgtcgccagtggcaagtccttgagttaccgacgcaatatcagagagtttgacaagcgtgaccttcttaccattgatctctacagttctttcagctttattcttagggttccgatcaacgccaacatcatgcattaaactgaacaacttaggaggggcgacgaagaaaggcagcaaactgcatttatggataatgttttggtgataaatgaacacggcatggacattgtcggagtattcaactgctttttccgcgtctgaaatatcatacaggatttccaggaacttatccagatacttgtggatgctaatgttggtcatatccaccataaggcattgatgggaatctggtatgctataccctggctccgctttctggcacaggattaccacggtgttgaccacttgcttgaaggtgtccgggtgcatgcggattattttgtggatatagttgtcgagcaattgcctgcgcaattttttgtgggacttgatcgtcataaaagtgtcggaaacgatgtaagacaaaaccccatgcggtttcagcggagtgggaaaatcgttgaaattcatgaagcgggcgatgaaagcaccataagggtcatttgaacctaaaccaaggctacttctaacctccggggagattttatcgcctccatagggtggattaccgattacgatatcgaatcctccttccttcatcaccctgggaaagaaacattcgggatggaagaagggacaggcgatattgccatacataaaccatcgtttccaaaacactttgagcctgtctttgcttggatttttaagaccccacttgaagctttggtataagttgctaagttcagtggaaatacgttcagcgagctgttctttttctgccttggtatgttccgcctgatagtattcctcaatcgctcttgataagtcattagatactatttcttcgaatatatcagtttcaatatcgttgagagaatctgcgcagatcaggttggtctctaggttgggcagaggcatcactccaatgtctttgctacagtctgtattttggtcaaccaccagagatatgaagaatctcagttttgcgatatgtactgccaaaggttggatatccactccaaagattgagtcacgcaggatgccaatcttgcgggagtagtcgtcgtagtgttccttcaggtgtttgccaaaatcgtcgcgatattttccttccagcggttccagttttaggtgtaaccatttagagttatcgggatcgaccagattgagtatccgtgtgatcttgtgaagcatgcccatgggaaatgaaccgctgccgcaggctgggtcgaggatgcggattttatccagggcgtcaaccacaaaatcgtcaaaacgcttctcattggcattgacaacatcatggtaaactaggaatctgatgttgtctccatactccattagccccttttctttcgccttggactccagatacaacaccaacgagtcattgaccatgtaatcaatgacctccctgggagtgtaatacgcgccgctgcttctgcgagcgtttctggaaatgtcggggtccgggtcgagttcagccagaaggttttcgaagaccatacctaggagttccggatcaagcgcgacatcttcttccaggggtgtgttttcctcgatggtaaacttgaacttgcccagaatcacattcaacccgggaacatcatctgatctcctgtttccaggagcctgccagccgtagaagatcttgttgggtatgctgatatccgagtctgctatgttgttgttaagtatgcagtggtcttctaaaaactcatcgtcacggttgaacactcctccattcaaaaatggtattctttcgaaaacagtcaaatccagtgcaggatccaggtatttttcaattttgcctttatccagtttacgacttttcttaggctcgttcaggcaatcgaagaacactgtctgcagaatgccacgataatagctattgctttcgggattatcgttatcttttactatcggatagggaacatcggtgtctgagaacagctccagaatgctgctgtcaataaggcctttttcttttaggaaccaacagaacatcaaccggcaaagcaatttgaccagaaagtgcttcttggtctcgttttgctcttcttcagacagttgacactgaaacttgagcctgataatagaaagggaagtgcgataccaagctatgatttgattatagaattccctgtttagttcccggatagagagttgtttctgccaagctttatgcagttggttgatggatgaaacatccaagttcccaagacaaaacttctcaagaatgtcaatgtgccccctgtgcggagtggcgtatctgatatccttaaccaagctaactttatccaagacatctctcgtttcgtcgcgtttgttcagccttcggttgataacggatgtagtcagcagttcgccatatttgattagcagcagcacaggcatcgcgaagcagcggttgatttccctggttaatgcaaccaactcttttcttgtggcatgaagtcctttcagttcaattgatgcgaagatatacgacttaacctcattggagtcaaccgagttacttttaaaccccggtatagtcgtttgaacggagaaggagccagcttctctgatctcatcatttgtgagttgaaagtgcagattgatctttgtccagcgctctttcaaggcttgaacaggcctaagttgatggcgggtagaaaatgcttccgtaaattctgaataggtataggatacttcttcgaatctacgctgggattcatagcccaggactttccaaaaatcgtaggcggcatccacaaaaggacgggtttgaaagttattcaaagcctcctggatggaaagtttcatgtctgtctttgcgttcataggtcttctctctggtgcttatttgattatcagccaggtaatcagttcaaattcaccgccggggtcatgttgtttcaggggagggagcacagcatcgccatgggtttggagttgatcctgctttttctttgcaagggaggctttgatgctttttaaggctttctggatgagctcattataggctctcatgtcttcgcccgatttggtttcctggtcgaactggtcgcaaaggctttcgatgggacttcgccgtccgctggccaggatccggtacatatccaggatctgcttggcattaaagaaacggaaacggacggtgccgtcggtgcggatgtagatcataaaatagggatggagagggttgagcttttcgtattccctgccagattcgttgtggcggaggcagaagatcacaccgggccggatgatttccctgtgttcctggctgactttgaccgagtggtcccaaagttcgtggtcgggagagggcaccacggtgtacaggccaagaggggcttcgcgcagctctttttcgtttgctttgatatagttaagcagatcaacccggaaatcatccagagtgaaatcggtcaggctgatgccgtcttccatgtcttcgatgtcgataacctcttcctttagccttttcaactgcttggcgcggaacttcatttcgttggaaagcagttcttcaaattcctcttcggcgaagagattgtcctcgcctgtggcggtaatatccaccagagccatcctcgcctccactctcaacttgagggagatgtatttgtccaggtctttggtaggccagaagttcagcatctggattttggcattggggctgttgatgcgatcgatacgcccaaagcgctggattatcctcaccggattccagtggatgtcgtagttgaccacatagtcgcaatcctggaggttttgcccttccgagatgcaatccgtggcgatgatgatgtcaatctcttcatcctggggcaggatgggcatcttgtggcgctgcttggcaaaaggggcaaagcaggtgaggatggcgttgaagtcgttctggaaacctttgggcagcttgatggttgttttattatgagaacttccggtgaccagggcaacattgagaccaagctctttgtgaatgaaatccttgagctgctcatagaggtaatcggctgtgtcggcaaaggcggtgaagatcaatatctttttgttgtccttgtttaccggatgtttcagtttgttggtaatgatctgcttcagttcctcaagcttggcatccttgtccggagttaccaggctcgccgtgttgtaaagcgagatcaactggtctttgtccttgctcagggcttccttccatttctccagatcgaggtgttttagttcaaacttcagtttcttgccaactgtgaaatcatcgctgttatcctgttcttccggtgaaaccgcgtcctcatcgccaaaggagtaaatatccccatcttgagtttggccggattcaaatttggcgatcttgtcctgcaggctgttgatcttttccaaggcccgcccgagggtcagggtataggaatgaacgctgctttccaggcgcttgaggaagtttatcttcatcatctcaaccagaaaatcctcgcgttgggcttgggaaaactccttcactttctctgttggctcataaagttccttaaactcctccagaacgaagctggagggtttgaagagggaaagcttgtaagcctggatgtcttcattcactttgtcgtaggaacaaaaatccccttccaggtcgatattcgtgctcaccgagatcggcgttagccgcttgggaaagctctttttatcaatatccttgtagtaggagacaatatgcttgcggctgcgggctatggtaagttcgtcaaggagtttgaagagcgagctgtccagggcgctgaagagttgcgagcttttcttttgtcccgctttgttgctcttcacccagtttgtgaattggctctgggcttgtttcatggtgtaggagacactttctatacccaggctttcgtagaaggcgtcgtccctgccttcggtgatatagtgtatctggttgcgcaggtctttcaggttggtgttgaccggggtagcggagagcatcagcaccttggttttcaccccctctttgattaccttgtgcaaaagaaatccagcccggttatagctcaactcgtcgttttcgtcgatcttttcccgcggatttccccttagattgtgcgactcatctatcacgaccagatcccaggcgccccagttgaaattcgccaggtcgatggaattggcatccgaagttccccgcgctctgcccaggtcggtgtggtacataaccgtgtaggaatagcggtctctggtaaaggggctgagtttgttggcggccatggattggtaaacggtccaattatcttttaactttttggggcagagtaccagaaccctgtattgcagcctctcatagtattggatgattgccagggcttcaaaggtttttcccaggccgacactatcggcaataatacagccgttgtggcgttccaacttgttgatcgcccctttcacaccgtctttttggaagctgtagagcatgttccagatctcagtgtcgaaaaagccggtcttttcggttaacagccccttgtcagcttgctctcccaggaacttctcaaagaggtgatagagggttttataatagataaactctggggaattatgcacatagagttttgccaggtattttagaacttcgtctttgacatcctcaaccaaggatttatcctcgttccacagttcgtcaaaccaagccaggagatctgccctgtcgcgatcgtcggcaacctcgatattgagctcgatattgggtttgttcccgtatccgagaccattaactgtgaagttcgagctgccaagcagggctttctcaaccccgttttcatttgtgatgtgatagagtttgccgtggaggaaatttggcttgaccatggattttatctccaccttctccctgatccattccgcgcagtctcgggctgttttactctgcaccagcctgtttgccagggagatcaccagcttgttgtcctctatctcgaactgcttcttgtcggtcttgttgggatccatggaagccaggaatctgggctcgccaaagagaaagcgcaggtgatcgatcttgtccagcctgttcttcaactgctgataggcatagattgtaaaataggcggaaacaaaggccaacttgctgttgggagtaacgtttagggaaatgaagtcgcccactgtgccatatttacggttatcccgaatgcctgaattcttgttcataagatttatcctaatctccaaaataaagaaaaacctgttggcgtttatatgaagttccagagacgatttcatctataactcaaaacgcaaccccagtttgtttcgtctatttcagcaaggaaaatctgtcaacctaaaaaagcccggagttgagagctttactacaaacaataatcttaccatagatgaggcaggaaaaaactgaacccatatctcccgcaatgcgttagagaggcgttcccctcgtatttgggcaaacggactttgccattcccctcgggctgccgaagtccgttcggcagaggcaacggagttgcctgtttggaagagacctccggtctctgtggcaaacggactttgccacccctggacactggatcccgggtcgctgcccgggatgacgcggtttttgggtcttgtgtggttttttgaagctggacgcttgtccttgtatactgttttatttcgtgataattcgtgtaattcgtggatgtttcttttaaaagactggatcccgggtcaagctatcctaccccaacggatcgtaaccgatccgtcgagggccccgacatgccgggatgacgcggtttttgggtcttgtgtggttttttgaagccggacgcttgtccttgtattctgttttaattcgtgataattcgtgtaattcgtggatgtttcttttaaaagactggatcacgggtcggagcccgtgatgacacggttttttagtctggggggtggtctttttgggggtcggttgggacttgtatcgagagaacctttccaccattccaccattccacctttccacctcaaaaacacctttccaccttttcactatgataaaaataaaacgcaaacaatatagtattacattcaccaaaaacaccagcaatattccgcataatccttcatagcgccctcccttgctgctcctgcgtttgctgccatcatccttaggtcatccctcaccaagttaaggatgacctacggaaaatatagacttagcccaccctggcaaatgagggcaaagaggtgatcaatctacgctcattaaatgtataaaggttatccatagcagaggcggagcgcaaatgatcgcactggagatacacgattcgcgcagggcgcggattgccgggacaagaaaaacccccgggcagtgccgggggttgcaatctcagacagggtctgatcagtttactttgaaggttgtgtcgcctttttcaaagaaggcgatgatctgtttggcagccgccactccggcgttgacgttggcttccccggtctgggcgcccatcttttttggggtggcatagtagcggtcggcatagagttccatcagtttggcgccgcattccggttccacgtcgctcacatagcggaatttcttcttttcctcaaaggccttgagcagggcttcctcgtcaatcacctctttgcgggcggtgttgaccaggatgcagtcgggtttcaccaggctgagcaggttccagttgatggatttcttggtctcggcggtggcggggatgtgcagggagatgtagtctccggtgctgaagatgtcttccaccttatccaggtgtttgacgccgtctttggccatgatgtccgcgctgatgtagggatcgtaggcatagacgtccatgccaatgcctttggccattttggcgagaaagcggggcacatttccgaagccatggagcaccagcttcttgccagccagctcggagccgcttttgccgttgaacttgccgcgcgccatgtagatcatcatggccagcgccagctcggcgacggcgttggagttttggccgggggtgttcatggccaccacaccgtgggcggtggcagcggcgaggtcgatgttgtcatagcctgctccggcgcgcaccacgatcttgagttgtttggcggcgtcgaagacggcggcatccactttgtcgctgcggatgatgagggcttcggcatctgccacggcggcatggaagtctttcacgtcggtgtagctttccagccagctatggggatagccggccttgtccagttcagccttgatcttctgcacggcttccgcggcgaagggcttctctgtggcgatcagtacttttggcatattagcctccctatgtatattttatttctggtttcaagactttattttagtgcgttttatgtcaatgcaaatctctgtcatttgagcagcagcatacgccgtgactgcacctttccacccgcttgcaggcggtagagatagactccgctggagaccgggtcgccggaggcgtcgaggccatcccaggtgacggtgtgtgagccgcgggaacgatggccgtcgctcaggacgcgcaccaactggcctttgaggttgtaaattgcgagccggacggagccttcggatgccagttggaaacggatgctggtgctgggattaaagggattgggaaagttttgcagcagggcggtgcgcagggcgggagcttcttccgcgggattggagacgttaccggtggagacgtagctgccctggcgggtgagtgagccgcggtaaacggtccagggccggttgtccttttccgcgcggcgcaggttcagcaccagcactccggtggaatagccgctcaccagcttgagccagccgtcgccgtccagatcgcatagcgtggagggcgtgcagccgttgaagctggtctggaatggaaatccgtccaatacgctgccgtcgtggttgaagccataaaccgagttcacatagctggaaacgaggatttccaggttgggatcgtcgtcgaggtcagcgatgatgggcggggtctgcagcacggcgccggtctgcaccgggaagccgggaaggtctattccgctctggctgaccgcgtagagtgagccattggcggtgccgaacacgatatccagcgcgccgtcggcattgatgtccgccagggcggggctgccgcccatcgcggagctgatcggcttgctgaagaccaggctgcctgcgggcgttgccagatgcaggtggctggaggtgccgaaggctatcctgcggttggcgaggatggtgggcgcgccgttgattgcgccggagacctggagggggaaacccgccaggggagtgccgtcggatttgatcacgtgcagcttgccgttggagcagccgacgatgatctcattgccgccgtcgccgtcgatgtccgccacagccagttcgctgtggaaggcggagccaaggtcaagcgggaagcccggcagcaggtttccggaggaatccaggacgtggatcttgccatccagggagtgcgccaccacttccatcccgccctgccagtcgatctgggcgatcacgggggtgaagaggaactggctgccgccatcgtaatcgaaaagcacttcatcgcctgccagtgccagcactttaccggtgcggctggtgagtaccagagccggttcctggccgtcaatcaactggccataggcggcgctgcgcatcacatcctgctggagaggcgcgggaatggagccggtctgctgccctgcgttatccagcagatggctgttgccgaaattatcggtgtaaagtatgtcgaggctgccgtcgccgtcaaaatcgaagacgatcggggcggatttgctgcccacggggcaatcccagggaaagctgccgtcaatgagggtgatttcatattcgagctggaatctgcgggttccagtgctcaagttggtgacgggatgcagcgattgcagctccagggtgatctgatagctgccataatcgatgccggacggaagttgcacacggaaatagaggccgggatcggcggtctggcctggcaacaactgtggtatcaccagcgggtcgctcaaaagctgcgctccggctggcaggccgctgagggtggcggtcacgttgtgggccgcggcccaattctgatggttgctgatcacggggtggatgcggatgatctcgccgggattgatggtgccgtcgccgtcgccctccacatcgtcgatagtgtagctttccaggctgagcaggggcagggcggggtcaggcagtttgacctcgatggaaggatcgccaaatagcaccatctgatagtagcaccagcgcatcacgtcatagctgatggcggcattgaggttctgctcgcgggaatagctgagcgcggagccaaactgggtgttggccgtttggtagagaccgatgaagtagtcgcggtcatagaactgggaggcgccattggtgttgccgggggaataccagccatagcgggtgtttccgaggaaggcaaagacgccgcccgaggctgtgagcatgtgttccgcgatgctctcgccgtcgccgctggtggcctggtcgaaagcggcgggatagcagccctgggtgtaaagaaagccatattcggtgttctggagctgctggatgctgccgttgctctgtcccatcaggaaggtttggttggcgtgtcccatgtggttcatcacgtggacgccctcgttgatggcgttccagacgccctgctcgctgtaggtgccgtcgcgctgatacatggtgcgcaggtggtacagttccgggacgctggtggccacttcgtccttgtaatctccgccccaggtgagggggttgttgttcaggttttctccgaacatgatggcggtgttgttgctgaacgtggaattgctggtgtagtattggattttgcggatgatgttttcaaactcgggttgggtctcggcgggaaagcgtccgatatgcacttccggcagcatgtccacctggtcctgcggttcgccccagatgtcgtttccattggcgttccagtctccatccagattgctgaaatagaggtcggtaggcattctgagatcaaccgtgtcgcccacctggccgtagcagccgcgcaggggcacgatctcgtcatcgccgcccaggatcacatattgcagaggctggggggtgcttgcccaggcttgataggcgtcgctgatgaaggcgcgcaccttggcggcgttgtcggttccgggatagctggcatagatatccgcggtctggaatacgccggtgctgatgtcgttgccgtcacgccagttggcatagctttgcagccaggaggaggcggtggagttggtaatgatgaccatttggcgcggagtggaaaggtcaatcaggcggctttggggagcgtggttccgatagcgggaagcctgctggtagctggccagggcctgggggttgagggcaaatccttccacagagcgggcagccagggcgggggcgtagaagttggcctgttgggtggccagggcatcatcccatccggtttctatctcgatgctgaattcggaagccgcgtgaatctggcgggaaaccggattgtatttccaggggaagaggtccagcacggcatattggaggccgcgctgcaactgggtgcccagataacggtgattggcggccgggaacagcgcgtcgctctgccagatcgcgggatcgggctgagtagcgtccggacggggctgcgaagtgggctgctgctggcgcgcgtagtccagatacacgccatcgcgctgcaacaggtaaggggagctttgcacgctcacgttgagcaccttttccccaaaggggatcagcacccgcacggggtaatagttgagcgcgggaacgccgggctccagcaggggtgccgtgggctggccgcgcaggctgccatcccaggcggaggggtcaacgcttacattgagggtgagcgccaggctgattccgcagagcagcgtcaggccgatcagggcggtaagttttttcataatctgtattccatcttggtttatcgaaatgtagtcgaaaaattcttatgtgagaaatggcagaatcagtcaagtagttttttgagggcaaagaaaacagacgtctgggctgcgtttgtgatctgtgaatacctgcggaagacaagggatatgaaccaatccttagaacaatgctgccctagcaatttcagctcgcaatgggcgcctcacgctgtatatccggcgccttataaattttaaagaaagaagttgcgaatatggcggacttgtttaaactatcattctgtaagctgtttgttttgcgtctttatgtaagggcagcgcctgcccgcgggacttgttatcttttccaatctatttgaaaaggagtctttttcatgaaacacacggctatgctactactgctgctcgccaccagcctggcttttgccaaccctgtctggactgaggacgtcgtggtgcgggaagcgcaggatctgagttacactggctgcacgcagcaagcagatgacggcagcctgatcacgctctggacgcagatactggatggagaaaactgcctgatggcaaaccggatcagcgcgctgggcgaggaggtgtgggattccccactgcgtatagcgggttgcggcctgggcatcggcggagagcagatgaagagacctccggtctctgtggcaaacagactttcccacccctgggcaccggatcccgggtcaagcacgcttgcccatgatgacacggtatatagtctggtagggtctgtttcggggtctggtggacttgtatccaccattccaccttttcaccttttcacaaaatacttagaataatctccataatccttcatagcgccctcccttgctgctactgcgtttggtgccatcatccttaggtcatccctcaccgggttaaggatgaccccaggaagacagagacttagctgtctcgcgcgcgcgagagcggactgacaccagtcttagttttttgcgcccttgttttagaattgatttatccactcagtgttagagatagcctgattttctgccagaaaaggaataagctcaagtccctcccggcatttcctccgtgccagatcgtaaaatccgtttagattattcaatatcaagccttaaaaggagtatccctatgctaacagatcaagagatcgcgcgcagcgtaaccttgaaacccatagatgagatcgccgcccagattgggctaagcccccaggaactggaacattacggcgagcataaagccaagctcagctattccgcgctggagcgcatcaaagacaaccccagaggcaagctgatcctggtctccgccatcacgccgacccccgccggggaaggcaagaccacggtcgccatcggcctttcccaagccctcaaccagatcggcaaaaagagcatcgtcgccatccgcgaaccctctttgggccccgtgtttggcatcaagggcggagctgccggcggaggctggagccaggtgttgccgatggaggacatcaacctccacttcacaggcgacttccatgccgtcaccgccgccaacaacaccctcgcggccctggtggacaaccatgtttactttgacaactcgctaaatatcgatccccgccgcatgacctggaaacgggtgctggacgtgaacgaccgcatgctgcgcaagatcgtcatcggcctcggcggcagcaagcagggcttcccccgcgaagacggtttcgacatcacccccgccagcgagatcatggccatcctctgcctggcaaacaacatggacgagctcaaggagcgcatcggcaacattaccgtgggcttcaccttcgacggagaaccggtctatgtgaggcaactgggctatgaaggcgccatcgccgccctgctcaaggacgccctcaaaccaaacatcgtgcagaccaccgaaaacacagccgccttcgtgcacggcggcccctttgccaacatcgcccagggcgccaacagcatccttgccaccaagagcgcgctgcggctgtcggaatacactgtcaccgaggcgggcttcggtttcgacctgggcgcggaaaagtttttcgatatcgtctgcaaatatggcgggctctgcaccgacgccgtggtcttggtggcaaccgtccgcgcgctcaaggtgcatggaggggtcaagctcaaagacctcgccacccccaatcccgcggcggtggaagctggcctggccaatctgggcaaacatctggaaaatatcgacaagttcggcatgaagtccattgtcgccatcaaccgcttcgcaaccgacaccgatgaggagatcagattgatccgcgactatgccagctcccgcggattcgattcatctgtggtggaataccacgcccggggcggaaaaggcgggctggacctcgcccaacaggtggtggatatggtggacagggaaatctgccactaccacgggctttacgactgggacagcccggtggaagacaagattcacactatcgcccacgaaatctacggagcggagaaggtggattactccgcggacgccaaagcggacttgaagaggatcgccaaattcggcttcgacaagctgcccatctgcatcgccaagacccagaagtcgctttccgacaatcccgacctcatcggacgccccaaggacttcctggtcaccgtccgcaagatagtcatctcgagcggagcgggcttcctggtgcccatcaccggagagatcatgcgcatgcccggcctgcccagacacccctccgccgaaaccatctccgtggaagacgatggcgacatcagcggcctgttctgattaaccctaaagaccttgtgccgggacactaaaaacttaggttccggctttttttgcccttatcgccaaggcgcggatcgacagggtctttgaaggtggaaaggattatagaacgcggataacaggatcaacaggatatttaaggtgaaacagcgaaaagaaggccacgaaacaagcgtcaccaagctacattccgtgtcatcccgggcaagccggggtcctcgacggatcggttacgatccggtggggtgaaatagcttgacccgggatccagtgcccaggggtggcaaagtctgtttgccacagagaccggaggtctcttccaaacaggcaactccgttgcctctgccgaacagacttcggcagcccaatccgcgccttttatccgcgtatatctgcgtgaaccgtttgacccgggatccagtcttttgaggctccaaacagccatcctgtctttgaaaaatgccttccaaaaaataaagattcaacctgccgatatttttcttgacaaatctactaaaacccatccagtatatttccaaatgggaaacccatcatagggaggaaaaaatgaaagccttgcgaaactcatttttgtgtcttatcctgctctgcggagcgatggttttgggagcgcaggcgccccagtggcagtgggcagtccgcgcggggggaactgactatgaagaaagcatatccatagcgaccgacagccagggcaaccagtacatcactggtatgtttgatgaaatcgctacattcggcagccataccctgacgaccagcggtggcggtgatatctttgttgccaagctggatgcctccggtaattggctctgggcggtcagggcaggaggaacagagaatgactggggattgttcatcaccgtggatggagccgacaacgcttatgtgaccgggtatttccagaacacagctaccttcggtaaccataccctgacgacaaatggagagcatgatatctttgccgccaagctggatccctccggcaactggctttgggcggtcaaagcagggggtattgactgggatataggaggtggcatcgacgtggatgaagcgggtaacgtttatgtgacaggatacttttgctacaccgccactttcggcagccataccctgacagcaagcggaggcgctgatatttttgccgccaagcttgacccctcaggcaactggctctgggcggtaaaggcaggagggtcaggcaatgactttggaattagaattgccttggatggaacgggtaacgcttatgtgaccggattatttcaaggcacagtctctttcggcagccataccctgacggcaaacggagaatcggatatattcattgccaagcttgacccgtcaggtaactggttatgggctgtaatggggggagggaataacgatataaatgtatttggcttcgttgtggatggctcgggtaacgcctgggtgaacggttctttttatgacaccgccactttcggcagccataccctgacggcaaacggagagaaggacatcgttgttgccaggcttgaccctgccggcaactggctttgggcggtcaaagcgggaggaatagactatgataatggctatggcatcgctctggatagtgcgggtaacgcttatgcgtgcggttctttttgcgaaaccgccacttttggcagccatcccttgtctgcagtcggatggatagatatctttgttgccaaacttgactcctccggtaactggctctgggcgatcaatgtgggaggaaatgaatatataaataacgctggatctggtatcgctgtggatggcgcgggtaacgcctgtgtgaccggatatttttacgaaaccgctactttcggcatccataccctgactgcaagtggagaatctgatatctttgtcgccaagttgggaagcggaacccccgtggaagatgaactcgctccgcaagcggttgccaggctgcataacgcctatcccaatcccctaaacagagatggaagcgcgctgatcaaagctgacattccggaacgctcctccgctacactgagcatctttaacctgcgcggacagatcgtagcccgccacaagctgggttccggttcgcagcagatatccttcagcggggaagggcttcccgcgggggtctatctctacagcctgcaatgcggggactaccgggaaaccaggaagctggtgcttttgaagtaagataaaatggtggaatggaaccgtccgcgttctgtttccatttctccttccggctttagcatcataaatccgtaaatcggttaaatccgtcaatccgtataagattggcatgccaggcatcatacggatgaaacggattacacggattaacggataatactgtttagcttgcattattacaattgaatacaattatactattttacctttccacggccatttcaaaagactggatcacgggtcaagcggttcacgcagatcagcgcggataattgaagggctgccgaagtctgttcggcagaggcaacggagttgcctgtttggaagagacctccggtctctgtggcaaacagactttgccaccccccctgcgactggatcccgggtcaagcatacgcttgcccgggatgacacagtatatagcttgatggacttgtttcgggggaacctttccaccattccacctttccacctaaaaaacccctttccacggcgatagccaagatcgccatcggtaaaggcttggggggcagagcgaggttttttgttgacaaaaaagggctgcaatttgctattgcatcctgtcctgggtgattagctcagcttggttagagcgctacgttgacatcgtagaggtcactggttcgagtccagtatcacccaccaccctgattgttgggtgattagctcagctggttagagcgctacgttcacatcgtagaggtcactggttcgaatccagtatcacccaccactttcccccgcaaagcaacccggtcagagaaatttcttgacagaaagcttgcggagatatctactgttcatgttaatcacgagcaaacgaaagaagaggcaaaatccaacattatatacggaacacaggcatttacgcggtatgctgctgttgtgaataatatattttttcttacaccgagatttggagcatagctaatgatcaaagaaatgggacgtctgaatctggacgactacaaaataatggacgcccaggtggaaaagattttcaaaagcctggacaagggcaaacgggaacaggccatcaaggaaattgaggaaatggccaacacggcgaactatttcgtgcgcgaagaaatgggcaagaggctggccacctaccagggcaaggggcccttggacgagatttgcgccgaaatgctggatgatttcatctacggtatccgcgccacggcgctgttctatttctattacaagaggcaggacgacccgcgggtgatcgtgaagaccctggaaaagaccgtggagaccgttccctgggaaagcgagaccatctgtttcgagctatggaagaactatcccgaggtcatgaaggaagagatgccccattgggcgatgtctcccaacgaaaacaagcgttccatgtccatgcacggcatggaaaacatcgcggataaaaacccgcaatacatcctcaccttcatcggcaggctgctggacgacgaaagcgaagaagtgcaaaaaaagatcggccacatcctcacccaggtgggacggcaacgcccgctgcagacctatgccaatatccggcgctggctggtgggggccagtgaagaacgggtggacgccatctggcagaccctgcgcaaattgggcagcatcttcagccaaaagaaccagcgcgacaagggattcgactttatgaacgtcaccaagcgggtgatccaggaatggaaaaacgatcccgaccccaacgtggcgcagatgagcaaccgcctgggacaactgctgcgtaaacaatgatccacgtaatcctggtggaacccatctatgagggcaatgtgggcgccgtcgcccgcatcatgaacaactttggtttcaccagcctgcgcatcgtgggcagcgtgcccaaaaagaacgacttttacctggccatgcactccgaacatatcctggaggaggcgcaggtctttgacagcctcaaagatgccagcgccgacctggacaggctgatcgccttttcccgccgcgtgggacgctataaaccggtggatctgaacccgccccagatggcggactactgcgccaaaatccccaaactggagattggtctggtgtttggccgcgaaacattcggcctcaccgacgaagaggccgacctctgccccctgcgttgccacatccccgccaatcctgcctttccctccatcaacctcgcccaggcggtcaccatcgccctgtggcagatctacagcctccccctgcagggagcaaaaccgcggcagttaagggcggtggatggaaatgaacttgacagaatccgcaactatatgcttgatgtaatgcgcgactgcggttttttccgcagccacgagaccacgaactgggagcttttcctggacaagatgctggcacagctcaaccccggcaagatgatggtctggcgcctgcggcagatgtttaaccgctggcacgtgctggtaaccggcaagggaaagggctacggccaggatcaatagattgcgcggggcgattcagatgccccgcaagttatgcctacaaggaaacaagagatgatagcactcaccgccgtcacggaaatgaatgaacgccagttggaaatcttttgccactgcgaaaagtttttcttcgaccacgaaaaaccagcgttggtcaacaaatatgcccattatttcaccgaaggctatgacgcctttggcattagcgaagaagagatgaaacagctgcgcgacgaagtcctgtcaaaatgggagcccagcgtgcaggaactggcggaactgggcaggcacttctttgccacgggaaaatatgagttcggctcgctcgccatcatgctgctcaagaaacaccgtccccgcttcgaccgcgaggtatatgagagcgtcaaacgcttcaccgaggagtcccttgccaactgggcccacgcagacctgatctcgaccaagatcacccccgtgtttttggagctggagatagccaacatggaggatttcgcggagtggcggagttcgcccagcaaatggagccgccgggtgtccgcggtgaccatgctttggcagcgggggaaattgcctccggccgagctgctggactttatgcgccccctgatgtccgatccggaacgcgtggtgcatcagggcgtgggctggtttctgagagaactttggaggctgtttcccactgaggtggaagaattcctccttgaacacaaggacagcgcgccgcgcctgatcatccagtatgccacggaaaagatgagcaaggacaagaagaagcgcttccgcaagaccacggcgcgcgaacgctcccaggaccgccagggcaaaaagaacttcgcggacaagcggaacttaaaaaaccgcggcaaatcccaaaacaggcaggggttcaaatcccgtcgccgttccgcggacgatgccggcatgcccttcaggatcaggcacacggaggaatccgatgaataagctttgcaccatcttgctgctgtccctgcccctgctgctgtggggtggaaacctttccctgagcgtcgatctcggcctgcccgcctcctccagggatatggaactgcagggttggggcagcctcagcgccccgggatacccacaacttccatataagactataaatgtgatcctgccacccgcggcggaggaactgagcttcagctacaactggagcggagcgcagacctctggcctgcccgccccggaacgcaacggagcctttttgggtggagaacgcctgctggacagccccgcccgcgaagcccgggccggacaggtgcactatctgggcaagggacgctggggcgacgtgagctacgcccgcttccgcgtgctgcccgcggtctggaatggaaactcctggcagggttacagcaggttggaactcgatctgaactggagcgaatccgagcccgcgcccaaccgcatcccgcctgtcctggcagaactgagcaaatccaacgcgaacctgcgggcgaacttctttgccaatccccgtgatctggacaaatggtatcagcccccggcaggcaaaaactacgactacctgatcgtcaccactcccgcgctctatgacgtgttgtccccgttggtcagctttcgccagagccagggcctggtcacctccttcgcggatatctccgtgatcctggcctccaccccgggcgccaacgcggcggacaagctgcgcaactacctttgcaatcaatataacagccatcctttcacttatctgctgctggtgggcgatcacgacaccgtgccggtgatgtatctgacgccggagccggatggcggcgatacagtggcttccgacttctattatggtgacctcagcagtatcgtggacacggacggagacaaccgcctgggcgagtattcaccggttgaaggagtggatgactacctttgcgactataccccggaactgtttgtgggacgcatttcctccaataatcccgtccacgtgtatgacgttgccaaccgcaccgtgctctacgagcagagcgacgccccctggaagcgcagcgccctactgcccgctgcctacctgaactacggcggcgaaccggaaactatctatctgcagacggatggcgcggactttatggaatacgccaaagccaccgccctggcaggattccagaataccaccctgtacgagcaaaccggctggctgccctcccatccctgcgatcatcccctggactaccaaggactgcgaaacctgctcaacacccaaagctacgggctggtgaactggagcgcgcacggctcttccggttactctgtccgcaaggtgtggatgaacgatgacaactccaacggcttgccggacagttgggaaatggagtggatgagcatggtggacaggcagagctttgacaacctgaacaacagcgacggcacggtcatcttcatggcctcctgctacaacggcatgatcgacagcagtcagcagtgcatcgcggaatacgcgctgcaaaggaaggctgtggcggcgatggcggccacccgcacaggctggtacaagatcggctggcgcaatcccggctggggagggctaagctcctataacctgcactatctggaaaactttgcccgcaacgggctgtcctcgggagcttcactggcctgggccaacctcctccacacccaatattacctctttggcgatccggtggacggcgggggaatcatatatcccgaactgcaaaacgtttacacctacctccactacggcgatccagccatcggccacagcggcagccagatccagcccctgggcgaaatcctggtctatgaaccctcccgtcatggcggcttgagagtggtggatgcgctgaaccagatcggcgggctgaacgtggtctataccgataagctgatcccggattatgactatatcaaccgctttgaagccgtgttttgcctctttggctggggcgacgccgcctatgtcccgcatcccgattccctggactactcgctgctgcacggctatctgaacggcggcggcaagctctatctggaaggggatgtggcctggaatagccaggatcctttctggagcaagttcggcgccaacgccccgctgaatatgttcaccaatattgaagctgtaaaatgctatcaggatggcgaagcctggatctgggactacaacccccagtccaaccccaacgcgcaggtcttgctgcccgccctgcccgccgccgagaccatcttcagcacccacggcgccgcctccgcggatgccagcatcggaatcctgcacgcggttccggagcatagcaccatcgcctcctcctttgctttggcaggcctgcaaaacggcgagtgggaactgaaagacatgctgggcctcatcctggatcgctttggcgttttggaatacgtcaatacccaagtggacgagccacagataccgatggtgcaaacctccctgcgcggctatcccaaccccttccgcagccagaccagtctgcgcctggaactgcccgccaaagccagggtggacttgaacatctataacctgcggggacagaaggtgcgctccctggcaaggctcgacctggacgccggcaagcacgaactcaactgggacgggcgcgacaactccggaaaccggcttgctcccgggatctatttctggcgcttgaaagcgggtgacaccctacgtcaggggaaactgctcaaactggccgactgacctcccccacgactccccaatactatatatggataggtgcgatatgtcttgttgcaaaagaatcttcctgctcttcgccttgatctttgccgtcctgagcctcagcgccgccggacttcccgccgccttcaccaaaggcggcaatccatccctttacaaggaactgcacagccttgccaaagagaacctgaaacgcctgcgaaacgggcagggaaaagcctaccgccgcttgctgaaccggtacccggatgtggtgatggcctatctgctggcctatgaatcggacgctaacctgcaatgcgccgctcccgcggatgtggcaagcaactaccgggagatagtcaaactgcttgcggagcaaggctgcaaacacagcccggaattctttctttcctatgtggcggatcagactgtatccgatgaacgcatcgaggcctaccgcgccgcgctgctggatgacggcctgcgccagatcatgcgcgactccgtcgatgagctcgagctctaccgcaagatctcccaatggtgtgtgagcaaactcaagtttcaacagacctccgggcgcgaccagtcgcccctggacatcacccgcaggagcatcgtgggacgctgcgaggaaatgcaaatcctcttcgtggcagccgcccgcaccgttggcctgccatcccgcccggccagcaccccctggtgggcgcatatggacaacaaccacgcctgggcggaagtgtggctggacaacgcctggcactacacgggagacatggatgccgcctactatcccgatcagacctggtttagcggcatgatcgacaagacggtgctgatccttgccgacggttcccttccttcagaacaggacgaggtgctgagccgcggccgctacgactgtgtgatcaactcggtgcgcaactatgccggggaacgcgcccgcaccatcaggatcagaaccctggacgcgcagggcaatcccctgggcaaggtgccggtgcgcgtgatggtttacaactggtattccctgcgcgtgctggcggagtttatcaccgcggaggacggttctttcacgctcagcaccggtcgcggaggcttctatctctgcgccagcctggatggccgtcaggcgctggttcccgtcccttccaccgagcaaaacgagcttgatgtcgatctggttctgaacgaaggccccctgccacctcaagatatctttttggagtatccctccaaccccttcacctggaaacaggctccccctgagtgggatctgggcgtgaaggaagccaaggctctgtgggacgggcaggatagctcgtttaccgagcggggagcagcctgcgcggacaccctgcaaggcaaggtactgagcgcctgccggggcaatcatgccgcctgggaaggctttctgaagatgcagccccagcccggcccggactttttgaactatctgctggagagcgaccccaagttcctctggcaggcgaacgcggcgcagttcgcggcgctctatcagaactttcagcgcttcgatgccggacagttgaatccggaagaacagtcttcgctgctctcgccctcagttttttatgaagagctgccccgcccctttggcaagccagacagccccagcctctatcccacttcctttgccaaagcgggaaacaacgatctggagcggctgcacaacgccatgcgctggctgaagaaaaagcaccggatcgaccccgccaaagccctgcgcggcctcctgcccctggaagaggcatcccgcagcaagtatctgagcaactaccaatactgcatcctggctgtcagcctggcacgcgccaacggcatccccgcccagttcacccgcatccccgacctgatctatgtgctggtgaacgaccagtggcgctattgcaatgtccggctctgcgaatttgaggatggcgggaagaaggattctgcctccagcttcaccctgcgggtgcgcactctggatgaacagggcgcccctctggacatcgatccccaaaacctttccctggcacgctggcagaacgggctgctctacccgctcaaccacaaattcaccgccacaggaggcggaacggccacggcaaacctgccccggggagaatactatctgcaggcgggctaccgcgtctccgacgccaggacagcttaccagttgcagcatctcactgtggaaagtgagcttagccttgacctggtgctgcgcgagtttccccgcaaatgggaagaactgccggaagactccgaattgcgccccctactggctgaagcgggagattgcgactgcctgctgatcggcaactttgaccgcgaaaacagcctgcgcctggcggagaagctgaacgcggagggagtggtattcctctggctgggctatgaggaagctgccgccgcacccgccaattaccgggtcagccccgcctggcagactctggtggcggcagatcagatcaattcagtgcgcagcctgaccctgctacgcaaggacggcgtttggcaataccatcagggcatctgggaaaagctgccccgttaaacgttctttacagcttgccgcggctgaagcggtaaaactggttgcgcagcgccttcacgtgcattcccgtgatagatttgcgcattttgtccggaggatggatcaccgagattccgtccgggttgatgccgccgatctccaccaggaaagcgcccgtgtagtggatgtggaaaaagtagttgcgcgcgttgccttcccttgaactggggccggtggcaacctcatagcgtccgccgccaaaggccttgcgcgtctttttggcataggcctgggcaaagcgcagcagcgagtcgtaacgctctttctggctggcgacggagctgtcgatggcgggcaaaaatatcttttcggaataggctccggtggcagaactatggaagaagatcgccagttcaaaattgttttcctgggccagtaagacgctcgccttcacctctgcttcggacatcggagtgctgcctttgaaattctcgtgcgagcccggcacaaccgcgccctgttcccaaaacaccggatagttgcggttgaggtccaccccgtccgtccgccagtccaaacctttcctgccgtctgtttcctgattgtttttccgtttgaactgatattgcccgctggtcaccacccggtagccttccggattgagggtggggatgatggtgaactcgaactccgccaggatttttttgatcttgccggagtgcttgtaattcaccgccagttctcgtgcccatgccagggcggtttccacacccaaaacctcgcttccgtggtgctgcccgatgatcaggactttgcgccgggcgtccggtgtgccgatgcagagggcgtggatgggcagcttttccgtgccgctgaagccgatcacccgcagggtcaccagatcgggatgcttgctggaaagcgcctgcatctctttttgcaaactttcccaagtctgatatcccttgggaaggggataaacgttgccaaccgctgcggcaaaagcgctcgcgctcaacgccagcaggggcagaatgagtaaaatactgtatttattcatcatgagaccaagctgccgcagccccgcatttcgtcaacaaaatccgatcttatgaaaagtagtggaaaggtggaaaggtgaaatggtggaaaggaactcgtggtgaagtggtgtcgtggtgacgtgtagatggtggatgcagcccagaacaagcccccaagccccaaaaccgtgtcatcccgggcaagccggggtcctcgacggatcggcaacgatccggtggggtgggatagcttgacccgggatccagtcttttagaaacaaccacccagccccgaaacaacctccccacagactatatccgtgtcatcccgggcagacggggtcctcgccaaagcgcgtagcggtttggcggggtgatttgacccgggatccagtcttttgaagcccaaaaacaaccaccagaatcccaaagcaaccgccccttttataaccccaatccgcgctcatctgcgcctctatcccgtatatctgcatgaaccacttgaaccttgatcctgtcttttcaagtcccaaacaagcacccagaccaaaaacaaccggcatcatttatttgacaaccgcaaaaaatatccaatacattccgcaatatccttcacacctccctcctttgctgctactggctttggtgccatcatccttaggtcatccctcaccaggttaaggatgactgccggaagacccacgccggagagggggatgcaaatgaggccgccctctataatatataggtgctatgcccgaaaggtcatggaaggatgaaagcaaacgcgaaccgccaaacccaaatttccaattgacaaatatctgccgcccagatattggttcagtaaggtaaggaataaactatatgtgtataaacagcaagaagataagtgataaatataataccctgaatagaacaaaagcatttgcaaatcagcagatgctttttttttaccccggaggatagcatggatctggacaagatcataaaacttgccctggccgaagacatcggcagcggcgacatcagcacccagtatctggaactggaacccctcaacagcaacgcctacatgatcgccaaggcggaaggtgtgctggctggggtggaagtggcgaaagccgtgttcctgcaggtggacggcggcctcaagatcaccctctaccgcaaggacggagaccgcgtggttcccggcaacgagatcatgcgcctggaaggcaaagccgccagcatcctgcagggcgaacgcaccgcgctcaactttttgcagcgcctgagcggcatcgcaaccctcaccgactcctacgtccagcgcctcaaaggcaccaaagccaggctgttggatacccgcaagaccactcccctgctgcgcggactggaaaagtacgccgtgcgcgtgggcggcggtttcaaccaccgctttggcctctacgacatggtcatgctcaaggaaaaccacatccgcgcctgccgcggcatcaccgaggccgttaaacgcatcaaacgccacaacaccagctacaagatcgaggtggaagtcacctgccttgaagaactggaagaagccgtgaaagccggtgttgaccgcgtcatgctggacaatatggacctcgcccagatcaaagactgcgtgaaaaagttcggctcccaagtggaactggaaatctccggaggcgtcaccgcgtccaacatccgctccctcgcccgcaccggagtgcagtatatctccagcggagccctcacccactcatataaatctttggatataagcctgctttttgataaggagtaaaatatggaagaacaactgcgcaccctggttcaaatgcaaaaactggatgaccgcatcggcgctctgcgggtcctgcaaaaggaactgccccagcagcttaacgaaatcatcgggcatgtggaccaggcaaccgcgaatttgcttgcctgcgaaacagaacgcgccgaactggccaaaaaacaacgctcgctggaaagcgacatcaaacagcatcaggaacagatcaaaaaatacagcaaccaactctccgaaatcaagaccaacaaagaatataaggccctcaacagcgagatcgcctttctcaaggaaaagatttcagagcaggaaagccaccaactggaactgatggatgccgaaaaccaggccgcggcgcgggtgaacgaagccaaacaggaactggacaaagcggaaaaagctaaaagcgaacaggaaggcgaactgcgccgccaaatcgactcgctggaaggacagatcgaggatctgcgcgcccaacgcaacaccatggcacgcaccctgcccttgcagatcgtgaagctctatggcaacatgatcaaaaacaaaggcaacctggcggtggtcttctgccgcaagggcacctgcggaggctgcggtttcgtgatccgcccccaagtccgcatcgagctgcagttgcgcaaaaagataaactattgcgaaagctgcggccgcatcctggtggaaccgtttgaagacagctcatcccccaatgcggcggattagccccgtccttttctgctaaaggcttttgagccactatgcttggctactttggtgtccgaaataatggacggcaagcccgtttgccgcggcaaaagtttatgagcaaagttgggcatggaaaggccaaaaaagcactttaacaagttaacccaaacattatacttgacagatttatagaatgtaggcattagaatttaagagccaaaatatgctggcataccatagcagtgaaagactatatattaagtgattatataacgactgatggcataaatgtctctatcggcctggaggaagagtccgccggtaaagactcccgaaaatcggtcaataattagaaacaacccaaatagaaaacgggaataaggagatatcctatgagaaaaacccttcttttcgcgctgttgctgatcctgggcttcggcctgatcagtaatgtctatgcccaggttaacgttaccataggcagcgggaccagcaccaataccacaaccggtgctccagccccctatggaacctactggaagaatttccgccagcagttcctgctactggcctcggaaatcgaggatgccggcggcggagcgggcaacatcaattcagtcgccttcaatgtggccaacctgaacaactgttccccgatgccgaactacaacatccggctcaaacacaccacccagaccaccctgaccaccgcgtttgaggatggggactaccagaccgtgtacacgcaggctgagtatatgcctaccgttggctggaacacccacaccttcacgacccccttcgtctgggacggcacttcgaacatacttgtcgatatctacacctccatcattccgggatcctggacccagaatgcctctgtttattactccaccacagctttcaatagttccctgcgcttccaaagcgacagcgctgatgccagcaccgccaccagcggaaccacaagcaccaaccgctccaacatcagattcaacatggaagccctggtggttaccgatccgcccaacccggcgctgctcatttcacccgcggacggcgctgtggacgtgatgagctctgctaccctcaactgggcttccggcggcggagcacccactggttacaaggtgcattttggcacaaccaacccaccccccttcatcgaaaacaccattgaaaacagctacgcccccaccctggacctccacaccacctactactggcagataattcccttcaacgccattggtgacgcggcaaactgccctgtttggagctttaccacgggtggcccggtggtcatcatgaccaacggcacacagtcggtgccggatggaatggtctattccttctacgattcaggcggccccgacggcaattatcaaaactcagagaactacaccttcaccttctcagccgccaaccccaactcgatcatttacgtgttgttcacagaattcaatacggaaaacagctgggattacctgaagatctacaacggaccggatacctccgccccgcagatcggacctgctgacggctacaccggtaccactctgcctgaagagatctttggctccaacgctgtgaccttcgtcttcacttccgacacctctgtccagcgccccggctggtcggccttagtgactgctggaaatctcgaccacgaccttggcgcgaagagcatttccggtaacagcactccctccgtgggcgatcccactacctacacggtggcagtcaagaataacggaaacaacaccgaaaacacctacaccgtgaagctgatgggcaccggaaacgtggagctcgcctccattcccggcaccaccatcgctcctcagcagaccatcgaattcggcctcacctggactcccaccgaaaccggcccgatacagatttggggtgaagtggtgcttgccaatgacggcatcgctgccaacaatcaaaccttgcctctaaacgtggccgtgcaggcagcgggaatcgtggccattaccctcggtgacggcagcgctgtcggccgcatgcccatggacatgtactggaagaactccctgttcgaggccatttacctgggctccgagctcaacattggtggcctgataaccggcatccagttctacaacgacttcgtcagcaacctgcccaacatgcccactaatatttggttaggcgagaccacccagaccgatctgtcggctggctggatcccttcaacccagctcaccgcggtgttcgccggtaacgtcgattatcccagcggtccgaacaacatcaacattgccttcaccaccccttacacctacgcgggcggtaacctggtattgctggtggaacgcccgatggataccgaatggcacaattacaacgataacttcctcacccagactggggaccttgcggcccgttctctgaaggtccagtcggactcccaggactacgatcctgccgctcctcctaccggtacaagtccctccgctatgttccccaagaccactttcttcctggtcgtggacgacatgggcgcgcttaccggtaccgtgcgtgacgcgaacaacgttgccatgcccggcgctacggtttccatcactggaacccccctcaccaccctcaccgacgccaacggcgtttacaacttcccctacgtggcgatgggaccccagagcgtcgtggccaccaaacacggctacaacgtcgttacccacaacgtaaccatcatcgaagatgaaactgtcacccaggacttcgtgctcacccaactgcctcaggtcaccgtgaccggccgcatcgtgggcagcgaccaacccacagttggcctggctgacgccaccatcagcctcacaggttacgagccttaccaggctacaaccaacgccagcggccaattcaccatcactggcgtctatgccagccagacttacgaatacaccgctcaagccatcggttaccaagctgccatcggccaagccgtggttggcaccaccgacctgaacatgggcgacatcaccgtgaacgaactggccttccctccctgccaagtggttgccacagaagcagcggactattcgcacgtaaccgtcacctggatggctccggatcccaatgctcagggtatctccgaagactttgaggaatacgaagacttctccctcaccttcgatccctgggttctggtggacgttgatcaaagcggcacttatggtatgaccggctacacttggccgaacgtctattcccccatggcttacatgatcttcaaccccagcgctgccactccgccggttaccactattaccgcccacagcggaaacaaaatggctgcctgcttcgccagcactgatgctgtcaacgacgattggctgatctctccgccgatgatcgcgaccgcaagtcagttcctgaacttctacgcgaggtcctacagcgatgcttacggcctggaacgcttcaaagtgggtatttccaccggcggcactgcccccgcggacttcaccatcatcagcggccccagctacatccaggcgcccattgaatggacactgtacagctatgacctcagcgcttacgctggccagaacatccgcttcgccatccagtgcgtttccgacgacgccttctacttcgtggtggacgatgtgagcgtgggccccgttcctacagccaaggaacactttgcctccgcttcctccttcagctcccgtaataccaacacccagagcttctccaccagttcaattgttaccagaagcattggaaacgcggcttcggcatcccgcaacgtgggaaccagccatgccaataacccccgtattcaggtaccagacttccagatgttcactccttccaattcggaccgcgtacttggtggatacaaggtctatcgcctgcttgctgacaaccaggacaacgagtcactctggacgaccctgaccccatctgtcattcccagcactaccaccacctataccgacaacgcctgggccccgctgccttccggcgtttacaaatatgcagtcaaagctgtttacaccaacaacgtcctgtcccccgccgtcttctccggtgagatacacaaaggcatgatgggcaccctgaccggtaccgtgaccgaattcggcaccaacgtcccgatcgaaggagctaccatcaccgccggcgattacagcggcacctccgacaacaacggacattattccttcagcgtctatcagggagtttacaccgtcacctgctcgaaagtcggctatcaggccgcttcccagaccggtgtgagcgttaccggactgcaaaccaccacccaggacttcgtactcacagagatcaccctgcctccttgcgcggtggaagccgtggcagtgagcaacagcttggtcaacttgacctggatggagcctggcactggcggcggcgaatggatctactacgacaccggcgaaaacgatgacagcatcggcctcgtctccggtggtgaattcagtgtcgccattcgtttcccgccctccgctcttaccgactatgccggcatgagcctccacgccatatccctcttcccaggcgatgtgggcacctactccctgcgtgtctggaccggtggcaccgccagcgctcccgaaacccaggttgttgaccaacccttcaccgtgcaagccgtagacacgttccaaaccgtggttttggataaccccgtgcttatttcaggcaacgaggaactctggtttggctacaacgtcagccatgctgcgggcgcctatcccgcaggctgtgacggcggccccgccaccaacggcttcggcaacatgatctacaactccggtgaatgggcaactctgaccgacctggctccgagcctcaactacaactggaacatccgcggctacgtgggatattcagctcccaacgatgtgtgcgcgatcgatcccagcatcctcaaacacatcccgtccgacaacatcaaagccagcaaagacatcagtgcctgcaaagacaacgaccgtgtcctcgtcggctacagagtctggcgcttgctgcaaggccaggaaaacaacgattcagcctggactcagctcaccaccggacccatcaccgcgactgcctggccggacaacggatggggcggcgtgcctgacggctggtacaaatgggctgtgaaagccatctacaccggcgaagcgcaatccctgccagccttctccaatgctgtgcagaaacttacccagatcggaaccattgccggtatcgtccgcgatatggccaacgcccccatcatgggagcaaccgtatcttgcggcgacgtgactgccaccaccaacgccagcggagcctacagcatgcaggttcccgcgggcacctggagcgtaaccgccagccacccgaactacacacctgtcacccaggacggagtgattgtcgttaccaaccagaccaccacggtgaacttccagctgccgatcagcaatgtgctgctctcggacggatttgagtcctacgaaaacttcgttatcgaattcgcgccctggaccacggttgacgttgacggcagcgcgacctatggcatgaccaataccacctggcctaacacccaaacaccacaggcctacatcatcttcaatcccagtgccaccactcctcccgccactaccatcgtacctcacggaggagataaaatggcagcctgtatcgccgcaactacccctcccaacaacgactggttgattactcccgtactccacaatccgctggaacttcgcttctgggcacgctccctgacggcgcagtacggaggactggaaaagttcaagatcggtgtctccaccactggaaccaacccctccgacttcaccatcatcagcggcagcactcccctcgaagctccccttgattggacagagtatgtgtataatctcagcaactacgatggtgacacctacgtgggcatccagtgcgtgtcccatgaccactggatcttcatgctggatgacttccatatcaccggcagaactgacagcgacgatcctatcgtccctgtggtcgccaccgagttgcacggaaactacccgaaccccttcaacccggaaaccaccatcagcttcagcgttaaggataaaggccacgtaaaggtcaatatctacaacgtgaaaggccaactggtgaagaccctcgtgaacgacaacatgaacgccggcaagcacaccattgtgtggaacggccgtgacaatgctggtaaagctgtctccagtggcgtctacttctacaagatgagcgctggcaaatacagcagcaccaaaaagatgatcatgatgaagtaattcatcgggatataacctataaccaagccccgggaccgaaaggttccggggctttttctactctcctgaaaagaacgtggatgacaggatcgactggatctttgaaggtggaaaggtgaaaaggtggaatggtggaaaggttcccccgaaacaagtccaccaggctatatactgtgtcatcacgagtggggtggcaaagtccgtttgccacagagaccggaggtctctcccaaaaaggcaactccgttgcctctgccgaacagacttcggcagcccttaagttatctgcgtatatctgcgtgaaccgcgtgaaccacttgaaccttgattctgtcttttcaagtcccaaacaagcacccagaccaaaaacaaccggcatcaattatttgacaatcgcattaaatatccaacacattccgcaatatgcttcatagcgccgtcccttgctgctactggctttggagtcatcatccttaggtcatccctcaccgggttaaggatgactgccggatgacccacgccggagaggggaatgcaaatgaggcccatccctctataatatataggtgctacgataggtggaaaggaggacttcgtggtgacgtggtgtcgtggtaacgtggtgctgtcggaaaagagatagaacgcggatgacaggatcgactggatctttgagagtggaaaggtgaaaaggtggaatggaggaaagtttcccccgaaacaagtccaccatgctatatactgtgtcatcatgagtggggtggcaaagtccgtttgccacagagaccggaggtctctcccaaaaaggcaactccgttgcctctgccgaacagacttcggcagccctggtccgaaacctccccccataatactaatccgcgctcatctgcgcctttatccgcgtatatctgcgtgaaccgcttgacccgggatccagtcaccccagaggagccacccccgtttcccgcctgttcagcgtgcagacagcagtcgtgtcaggaaagcttgtccagttcttcgcggacgtttttgcagcggggatagtctttgccaaaggtgttttcccagatgctcagcaccctggtcagtagttcccgggcggtgtttgtgtcgccttgtctggcgcgcagcctgcccagagagaagaggtaatgggctgtctgggaatggttttcgccatagtggagggtatggccgtctatcgcctgcttgagcagtggttccgcttcttccaggcgtccctggcgcagcagcacactgcccagatttccggcgcagaccgccgtaaaccagtgcccctgtgggaaaaggctttccatcatttccagcgcggcgcggagcatctcctccgctttgtccggcctgtccatcagactgtagagcgaggcgaggttgttcatgcggtctgccacgttggaactgggcccggggcgtttttcgatattcagcgagcggcgcagcagtttttcagcctgctcgtagcggctggtatctttgtaaaagcgtcccaggttgttcagatagggggagaggcgggggctgcgtggcccgagctggcgggttctggcctccaccaccttcagatagagcggctcggcatcgtccatgcggtgcatatagtgatagagcagggccagatggaagagccgttcgatgtgttccgggctgtccccgccccaggcctggcaggacaactcggctgccagcagcatacattcctcaatcttggccagcagcatgcggtcccagaagtaatcggccgccatctcatagtaatgggcggcttttttgagttccccggcggctttgaagtggcgggcgatctccgcggaatgctccttgagtgcctgttcaaagacggtttccatggcttcggcggccgccaggtgcagttttttaagctccttttcgcggatgctggcatagaccgccttctgtaacaggctgtgggaaaagatgtaaaagagttcatcggcatcctgccagattttccgtccccccgctttgcccagttgctggatggggttgccttcgagcatgtgggagaggaggacaacattgaagcggaagcccagcacactggcgccgcggacgctttcctgaacctttttggagagccgggcaatgcgccgggaaatcacctcgtcgatgcctcccgccgccgcttccaagccctcttgcgctatttcgccgtggggactgagcagcttgttttccagcagataagcggcaagctgttcggcattgaaaggattgccgcccgcgcaggcgtggaaagcggaaaaggcctcgcggggcaggcggggaaggcccagcagattgaggtagagcttgcggctggcgctggagttgagggagcccagggcgaggctctccaagccatcttttttgacggcaagctccgcgggcagcctgcccttttccgtccgggcggtagccagcagaaagagcgggcgcacgccgtgttgccacagcagttccaggaattgacggctcaggggatcgagccattggacatcgtcaataaagataagcacaggggatttggcgcacagccagcgcaggtaatccagccaggcctgctgctgacggggcagcctggcttcgggggcgatcccgcgccagggcgagccatcccaggagagattcagcagcgaggcgagggcggcttcgcaatcctgtcccagcgaggaaccgcgggtgcgcttttgccacgcttcgcggaaatgctgcaccgcctgcgcgggagcctcatcctccaaaagccccaaactggcacgcagcaactgggatacgatatccagagggaggggggaatcctgcctgcaagccagcagatacacctgccgccggggagtctcgaaggcgcgcaaagcttcgcgtgccaacctgcttttgcccactcccgccgttccatgcaccaccatcgcctggggcgaggaggccgccaaaccatcgcgtatcctgctatgcagcagagcggtctccttctccctgccaatcatgcaaagcggttgtccggtgatcagttgccccggcagcatgcccagacggtaggcgcggggcgcggcttttgaggcggctttttcccttttgaggggggtgaagatgaaggagttgtgctgctggttgcgcagcttgtggtcggcgagggcttcgccggggcgggcaagctccaggagcttctgggcgcgggtgatggcttcgcccgggaagaaggttgccttccacaggtctttgccggcagccatggaaaagatgtagccggtgcagcaggcggcgcgggctttgtggcgcgtggcagcttccaaagccaggcggcaggcgcgctgcattttgttgaccttgttgtgggggaaatcgaagagcaggatggcatgcagccgcttgtgccgcacatagatggctgccaaaaaggcgtcgtagatcaccgccagcagttccagcgcctggatggttggctccagggggccgtccggaggctcgtccaggctgaggcagcagcaaacgctgtgccggacgtcagccgcgggattgagtctgtgaaagcgggaatgaatgaagtggtggccgtgttgcttgcccaagcgcttcctttccggaatatcaggcaactggggaaagggcggatgctcggcaagtttgccaggcctggcatccaactcccagcccagtctgttcaatgcctggggagagtaataaggttggttgggctggccggggttttcacgcaggacatccagttggggagaccagaacacatattcaaactggagggggttctcaaagatgcgccaggacagggtgccaaaacccacggccaggcggattacattcggcattccatgatgggggctggcgtagctgttgatcgcaccgatagtgtgattgatgcgtgccagcagcgccgcgatcagcaccggagtgctttccggcaacagggcgtggatgcagtttccctcatactggaagagcagtccgcctgcgttcctgatcaggctcagcatcctttcataggcttcggtgaaagttgcttccatcctgtcaatcacctgctgccgctgcttgagccttactcctttgatattgtaagtggcaacggtgcaaaagcgcaggatatagccggtgatctgcccctgcaggatgttttgctcatactgctgcaggatgtagctgggcaccacgcggttcatatctggctacctgccttgcctggcttaactataatctcctttctgcctacttatcccccaggctcagattggcgaaggcggtgagggtgatctccgcgtccgcgctttccagatagctgacgcgtgcccggtcgcccgcgcgggtgatgggcagacggctgctcaggttgctggaggcgataaagattatatccggcgcttcggtcagggtaaggtagtagtaggtgcgtccatccgtggtgtccgagccaaagcgggcgatggagcctgtgagggtggcctgcttgtccgctgcctccggggatatccccatccggcttccggccagggccatctgatagttgtcgcgcgcgctgcgcacgctttcacccactcccaccagggaaaagtcgcgcactgaaacgaagctgaacatcttgattagcccggcgctgtccttgagggtcataaaataggtcggcttgccgttcatgttcaccaggatggggaaggtggcatagtatttgaagttttgcaccttgccttcggcggagcgcatggcggcagtctcggtggcaccggagaccaggtagaggtggctgcttttggtgcgggtgtccgtgagcgcaaagcccaccgttccctcgtccgaacccacgctggtgaggccggagtagaaatagctgcgctgatcgcggccatagatcacgttgtaaccgggcgtcacccgcagcaggtcgcgtttgccgaacacgctgttccaaaagccgtgcacatatttgccccaccaggaaagctggggaagcacaaagtaggagggctggatgcggtcaacccaggcgggaatcttgctgtcgtcatagatgccgccgctttttttgaggggaaagtatttgatctcacccgtgccggcatgcacgatggcgagtccggtggcttccggggcactcactccgatcttgtgggtgtaggtggtgatggtccagtagggttcgccattgtcgtccagttcaaaggtatcgcctgccaggccgatgcccgcgaagccgttccaccagagatggcggtagaggtcttgtccaaagtaggcgttgcgctgatagcggatttggatgggtttgcctttcagctcgcgcacaaaggtgatatcctgcggattggtggccgagaccttgatgtagcccggggtgcctttgcttgtgttggtgatccacttccagaagccgctgtgcagcaggggacagacccagaaaagcttgccatccaccatctggatggtcgggttgccgagcaccacccggctgccgagggcgaagtcctcgcccagtttcttggctgccaaatccttggcgaaagcggaatccaggatcggcacctgatccagattgaccggcgccaccaggtcggaaaactcggtcttttccacctcgccgatcatgcggcggtagctgccggaattgaagatgccggaagagaagaagggcgccaagatcagccacagcgccagaaggggatagaccacatagaggatcttgcgcaggcgccggattgccagcagcggagccaggcagatcatcagggggacgatccagtccaaaaagcggatatgcagcaccggaagcacaaagtaaagcataaaacccagcagcaggacggacagcactatggcaggcagggctttgatcctgaacttgggaaacttgatcacgacaggtttgggcgtttgttgttgaaacatggtaacctccctgaactaagctttgtttttatactctaccagatggcggcggatttgtcaagccggaatcgctgcccgcctccaatacagaatggaaaaaagtggactcggctcgaagaccgctcctatccttgcggatacagaggcgcgaccgcccgctcaaacactccctgaaccttggaaatggccagcccgtaattggtgatcggcactccgcgccgctgggcttccacgatgcggcggctcatctccatctggttgagcatgcaggctccgcagtggatcaccagcgcgaattcctccagattgggcggaaagtcgtgtcccgcgtaaacttcatactccagttccttgcccgtgaactggctcagccagcgcggaatcttcacccgcccgatgtcatccgcctgcacgtggtgggaacaggcttcggcgatcaggatcttgtcgccgtcgcgcagcttgtcgatctgcctcaccccttccgccaggacgtccagatcgcctttgtagcgggcaaagaggatggaaaaggtggtcatcttcacctcggggggcaggtcattcaccaccttcagcaccacctgcgaatccgtgatcaccagatcaggcggctccttcagggtttgcaaggcataggccagttcccgctctttcaccaccgtcaccaccgcgtcgtgatccagcagttcgcgaatcacctgcacctgcggcaggatcaggcgtcccttgggcgcggcgaggtcgatgggagtcaccagcagcaccctgtccccggccttcaccaagtcacccgccagggggcgctcctccagcagatgggcgggcgccagcttgatcagcagttccttggcggcatcgatgttttcccccttgagggcggagacggagacccagggcagtccccgttcctcgcaccaggcgatattggcgggggcaggctcgcgcaaatccctgtggttaaagaccattaacagcggtatcttcatctcgcggatgcgtttcagggaggacagctcgctctccgcgaaggggcggccatcgttcacaaacacggctatgtccgtgcggtaaagtatcttataggtggcgagtacccgtttttcgcccagttcgccgctgtcgtccagtccagcggtgtcaaagaaggtcaccgggcccaggggcagaagttcatagcgtttgtccaccgggtctgtggtggtgcccggggtgctggaaacgatggctatctcctgtcctgccagggcgttgatcaaggacgattttccagcgttgcggttacccagcagggtgatgtttacgcgttctccgcggggtgtgctcatctatcttctcccaaaaagtcttgcggcttgcggccgctaatagcttttattatcagttctttcatgtttctttccttgtcggactggataccagcccatgtaaaaataatatatgtgaaaagcgcgaatctgtcaagcaaagagaattctggcagacaggggcctgtgtttttgatatatccacaaattacacaaattaacacggattaaaagaacagaataaggacaagtgtccagcctaaaaacaacaaccagaccctgaaacaaaccgccaccaagccctaaagccgtgtcatcccgggctgtcggggtcaccgccaaagcgcgaagcggtttggtggggtggcttgacccgggatccagtcttttaaaaacaaccagcaagccccgaaacaaagcacaacagactaaaaaccgtgtcatcccgggctgtcggggtccccgccaaagcgcgaagcggtttggtggggtggcttgacccgggatccagtcttttagaaacaaacgcgtaaggttttaaaaaagcaggcacctttccacctcaaaacacctttccacaaattctccccccatatatataggtgctacgaccccttcatgccaggcgggaagcggatcccagggcaagtatatatatacttgcccgtaattgcgcggccatgggctggctgccctccctttcccctcgcgcgcgggtggctctcatttgcatccagcgttttggcgtgagtcttccttaggtcatccttataatttataaggttgacctaaggatgatggcatcaaatccagtagcagcaaaggagggcggtatgaaggattatgcggaaggttgtggtatttttgtggaaaggtggaaaggtgcccccgaaacaagtccaccaagttatattttgtgtcatcacgggaagtcggggccccctctggggtggcttacccgtgatccagtctttttaaaagaaacatccacaaattacacaaattaacacgaattaaaagaacattaaagagtcaacacacccgactccggaacaaaaccctccagactaaaaaccgtgtcatcacagcctgcgagccgtgatccagtgcccaggtgtggcaaagtccgtttgccacagagaccggaggtctcttccaaacaggcaactccgttgcctctgccgaacggacttcggcaacccttatattacaccaatccgtgtcaatctgcgccctttatccgcgtttatctgcgtgaaccgtggaacccgggatccagtcttttggaatgtttgaacttcgctgaaaacatttttcgctaccaggaatgaaaactggacaacaaacgcagcttgggatatctgacactaagagtgtaattcacacgatcaataagaacatagcgtgctgtgcatacaaaacatattaccgacggacttctgttctgaaatatggacgttttgaacttggtaaacagtccgtatatggactaccagctgggacttgccattaggcatatgcccgaatgtaaagctatattcttatataacgcattgtagacagcacaggttgttctctgctctttccatattacactagtggtcatcatttcaccagtaggggtttttttacgcttttttcccgggagttttcatgtaaagcaccctactggacaaagagatgggagccggaaaacacagcctgaactgggacggcaccgactccaacggcgcccaactggcaagcggagtctatatctaccgcctcagcaccggaaagacgagcgccagccgcaaaatgatattgctgaagtgacggacagccgcccttccaagtccgataattaacttgaaccgccgcgcattacacacggcggttctttccaacaagccaagtatcagcagcgggaaaactgcgctgaaaaagccgctggtggggctccgtaaaatgggagtggaagccgccgcatggaacaccttgaaagtaacaagataccgccccaaattgatctttcctaacccaaaatccgcaaagcaaatttcttgacaatgatctttggcttaaatataaggttcctatcgaacaaaaggagcatgttatgtacaatcttctttgtgataattgggtaaacgtggtctatctttcgggcaaaccagatagaatatctttagttcaaactcttgaagacgcacactgtctgcaactggcatacagcaatcctatggaccggttcgctgttttcagattcctgcttgctcttggctactggtgtttcgccaacaccaacggggagcctgaacctgataagccgcttccgacctcctggatatcctggctggaagaaaacaaggggtatttcgagctttttggggatggacagagatttttccaagccgatcccagttccaggatcagagccattaccgaccttattcatgagataccaacagctcacaacctatgccatttcaatcatgtcaccgactatatcgatgggctctgcgaagcttgctgcatcaagggactgctgagattacctgtctttaccactgtcggtggcagagggataggcgcgggaatcaacaacactcctccattttacctgctctggcatgcaaatgacctcgctggcatgctggttcaaaattggcaaccctgggataatatggggattccggcatggttgggttcttttcaaaaagaaagcaggaaagtgggcttacttgccggaatgacctggctgccgcgcaaggtgcatctgcatgatcctgtctcaggtcaggcagcatgttgttcctgcggcttaccctccaaagctctcgtctattcctgcagcataaaacctgaaccagtgccggaaggccttaaatggaaagaccctcatggtgtttacaccgatcagggaaaaagtctccagtccaaaatcaaactgatgtccaatgatagatacactttcgcggaccgggattggtatagcccgttgttcagctatttgcacgcggaaggaaactccagacaaggaaaactatggttggttggatttgccagcgataaagcaaaaagcatagacatctgggacaagatcatcgagcttgagggaactgatacaaatgatgagctactggctcaattggcaaacagggctactgcccttaatgccatgcgcaagaagcctctcagaggtgatttcaaaaagtcagtgggcactccccagattgctgacattatcccccacgccgaaagcagaattgccatcaatgcgggtaaaatgactgagaacaggggctattcctggcaggatgccgatactgaatacggagaactgctcaccaaggttgcatgctctttggagccggctcaaacagtggacgccaggctcaagagaggtaaattcatttcccgcaagccctggccagttataccagaatccaaaacaaaacccgcagaggaggaccagaatgaatagaggaaccgttgacttcattgcaagcctggagaacctcaaagaaggcgatttgggcattcttagaaaactcaggggagcccggcttgatgaaaagcttcccggatttgacctgttttccgccctatggtggcctttgcggcaaaagaatcaacgcgctcccaagcgtgaagtggcttggttgatcgccaaactttttgctgaattccgctttgaacagcgcgagggagccacattgcccattcttatgggaggcatctgccggaagttggaacccaaaaaggaattaccccgtgtattggcacgctttgatcaactcgcatcgcttgacattatgcagatggaagagccgctgtcggtcattatgggtatcttgcgcaagcaccagcaggtctgcctggactgggtagggcttactgatgttctgtcattttgggagcaggaacctgtcaaaagagaatggtcggattcatttattaaagcatacaagatcaacaaggaggattcagatgttgattgaaattcatatgattcagaatcacagcccggcaaatcttaaccgggacgacttgggcgcccccaagacctgttatttcggtggagtattacgttctcgcatctccagccaatgcatcaagcgcagcatccgttttgccccggaattcgcggaccttagaggaggtatccgaacaaggcgtctggcagagaaacttgaagaaatgctggaaaacaaagataagaagctggttgccaagtttcttgaagcctgcggaatcaaaaccaaatcttccaagaaagctgcaaaaaagtccgaaaagatacccgcggaagccgatgaagatcaggatgagcagcaggcggctgatacatctgacatgctggtttttaccacttatgatgccctgcgccaaatggcagagctgctttccgactccaaactaagtgaaagcgaaaaactgctgcagttcaaagatttgctcacaaactgcgtccattctccggatatagcactttgcggcaggatgttggagaccaaagagcttaaaaacactggcgttgaaggcgccctacaggttgcacatgcgatctccacccacattgccagacctgagatagactattttgtggcggccgatgatgttcccggtgaagacgccggagcgggtcatattggcgaatccatgtttgcctcagcctgtttctacaaatacttctccattgattgggaacagttggtcaagaacctgaaaggggacacgaatctggcagcccacaccgtgggtgcctttctcctcgccgctgccaaaaccaaccccagtggcaaacagaacagcttcgccgctcataactatcccgatggcatccttgttgagttcaagaattcccctattagctacgccaacgcattcgtcaggccagtttccgtggtcaaggaatcggacctggtggaacaaagcatcggccagctttccaactacgtgaacgacatcaggcttggctattatgatgagcaatccccagttatcagcttctggttttctccaaacaatcgctattcccttggcaatgagcattccaaactggcttccagaaacattggcaacctcaatgagcttgtaggcgctgtgttggattatattggcggcttcaagtgggaagaagttcagaaaagcaaggcttatgttggcggctgacatgagtgcgccacccaacaccttattcttgcgcttggagggggctttgcagtcttggggcagcaacgaggctaagtttgctttgcgcaggactaccgacgctcccacaaaatcaggtgtcctggggctgctttgcgcggccatgggaattgggcgcgcggaggctgctgattcatggctcccaaaactcgccaacctgcgcatgggcgtgcggatagaccgccccggcatacgctggtgggacttccatactgttggagcgggacaaagaatgcgcatggcagagctgaaggcacccaaaaaaccttccatggttggagctgccctggctgataccctgacaccaagcaaagtaaaaaccagggcagagaccttgctctcacgccgcgaatatcttgccgacgccagttttctggtcgccttgcagggtgagccggaacttgtggaaaagctctccgccgctctggccaagccggtctgggcaatttatctggggcgcaaatcctgtcccccttcacgtcccgtgggcgagcatgctccgggcttttataacactttggaggaggcgctgtccgcggttcccctgcaaaagcgctggcacaatgaacccctgccgcaaatactgccttgcgtcatggactggatccccagccaggacggagaacatgcgcctgatgacgcggagattcattacgatctgccggtttcttttcagccgccccgccatttgccgcgcttcgtgatcaggcgtgagctggttgtgggagaggatgtgcaagtgagcagggaaaccggaaccagcgtttggaggcccaaaggaacccgggcggattataacaattccgagtataagaaggtcagggcggagcggcttgtgatggaccatgccgcgtgcatggtatgcaaagctcccgccacgactgttcaacacgtgaattaccgcagggcgggaggcaaggaaataccggaagacctgcgggcgctgtgccgcctctgccacgacgcctgcaccatgctggaatacggttccggcatgaccaccgaccgcatcgacccctgcgaccccatctggcgggagcgaatactggcaaagcgcaaagatatagtcgagttccgttcgcgcgggcagcgtttccgcaaaatgaagccagaggaggaaaacggatgatctacttgtccaagctattgatcgatactggaggcaatccagaccgtccccgccccggcagaaagtggctggacaatatctataacgtccaccgccgcctttccatggcgttcccttcaggtttgcgccgggagcaggatccgcatttcctgaagcccttttcgccaaacgacttccaaaaaactcccttccttttccgggtcgataacaacatcgacggaaacgataaaagggcgattattatcgtccagtccgttcttgagccggattgggattattgcttccaaaacgcgcttgatttcctggcagcgccaccggaaacaaaggagtataatccagagtttcaagcgggacaactgctccggttcaggctgcgggtaaacgccagcgtacgccgtcatattcctgagaaggtgcaacaggacggtcaaaccatagaaactggcaacatcctgcacaaaagggtttctctcacctgggatccctcttccaccccggatcaggcccttgccgactggctggctgccaaaagcccaaagctgggcttcacccttcagcgctgtgagcttcttcaactgggttgggtttatggctccaagcctgaacctaaaaatgtcaaagcaaaggaacagggacagggctactggcgtgaacacacatacaatcctctgcgcttccgttcggctctactggagggaattctcaaagtggatgacccgaaactgttcctggaaacgcttagaagcggcattggaaaagcgaaaagcttcggctttggcctgctgtccgttctgccaatcaggaatgatgaataaagacctgcactctatcccccggatcagagatcggcttagctatctctatgtggagcatgccaaaattgatcagaacgggcaagccatcgccattcacgatgccctgggagaaaccccggttccttgtgccggcttggctatgctgatgctgggaccgggcataaccatcacccatgcggcaatactttcactggctgcctgtggctgtctggtagcctgggtgggggaacatggcgtcaggttctatgccgcaggcacaggtacaacccgtagcgccgtcaatcttatgaaacaggcaaagtactgggcagacccggttttgcatttacgggttgtgcgctccatgtatcagttgaggttccaggatgagctttctcctgatttaactttgaaccagatcaggggcaaggaaggtgcccgggtgcgcgatacatatttccaactctcccaaaagtatggtgtgcccatgcagggcagaaactatcaaagagacaactggaataaagcggatcccataaaccgggcattatctgtggcaaactcctgcctctacggcatatcgcacgctgccattgttgctgcaggattctctcccggattgggctttgtccacactggcaagcaactgtcatttgtctatgatatcgcggatctatacaaaatggaaatggctgctcccgccgcattccgggcgaccgctgaagggatcggcgaactcgaccgcagagtcaggcttgcctgccgtgatgaattccacaggcagaatctactcaaacgcattgtcgcggatattagttctctcttcggtgatattatgccagaggatagcccggatgactgttttgccgaagaaccagccttgcctggaggactctggtctccagatggagaagtgtccccagggggcatatcttacgggcaggatgatctgccaaaggaagattgatggtggttttggttttggaaaacgtgccgaactccttgcggggtcagatcacacgttggctgctggaagtaaaggcgggggtgtttgtgggtaaagtctcagcaatggttagagacaaactgtgggacaaggttagaagcaactgcagcggtgggacttgcctgatgatctggagtagccagaccgaacagggttttgatatcgaattctggggtgccgcatcaagagtcgttacggaatgggagggtatcaaactaatgaccaaacatccttgaactaaggcttgaaggagctcaatgacctgttagctctctattgatcaagtgtattccccacgcatgtgggggtgaaccaggagaattaaaatgaatctcaaccagtatcaagtattccccacgcatgtgggggtgaaccgtgatagagcagctgggagaccagtcgtctatcgtattccccacgcatgtgggggtgaaccgttcaacactccgattgcagagcgcgctgatgtgtattccccacgcatgtgggggtgaaccgaccaaattgctgcttcaaacgacaatcgtgttgtattccccacgcatgtgggggtgaaccggttcaacaggcaaacgtattgtaaagtgttaggtattccccacgcatgtgggggtgaaccggca

SEQ ID NO: 958 - DNA, 103225 bp, Artificial Sequence
  Synthetic Oligonucleotide
  misc_feature (1)..(17490): n is a, c, g, or t
nnnnnnnnnnnnnnnnnnnnnnnnnnnnnnnnnnnnnnnnnnnnnnnnnnnnnnnnnnnnnnnnnnnnnnnnnnnnnnnnnnnnnnnnnnnnnnnnnnnnnnnnnnnnnnnnnnnnnnnnnnnnnnnnnnnnnnnnnnnnnnnnnnnnnnnnnnnnnnnnnnnnnnnnnnnnnnnnnnnnnnnnnnnnnnnnnnnnnnnnnnnnnnnnnnnnnnnnnnnnnnnnnnnnnnnnnnnnnnnnnnnnnnnnnnnnnnnnnnnnnnnnnnnnnnnnnnnnnnnnnnnnnnnnnnnnnnnnnnnnnnnnnnnnnnnnnnnnnnnnnnnnnnnnnnnnnnnnnnnnnnnnnnnnnnnnnnnnnnnnnnnnnnnnnnnnnnnnnnnnnnnnnnnnnnnnnnnnnnnnnnnnnnnnnnnnnnnnnnnnnnnnnnnnnnnnnnnnnnnnnnnnnnnnnnnnnnnnnnnnnnnnnnnnnnnnnnnnnnnnnnnnnnnnnnnnnnnnnnnnnnnnnnnnnnnnnnnnnnnnnnnnnnnnnnnnnnnnnnnnnnnnnnnnnnnnnnnnnnnnnnnnnnnnnnnnnnnnnnnnnnnnnnnnnnnnnnnnnnnnnnnnnnnnnnnnnnnnnnnnnnnnnnnnnnnnnnnnnnnnnnnnnnnnnnnnnnnnnnnnnnnnnnnnnnnnnnnnnnnnnnnnnnnnnnnnnnnnnnnnnnnnnnnnnnnnnnnnnnnnnnnnnnnnnnnnnnnnnnnnnnnnnnnnnnnnnnnnnnnnnnnnnnnnnnnnnnnnnnnnnnnnnnnnnnnnnnnnnnnnnnnnnnnnnnnnnnnnnnnnnnnnnnnnnnnnnnnnnnnnnnnnnnnnnnnnnnnnnnnnnnnnnnnnnnnnnnnnnnnnnnnnnnnnnnnnnnnnnnnnnnnnnnnnnnnnnnnnnnnnnnnnnnnnnnnnnnnnnnnnnnnnnnnnnnnnnnnnnnnnnnnnnnnnnnnnnnnnnnnnnnnnnnnnnnnnnnnnnnnnnnnnnnnnnnnnnnnnnnnnnnnnnnnnnnnnnnnnnnnnnnnnnnnnnnnnnnnnnnnnnnnnnnnnnnnnnnnnnnnnnnnnnnnnnnnnnnnnnnnnnnnnnnnnnnnnnnnnnnnnnnnnnnnnnnnnnnnnnnnnnnnnnnnnnnnnnnnnnnnnnnnnnnnnnnnnnnnnnnnnnnnnnnnnnnnnnnnnnnnnnnnnnnnnnnnnnnnnnnnnnnnnnnnnnnnnnnnnnnnnnnnnnnnnnnnnnnnnnnnnnnnnnnnnnnnnnnnnnnnnnnnnnnnnnnnnnnnnnnnnnnnnnnnnnnnnnnnnnnnnnnnnnnnnnnnnnnnnnnnnnnnnnnnnnnnnnnnnnnnnnnnnnnnnnnnnnnnnnnnnnnnnnnnnnnnnnnnnnnnnnnnnnnnnnnnnnnnnnnnnnnnnnnnnnnnnnnnnnnnnnnnnnnnnnnnnnnnnnnnnnnnnnnnnnnnnnnnnnnnnnnnnnnnnnnnnnnnnnnnnnnnnnnnnnnnnnnnnnnnnnnnnnnnnnnnnnnnnnnnnnnnnnnnnnnnnnnnnnnnnnnnnnnnnnnnnnnnnnnnnnnnnnnnnnnnnnnnnnnnnnnnnnnnnnnnnnnnnnnnnnnnnnnnnnnnnnnnnnnnnnnnnnnnnnnnnnnnnnnnnnnnnnnnnnnnnnnnnnnnnnnnnnnnnnnnnnnnnnnnnnnnnnnnnnnnnnnnnnnnnnnnnnnnnnnnnnnnnnnnnnnnnnnnnnnnnnnnnnnnnnnnnnnnnnnnnnnnnnnnnnnnnnnnnnnnnnnnnnnnnnnnnnnnnnnnnnnnnnnnnnnnnnnnnnnnnnnnnnnnnnnnnnnnnnnnnnnnnnnnnnnnnnnnnnnnnnnnnnnnnnnnnnnnnnnnnnnnnnnnnnnnnnnnnnnnnnnnnnnnnnnnnnnnnnnnnnnnnnnnnnnnnnnnnnnnnnnnnnnnnnnnnnnnnnnnnnnnnnnnnnnnnnnnnnnnnnnnnnnnnnnnnnnnnnnnnnnnnnnnnnnnnnnnnnnnnnnnnnnnnnnnnnnnnnnnnnnnnnnnnnnnnnnnnnnnnnnnnnnnnnnnnnnnnnnnnnnnnnnnnnnnnnnnnnnnnnnnnnnnnnnnnnnnnnnnnnnnnnnnnnnnnnnnnnnnnnnnnnnnnnnnnnnnnnnnnnnnnnnnnnnnnnnnnnnnnnnnnnnnnnnnnnnnnnnnnnnnnnnnnnnnnnnnnnnnnnnnnnnnnnnnnnnnnnnnnnnnnnnnnnnnnnnnnnnnnnnnnnnnnnnnnnnnnnnnnnnnnnnnnnnnnnnnnnnnnnnnnnnnnnnnnnnnnnnnnnnnnnnnnnnnnnnnnnnnnnnnnnnnnnnnnnnnnnnnnnnnnnnnnnnnnnnnnnnnnnnnnnnnnnnnnnnnnnnnnnnnnnnnnnnnnnnnnnnnnnnnnnnnnnnnnnnnnnnnnnnnnnnnnnnnnnnnnnnnnnnnnnnnnnnnnnnnnnnnnnnnnnnnnnnnnnnnnnnnnnnnnnnnnnnnnnnnnnnnnnnnnnnnnnnnnnnnnnnnnnnnnnnnnnnnnnnnnnnnnnnnnnnnnnnnnnnnnnnnnnnnnnnnnnnnnnnnnnnnnnnnnnnnnnnnnnnnnnnnnnnnnnnnnnnnnnnnnnnnnnnnnnnnnnnnnnnnnnnnnnnnnnnnnnnnnnnnnnnnnnnnnnnnnnnnnnnnnnnnnnnnnnnnnnnnnnnnnnnnnnnnnnnnnnnnnnnnnnnnnnnnnnnnnnnnnnnnnnnnnnnnnnnnnnnnnnnnnnnnnnnnnnnnnnnnnnnnnnnnnnnnnnnnnnnnnnnnnnnnnnnnnnnnnnnnnnnnnnnnnnnnnnnnnnnnnnnnnnnnnnnnnnnnnnnnnnnnnnnnnnnnnnnnnnnnnnnnnnnnnnnnnnnnnnnnnnnnnnnnnnnnnnnnnnnnnnnnnnnnnnnnnnnnnnnnnnnnnnnnnnnnnnnnnnnnnnnnnnnnnnnnnnnnnnnnnnnnnnnnnnnnnnnnnnnnnnnnnnnnnnnnnnnnnnnnnnnnnnnnnnnnnnnnnnnnnnnnnnnnnnnnnnnnnnnnnnnnnnnnnnnnnnnnnnnnnnnnnnnnnnnnnnnnnnnnnnnnnnnnnnnnnnnnnnnnnnnnnnnnnnnnnnnnnnnnnnnnnnnnnnnnnnnnnnnnnnnnnnnnnnnnnnnnnnnnnnnnnnnnnnnnnnnnnnnnnnnnnnnnnnnnnnnnnnnnnnnnnnnnnnnnnnnnnnnnnnnnnnnnnnnnnnnnnnnnnnnnnnnnnnnnnnnnnnnnnnnnnnnnnnnnnnnnnnnnnnnnnnnnnnnnnnnnnnnnnnnnnnnnnnnnnnnnnnnnnnnnnnnnnnnnnnnnnnnnnnnnnnnnnnnnnnnnnnnnnnnnnnnnnnnnnnnnnnnnnnnnnnnnnnnnnnnnnnnnnnnnnnnnnnnnnnnnnnnnnnnnnnnnnnnnnnnnnnnnnnnnnnnnnnnnnnnnnnnnnnnnnnnnnnnnnnnnnnnnnnnnnnnnnnnnnnnnnnnnnnnnnnnnnnnnnnnnnnnnnnnnnnnnnnnnnnnnnnnnnnnnnnnnnnnnnnnnnnnnnnnnnnnnnnnnnnnnnnnnnnnnnnnnnnnnnnnnnnnnnnnnnnnnnnnnnnnnnnnnnnnnnnnnnnnnnnnnnnnnnnnnnnnnnnnnnnnnnnnnnnnnnnnnnnnnnnnnnnnnnnnnnnnnnnnnnnnnnnnnnnnnnnnnnnnnnnnnnnnnnnnnnnnnnnnnnnnnnnnnnnnnnnnnnnnnnnnnnnnnnnnnnnnnnnnnnnnnnnnnnnnnnnnnnnnnnnnnnnnnnnnnnnnnnnnnnnnnnnnnnnnnnnnnnnnnnnnnnnnnnnnnnnnnnnnnnnnnnnnnnnnnnnnnnnnnnnnnnnnnnnnnnnnnnnnnnnnnnnnnnnnnnnnnnnnnnnnnnnnnnnnnnnnnnnnnnnnnnnnnnnnnnnnnnnnnnnnnnnnnnnnnnnnnnnnnnnnnnnnnnnnnnnnnnnnnnnnnnnnnnnnnnnnnnnnnnnnnnnnnnnnnnnnnnnnnnnnnnnnnnnnnnnnnnnnnnnnnnnnnnnnnnnnnnnnnnnnnnnnnnnnnnnnnnnnnnnnnnnnnnnnnnnnnnnnnnnnnnnnnnnnnnnnnnnnnnnnnnnnnnnnnnnnnnnnnnnnnnnnnnnnnnnnnnnnnnnnnnnnnnnnnnnnnnnnnnnnnnnnnnnnnnnnnnnnnnnnnnnnnnnnnnnnnnnnnnnnnnnnnnnnnnnnnnnnnnnnnnnnnnnnnnnnnnnnnnnnnnnnnnnnnnnnnnnnnnnnnnnnnnnnnnnnnnnnnnnnnnnnnnnnnnnnnnnnnnnnnnnnnnnnnnnnnnnnnnnnnnnnnnnnnnnnnnnnnnnnnnnnnnnnnnnnnnnnnnnnnnnnnnnnnnnnnnnnnnnnnnnnnnnnnnnnnnnnnnnnnnnnnnnnnnnnnnnnnnnnnnnnnnnnnnnnnnnnnnnnnnnnnnnnnnnnnnnnnnnnnnnnnnnnnnnnnnnnnnnnnnnnnnnnnnnnnnnnnnnnnnnnnnnnnnnnnnnnnnnnnnnnnnnnnnnnnnnnnnnnnnnnnnnnnnnnnnnnnnnnnnnnnnnnnnnnnnnnnnnnnnnnnnnnnnnnnnnnnnnnnnnnnnnnnnnnnnnnnnnnnnnnnnnnnnnnnnnnnnnnnnnnnnnnnnnnnnnnnnnnnnnnnnnnnnnnnnnnnnnnnnnnnnnnnnnnnnnnnnnnnnnnnnnnnnnnnnnnnnnnnnnnnnnnnnnnnnnnnnnnnnnnnnnnnnnnnnnnnnnnnnnnnnnnnnnnnnnnnnnnnnnnnnnnnnnnnnnnnnnnnnnnnnnnnnnnnnnnnnnnnnnnnnnnnnnnnnnnnnnnnnnnnnnnnnnnnnnnnnnnnnnnnnnnnnnnnnnnnnnnnnnnnnnnnnnnnnnnnnnnnnnnnnnnnnnnnnnnnnnnnnnnnnnnnnnnnnnnnnnnnnnnnnnnnnnnnnnnnnnnnnnnnnnnnnnnnnnnnnnnnnnnnnnnnnnnnnnnnnnnnnnnnnnnnnnnnnnnnnnnnnnnnnnnnnnnnnnnnnnnnnnnnnnnnnnnnnnnnnnnnnnnnnnnnnnnnnnnnnnnnnnnnnnnnnnnnnnnnnnnnnnnnnnnnnnnnnnnnnnnnnnnnnnnnnnnnnnnnnnnnnnnnnnnnnnnnnnnnnnnnnnnnnnnnnnnnnnnnnnnnnnnnnnnnnnnnnnnnnnnnnnnnnnnnnnnnnnnnnnnnnnnnnnnnnnnnnnnnnnnnnnnnnnnnnnnnnnnnnnnnnnnnnnnnnnnnnnnnnnnnnnnnnnnnnnnnnnnnnnnnnnnnnnnnnnnnnnnnnnnnnnnnnnnnnnnnnnnnnnnnnnnnnnnnnnnnnnnnnnnnnnnnnnnnnnnnnnnnnnnnnnnnnnnnnnnnnnnnnnnnnnnnnnnnnnnnnnnnnnnnnnnnnnnnnnnnnnnnnnnnnnnnnnnnnnnnnnnnnnnnnnnnnnnnnnnnnnnnnnnnnnnnnnnnnnnnnnnnnnnnnnnnnnnnnnnnnnnnnnnnnnnnnnnnnnnnnnnnnnnnnnnnnnnnnnnnnnnnnnnnnnnnnnnnnnnnnnnnnnnnnnnnnnnnnnnnnnnnnnnnnnnnnnnnnnnnnnnnnnnnnnnnnnnnnnnnnnnnnnnnnnnnnnnnnnnnnnnnnnnnnnnnnnnnnnnnnnnnnnnnnnnnnnnnnnnnnnnnnnnnnnnnnnnnnnnnnnnnnnnnnnnnnnnnnnnnnnnnnnnnnnnnnnnnnnnnnnnnnnnnnnnnnnnnnnnnnnnnnnnnnnnnnnnnnnnnnnnnnnnnnnnnnnnnnnnnnnnnnnnnnnnnnnnnnnnnnnnnnnnnnnnnnnnnnnnnnnnnnnnnnnnnnnnnnnnnnnnnnnnnnnnnnnnnnnnnnnnnnnnnnnnnnnnnnnnnnnnnnnnnnnnnnnnnnnnnnnnnnnnnnnnnnnnnnnnnnnnnnnnnnnnnnnnnnnnnnnnnnnnnnnnnnnnnnnnnnnnnnnnnnnnnnnnnnnnnnnnnnnnnnnnnnnnnnnnnnnnnnnnnnnnnnnnnnnnnnnnnnnnnnnnnnnnnnnnnnnnnnnnnnnnnnnnnnnnnnnnnnnnnnnnnnnnnnnnnnnnnnnnnnnnnnnnnnnnnnnnnnnnnnnnnnnnnnnnnnnnnnnnnnnnnnnnnnnnnnnnnnnnnnnnnnnnnnnnnnnnnnnnnnnnnnnnnnnnnnnnnnnnnnnnnnnnnnnnnnnnnnnnnnnnnnnnnnnnnnnnnnnnnnnnnnnnnnnnnnnnnnnnnnnnnnnnnnnnnnnnnnnnnnnnnnnnnnnnnnnnnnnnnnnnnnnnnnnnnnnnnnnnnnnnnnnnnnnnnnnnnnnnnnnnnnnnnnnnnnnnnnnnnnnnnnnnnnnnnnnnnnnnnnnnnnnnnnnnnnnnnnnnnnnnnnnnnnnnnnnnnnnnnnnnnnnnnnnnnnnnnnnnnnnnnnnnnnnnnnnnnnnnnnnnnnnnnnnnnnnnnnnnnnnnnnnnnnnnnnnnnnnnnnnnnnnnnnnnnnnnnnnnnnnnnnnnnnnnnnnnnnnnnnnnnnnnnnnnnnnnnnnnnnnnnnnnnnnnnnnnnnnnnnnnnnnnnnnnnnnnnnnnnnnnnnnnnnnnnnnnnnnnnnnnnnnnnnnnnnnnnnnnnnnnnnnnnnnnnnnnnnnnnnnnnnnnnnnnnnnnnnnnnnnnnnnnnnnnnnnnnnnnnnnnnnnnnnnnnnnnnnnnnnnnnnnnnnnnnnnnnnnnnnnnnnnnnnnnnnnnnnnnnnnnnnnnnnnnnnnnnnnnnnnnnnnnnnnnnnnnnnnnnnnnnnnnnnnnnnnnnnnnnnnnnnnnnnnnnnnnnnnnnnnnnnnnnnnnnnnnnnnnnnnnnnnnnnnnnnnnnnnnnnnnnnnnnnnnnnnnnnnnnnnnnnnnnnnnnnnnnnnnnnnnnnnnnnnnnnnnnnnnnnnnnnnnnnnnnnnnnnnnnnnnnnnnnnnnnnnnnnnnnnnnnnnnnnnnnnnnnnnnnnnnnnnnnnnnnnnnnnnnnnnnnnnnnnnnnnnnnnnnnnnnnnnnnnnnnnnnnnnnnnnnnnnnnnnnnnnnnnnnnnnnnnnnnnnnnnnnnnnnnnnnnnnnnnnnnnnnnnnnnnnnnnnnnnnnnnnnnnnnnnnnnnnnnnnnnnnnnnnnnnnnnnnnnnnnnnnnnnnnnnnnnnnnnnnnnnnnnnnnnnnnnnnnnnnnnnnnnnnnnnnnnnnnnnnnnnnnnnnnnnnnnnnnnnnnnnnnnnnnnnnnnnnnnnnnnnnnnnnnnnnnnnnnnnnnnnnnnnnnnnnnnnnnnnnnnnnnnnnnnnnnnnnnnnnnnnnnnnnnnnnnnnnnnnnnnnnnnnnnnnnnnnnnnnnnnnnnnnnnnnnnnnnnnnnnnnnnnnnnnnnnnnnnnnnnnnnnnnnnnnnnnnnnnnnnnnnnnnnnnnnnnnnnnnnnnnnnnnnnnnnnnnnnnnnnnnnnnnnnnnnnnnnnnnnnnnnnnnnnnnnnnnnnnnnnnnnnnnnnnnnnnnnnnnnnnnnnnnnnnnnnnnnnnnnnnnnnnnnnnnnnnnnnnnnnnnnnnnnnnnnnnnnnnnnnnnnnnnnnnnnnnnnnnnnnnnnnnnnnnnnnnnnnnnnnnnnnnnnnnnnnnnnnnnnnnnnnnnnnnnnnnnnnnnnnnnnnnnnnnnnnnnnnnnnnnnnnnnnnnnnnnnnnnnnnnnnnnnnnnnnnnnnnnnnnnnnnnnnnnnnnnnnnnnnnnnnnnnnnnnnnnnnnnnnnnnnnnnnnnnnnnnnnnnnnnnnnnnnnnnnnnnnnnnnnnnnnnnnnnnnnnnnnnnnnnnnnnnnnnnnnnnnnnnnnnnnnnnnnnnnnnnnnnnnnnnnnnnnnnnnnnnnnnnnnnnnnnnnnnnnnnnnnnnnnnnnnnnnnnnnnnnnnnnnnnnnnnnnnnnnnnnnnnnnnnnnnnnnnnnnnnnnnnnnnnnnnnnnnnnnnnnnnnnnnnnnnnnnnnnnnnnnnnnnnnnnnnnnnnnnnnnnnnnnnnnnnnnnnnnnnnnnnnnnnnnnnnnnnnnnnnnnnnnnnnnnnnnnnnnnnnnnnnnnnnnnnnnnnnnnnnnnnnnnnnnnnnnnnnnnnnnnnnnnnnnnnnnnnnnnnnnnnnnnnnnnnnnnnnnnnnnnnnnnnnnnnnnnnnnnnnnnnnnnnnnnnnnnnnnnnnnnnnnnnnnnnnnnnnnnnnnnnnnnnnnnnnnnnnnnnnnnnnnnnnnnnnnnnnnnnnnnnnnnnnnnnnnnnnnnnnnnnnnnnnnnnnnnnnnnnnnnnnnnnnnnnnnnnnnnnnnnnnnnnnnnnnnnnnnnnnnnnnnnnnnnnnnnnnnnnnnnnnnnnnnnnnnnnnnnnnnnnnnnnnnnnnnnnnnnnnnnnnnnnnnnnnnnnnnnnnnnnnnnnnnnnnnnnnnnnnnnnnnnnnnnnnnnnnnnnnnnnnnnnnnnnnnnnnnnnnnnnnnnnnnnnnnnnnnnnnnnnnnnnnnnnnnnnnnnnnnnnnnnnnnnnnnnnnnnnnnnnnnnnnnnnnnnnnnnnnnnnnnnnnnnnnnnnnnnnnnnnnnnnnnnnnnnnnnnnnnnnnnnnnnnnnnnnnnnnnnnnnnnnnnnnnnnnnnnnnnnnnnnnnnnnnnnnnnnnnnnnnnnnnnnnnnnnnnnnnnnnnnnnnnnnnnnnnnnnnnnnnnnnnnnnnnnnnnnnnnnnnnnnnnnnnnnnnnnnnnnnnnnnnnnnnnnnnnnnnnnnnnnnnnnnnnnnnnnnnnnnnnnnnnnnnnnnnnnnnnnnnnnnnnnnnnnnnnnnnnnnnnnnnnnnnnnnnnnnnnnnnnnnnnnnnnnnnnnnnnnnnnnnnnnnnnnnnnnnnnnnnnnnnnnnnnnnnnnnnnnnnnnnnnnnnnnnnnnnnnnnnnnnnnnnnnnnnnnnnnnnnnnnnnnnnnnnnnnnnnnnnnnnnnnnnnnnnnnnnnnnnnnnnnnnnnnnnnnnnnnnnnnnnnnnnnnnnnnnnnnnnnnnnnnnnnnnnnnnnnnnnnnnnnnnnnnnnnnnnnnnnnnnnnnnnnnnnnnnnnnnnnnnnnnnnnnnnnnnnnnnnnnnnnnnnnnnnnnnnnnnnnnnnnnnnnnnnnnnnnnnnnnnnnnnnnnnnnnnnnnnnnnnnnnnnnnnnnnnnnnnnnnnnnnnnnnnnnnnnnnnnnnnnnnnnnnnnnnnnnnnnnnnnnnnnnnnnnnnnnnnnnnnnnnnnnnnnnnnnnnnnnnnnnnnnnnnnnnnnnnnnnnnnnnnnnnnnnnnnnnnnnnnnnnnnnnnnnnnnnnnnnnnnnnnnnnnnnnnnnnnnnnnnnnnnnnnnnnnnnnnnnnnnnnnnnnnnnnnnnnnnnnnnnnnnnnnnnnnnnnnnnnnnnnnnnnnnnnnnnnnnnnnnnnnnnnnnnnnnnnnnnnnnnnnnnnnnnnnnnnnnnnnnnnnnnnnnnnnnnnnnnnnnnnnnnnnnnnnnnnnnnnnnnnnnnnnnnnnnnnnnnnnnnnnnnnnnnnnnnnnnnnnnnnnnnnnnnnnnnnnnnnnnnnnnnnnnnnnnnnnnnnnnnnnnnnnnnnnnnnnnnnnnnnnnnnnnnnnnnnnnnnnnnnnnnnnnnnnnnnnnnnnnnnnnnnnnnnnnnnnnnnnnnnnnnnnnnnnnnnnnnnnnnnnnnnnnnnnnnnnnnnnnnnnnnnnnnnnnnnnnnnnnnnnnnnnnnnnnnnnnnnnnnnnnnnnnnnnnnnnnnnnnnnnnnnnnnnnnnnnnnnnnnnnnnnnnnnnnnnnnnnnnnnnnnnnnnnnnnnnnnnnnnnnnnnnnnnnnnnnnnnnnnnnnnnnnnnnnnnnnnnnnnnnnnnnnnnnnnnnnnnnnnnnnnnnnnnnnnnnnnnnnnnnnnnnnnnnnnnnnnnnnnnnnnnnnnnnnnnnnnnnnnnnnnnnnnnnnnnnnnnnnnnnnnnnnnnnnnnnnnnnnnnnnnnnnnnnnnnnnnnnnnnnnnnnnnnnnnnnnnnnnnnnnnnnnnnnnnnnnnnnnnnnnnnnnnnnnnnnnnnnnnnnnnnnnnnnnnnnnnnnnnnnnnnnnnnnnnnnnnnnnnnnnnnnnnnnnnnnnnnnnnnnnnnnnnnnnnnnnnnnnnnnnnnnnnnnnnnnnnnnnnnnnnnnnnnnnnnnnnnnnnnnnnnnnnnnnnnnnnnnnnnnnnnnnnnnnnnnnnnnnnnnnnnnnnnnnnnnnnnnnnnnnnnnnnnnnnnnnnnnnnnnnnnnnnnnnnnnnnnnnnnnnnnnnnnnnnnnnnnnnnnnnnnnnnnnnnnnnnnnnnnnnnnnnnnnnnnnnnnnnnnnnnnnnnnnnnnnnnnnnnnnnnnnnnnnnnnnnnnnnnnnnnnnnnnnnnnnnnnnnnnnnnnnnnnnnnnnnnnnnnnnnnnnnnnnnnnnnnnnnnnnnnnnnnnnnnnnnnnnnnnnnnnnnnnnnnnnnnnnnnnnnnnnnnnnnnnnnnnnnnnnnnnnnnnnnnnnnnnnnnnnnnnnnnnnnnnnnnnnnnnnnnnnnnnnnnnnnnnnnnnnnnnnnnnnnnnnnnnnnnnnnnnnnnnnnnnnnnnnnnnnnnnnnnnnnnnnnnnnnnnnnnnnnnnnnnnnnnnnnnnnnnnnnnnnnnnnnnnnnnnnnnnnnnnnnnnnnnnnnnnnnnnnnnnnnnnnnnnnnnnnnnnnnnnnnnnnnnnnnnnnnnnnnnnnnnnnnnnnnnnnnnnnnnnnnnnnnnnnnnnnnnnnnnnnnnnnnnnnnnnnnnnnnnnnnnnnnnnnnnnnnnnnnnnnnnnnnnnnnnnnnnnnnnnnnnnnnnnnnnnnnnnnnnnnnnnnnnnnnnnnnnnnnnnnnnnnnnnnnnnnnnnnnnnnnnnnnnnnnnnnnnnnnnnnnnnnnnnnnnnnnnnnnnnnnnnnnnnnnnnnnnnnnnnnnnnnnnnnnnnnnnnnnnnnnnnnnnnnnnnnnnnnnnnnnnnnnnnnnnnnnnnnnnnnnnnnnnnnnnnnnnnnnnnnnnnnnnnnnnnnnnnnnnnnnnnnnnnnnnnnnnnnnnnnnnnnnnnnnnnnnnnnnnnnnnnnnnnnnnnnnnnnnnnnnnnnnnnnnnnnnnnnnnnnnnnnnnnnnnnnnnnnnnnnnnnnnnnnnnnnnnnnnnnnnnnnnnnnnnnnnnnnnnnnnnnnnnnnnnnnnnnnnnnnnnnnnnnnnnnnnnnnnnnnnnnnnnnnnnnnnnnnnnnnnnnnnnnnnnnnnnnnnnnnnnnnnnnnnnnnnnnnnnnnnnnnnnnnnnnnnnnnnnnnnnnnnnnnnnnnnnnnnnnnnnnnnnnnnnnnnnnnnnnnnnnnnnnnnnnnnnnnnnnnnnnnnnnnnnnnnnnnnnnnnnnnnnnnnnnnnnnnnnnnnnnnnnnnnnnnnnnnnnnnnnnnnnnnnnnnnnnnnnnnnnnnnnnnnnnnnnnnnnnnnnnnnnnnnnnnnnnnnnnnnnnnnnnnnnnnnnnnnnnnnnnnnnnnnnnnnnnnnnnnnnnnnnnnnnnnnnnnnnnnnnnnnnnnnnnnnnnnnnnnnnnnnnnnnnnnnnnnnnnnnnnnnnnnnnnnnnnnnnnnnnnnnnnnnnnnnnnnnnnnnnnnnnnnnnnnnnnnnnnnnnnnnnnnnnnnnnnnnnnnnnnnnnnnnnnnnnnnnnnnnnnnnnnnnnnnnnnnnnnnnnnnnnnnnnnnnnnnnnnnnnnnnnnnnnnnnnnnnnnnnnnnnnnnnnnnnnnnnnnnnnnnnnnnnnnnnnnnnnnnnnnnnnnnnnnnnnnnnnnnnnnnnnnnnnnnnnnnnnnnnnnnnnnnnnnnnnnnnnnnnnnnnnnnnnnnnnnnnnnnnnnnnnnnnnnnnnnnnnnnnnnnnnnnnnnnnnnnnnnnnnnnnnnnnnnnnnnnnnnnnnnnnnnnnnnnnnnnnnnnnnnnnnnnnnnnnnnnnnnnnnnnnnnnnnnnnnnnnnnnnnnnnnnnnnnnnnnnnnnnnnnnnnnnnnnnnnnnnnnnnnnnnnnnnnnnnnnnnnnnnnnnnnnnnnnnnnnnnnnnnnnnnnnnnnnnnnnnnnnnnnnnnnnnnnnnnnnnnnnnnnnnnnnnnnnnnnnnnnnnnnnnnnnnnnnnnnnnnnnnnnnnnnnnnnnnnnnnnnnnnnnnnnnnnnnnnnnnnnnnnnnnnnnnnnnnnnnnnnnnnnnnnnnnnnnnnnnnnnnnnnnnnnnnnnnnnnnnnnnnnnnnnnnnnnnnnnnnnnnnnnnnnnnnnnnnnnnnnnnnnnnnnnnnnnnnnnnnnnnnnnnnnnnnnnnnnnnnnnnnnnnnnnnnnnnnnnnnnnnnnnnnnnnnnnnnnnnnnnnnnnnnnnnnnnnnnnnnnnnnnnnnnnnnnnnnnnnnnnnnnnnnnnnnnnnnnnnnnnnnnnnnnnnnnnnnnnnnnnnnnnnnnnnnnnnnnnnnnnnnnnnnnnnnnnnnnnnnnnnnnnnnnnnnnnnnnnnnnnnnnnnnnnnnnnnnnnnnnnnnnnnnnnnnnnnnnnnnnnnnnnnnnnnnnnnnnnnnnnnnnnnnnnnnnnnnnnnnnnnnnnnnnnnnnnnnnnnnnnnnnnnnnnnnnnnnnnnnnnnnnnnnnnnnnnnnnnnnnnnnnnnnnnnnnnnnnnnnnnnnnnnnnnnnnnnnnnnnnnnnnnnnnnnnnnnnnnnnnnnnnnnnnnnnnnnnnnnnnnnnnnnnnnnnnnnnnnnnnnnnnnnnnnnnnnnnnnnnnnnnnnnnnnnnnnnnnnnnnnnnnnnnnnnnnnnnnnnnnnnnnnnnnnnnnnnnnnnnnnnnnnnnnnnnnnnnnnnnnnnnnnnnnnnnnnnnnnnnnnnnnnnnnnnnnnnnnnnnnnnnnnnnnnnnnnnnnnnnnnnnnnnnnnnnnnnnnnnnnnnnnnnnnnnnnnnnnnnnnnnnnnnnnnnnnnnnnnnnnnnnnnnnnnnnnnnnnnnnnnnnnnnnnnnnnnnnnnnnnnnnnnnnnnnnnnnnnnnnnnnnnnnnnnnnnnnnnnnnnnnnnnnnnnnnnnnnnnnnnnnnnnnnnnnnnnnnnnnnnnnnnnnnnnnnnnnnnnnnnnnnnnnnnnnnnnnnnnnnnnnnnnnnnnnnnnnnnnnnnnnnnnnnnnnnnnnnnnnnnnnnnnnnnnnnnnnnnnnnnnnnnnnnnnnnnnnnnnnnnnnnnnnnnnnnnnnnnnnnnnnnnnnnnnnnnnnnnnnnnnnnnnnnnnnnnnnnnnnnnnnnnnnnnnnnnnnnnnnnnnnnnnnnnnnnnnnnnnnnnnnnnnnnnnnnnnnnnnnnnnnnnnnnnnnnnnnnnnnnnnnnnnnnnnnnnnnnnnnnnnnnnnnnnnnnnnnnnnnnnnnnnnnnnnnnnnnnnnnnnnnnnnnnnnnnnnnnnnnnnnnnnnnnnnnnnnnnnnnnnnnnnnnnnnnnnnnnnnnnnnnnnnnnnnnnnnnnnnnnnnnnnnnnnnnnnnnnnnnnnnnnnnnnnnnnnnnnnnnnnnnnnnnnnnnnnnnnnnnnnnnnnnnnnnnnnnnnnnnnnnnnnnnnnnnnnnnnnnnnnnnnnnnnnnnnnnnnnnnnnnnnnnnnnnnnnnnnnnnnnnnnnnnnnnnnnnnnnnnnnnnnnnnnnnnnnnnnnnnnnnnnnnnnnnnnnnnnnnnnnnnnnnnnnnnnnnnnnnnnnnnnnnnnnnnnnnnnnnnnnnnnnnnnnnnnnnnnnnnnnnnnnnnnnnnnnnnnnnnnnnnnnnnnnnnnnnnnnnnnnnnnnnnnnnnnnnnnnnnnnnnnnnnnnnnnnnnnnnnnnnnnnnnnnnnnnnnnnnnnnnnnnnnnnnnnnnnnnnnnnnnnnnnnnnnnnnnnnnnnnnnnnnnnnnnnnnnnnnnnnnnnnnnnnnnnnnnnnnnnnnnnnnnnnnnnnnnnnnnnnnnnnnnnnnnnnnnnnnnnnnnnnnnnnnnnnnnnnnnnnnnnnnnnnnnnnnnnnnnnnnnnnnnnnnnnnnnnnnnnnnnnnnnnnnnnnnnnnnnnnnnnnnnnnnnnnnnnnnnnnnnnnnnnnnnnnnnnnnnnnnnnnnnnnnnnnnnnnnnnnnnnnnnnnnnnnnnnnnnnnnnnnnnnnnnnnnnnnnnnnnnnnnnnnnnnnnnnnnnnnnnnnnnnnnnnnnnnnnnnnnnnnnnnnnnnnnnnnnnnnnnnnnnnnnnnnnnnnnnnnnnnnnnnnnnnnnnnnnnnnnnnnnnnnnnnnnnnnnnnnnnnnnnnnnnnnnnnnnnnnnnnnnnnnnnnnnnnnnnnnnnnnnnnnnnnnnnnnnnnnnnnnnnnnnnnnnnnnnnnnnnnnnnnnnnnnnnnnnnnnnnnnnnnnnnnnnnnnnnnnnnnnnnnnnnnnnnnnnnnnnnnnnnnnnnnnnnnnnnnnnnnnnnnnnnnnnnnnnnnnnnnnnnnnnnnnnnnnnnnnnnnnnnnnnnnnnnnnnnnnnnnnnnnnnnnnnnnnnnnnnnnnnnnnnnnnnnnnnnnnnnnnnnnnnnnnnnnnnnnnnnnnnnnnnnnnnnnnnnnnnnnnnnnnnnnnnnnnnnnnnnnnnnnnnnnnnnnnnnnnnnnnnnnnnnnnnnnnnnnnnnnnnnnnnnnnnnnnnnnnnnnnnnnnnnnnnnnnnnnnnnnnnnnnnnnnnnnnnnnnnnnnnnnnnnnnnnnnnnnnnnnnnnnnnnnnnnnnnnnnnnnnnnnnnnnnnnnnnnnnnnnnnnnnnnnnnnnnnnnnnnnnnnnnnnnnnnnnnnnnnnnnnnnnnnnnnnnnnnnnnnnnnnnnnnnnnnnnnnnnnnnnnnnnnnnnnnnnnnnnnnnnnnnnnnnnnnnnnnnnnnnnnnnnnnnnnnnnnnnnnnnnnnnnnnnnnnnnnnnnnnnnnnnnnnnnnnnnnnnnnnnnnnnnnnnnnnnnnnnnnnnnnnnnnnnnnnnnnnnnnnnnnnnnnnnnnnnnnnnnnnnnnnnnnnnnnnnnnnnnnnnnnnnnnnnnnnnnnnnnnnnnnnnnnnnnnnnnnnnnnnnnnnnnnnnnnnnnnnnnnnnnnnnnnnnnnnnnnnnnnnnnnnnnnnnnnnnnnnnnnnnnnnnnnnnnnnnnnnnnnnnnnnnnnnnnnnnnnnnnnnnnnnnnnnnnnnnnnnnnnnnnnnnnnnnnnnnnnnnnnnnnnnnnnnnnnnnnnnnnnnnnnnnnnnnnnnnnnnnnnnnnnnnnnnnnnnnnnnnnnnnnnnnnnnnnnnnnnnnnnnnnnnnnnnnnnnnnnnnnnnnnnnnnnnnnnnnnnnnnnnnnnnnnnnnnnnnnnnnnnnnnnnnnnnnnnnnnnnnnnnnnnnnnnnnnnnnnnnnnnnnnnnnnnnnnnnnnnnnnnnnnnnnnnnnnnnnnnnnnnnnnnnnnnnnnnnnnnnnnnnnnnnnnnnnnnnnnnnnnnnnnnnnnnnnnnnnnnnnnnnnnnnnnnnnnnnnnnnnnnnnnnnnnnnnnnnnnnnnnnnnnnnnnnnnnnnnnnnnnnnnnnnnnnnnnnnnnnnnnnnnnnnnnnnnnnnnnnnnnnnnnnnnnnnnnnnnnnnnnnnnnnnnnnnnnnnnnnnnnnnnnnnnnnnnnnnnnnnnnnnnnnnnnnnnnnnnnnnnnnnnnnnnnnnnnnnnnnnnnnnnnnnnnnnnnnnnnnnnnnnnnnnnnnnnnnnnnnnnnnnnnnnnnnnnnnnnnnnnnnnnnnnnnnnnnnnnnnnnnnnnnnnnnnnnnnnnnnnnnnnnnnnnnnnnnnnnnnnnnnnnnnnnnnnnnnnnnnnnnnnnnnnnnnnnnnnnnnnnnnnnnnnnnnnnnnnnnnnnnnnnnnnnnnnnnnnnnnnnnnnnnnnnnnnnnnnnnnnnnnnnnnnnnnnnnnnnnnnnnnnnnnnnnnnnnnnnnnnnnnnnnnnnnnnnnnnnnnnnnnnnnnnnnnnnnnnnnnnnnnnnnnnnnnnnnnnnnnnnnnnnnnnnnnnnnnnnnnnnnnnnnnnnnnnnnnnnnnnnnnnnnnnnnnnnnnnnnnnnnnnnnnnnnnnnnnnnnnnnnnnnnnnnnnnnnnnnnnnnnnnnnnnnnnnnnnnnnnnnnnnnnnnnnnnnnnnnnnnnnnnnnnnnnnnnnnnnnnnnnnnnnnnnnnnnnnnnnnnnnnnnnnnnnnnnnnnnnnnnnnnnnnnnnnnnnnnnnnnnnnnnnnnnnnnnnnnnnnnnnnnnnnnnnnnnnnnnnnnnnnnnnnnnnnnnnnnnnnnnnnnnnnnnnnnnnnnnnnnnnnnnnnnnnnnnnnnnnnnnnnnnnnnnnnnnnnnnnnnnnnnnnnnnnnnnnnnnnnnnnnnnnnnnnnnnnnnnnnnnnnnnnnnnnnnnnnnnnnnnnnnnnnnnnnnnnnnnnnnnnnnnnnnnnnnnnnnnnnnnnnnnnnnnnnnnnnnnnnnnnnnnnnnnnnnnnnnnnnnnnnnnnnnnnnnnnnnnnnnnnnnnnnnnnnnnnnnnnnnnnnnnnnnnnnnnnnnnnnnnnnnnnnnnnnnnnnnnnnnnnnnnnnnnnnnnnnnnnnnnnnnnnnnnnnnnnnnnnnnnnnnnnnnnnnnnnnnnnnnnnnnnnnnnnnnnnnnnnnnnnnnnnnnnnnnnnnnnnnnnnnnnnnnnnnnnnnnnnnnnnnnnnnnnnnnnnnnnnnnnnnnnnnnnnnnnnnnnnnnnnnnnnnnnnnnnnnnnnnnnnnnnnnnnnnnnnnnnnnnnnnnnnnnnnnnnnnnnnnnnnnnnnnnnnnnnnnnnnnnnnnnnnnnnnnnnnnnnnnnnnnnnnnnnnnnnnnnnnnnnnnnnnnnnnnnnnnnnnnnnnnnnnnnnnnnnnnnnnnnnnnnnnnnnnnnnnnnnnnnnnnnnnnnnnnnnnnnnnnnnnnnnnnnnnnnnnnnnnnnnnnnnnnnnnnnnnnnnnnnnnnnnnnnnnnnnnnnnnnnnnnnnnnnnnnnnnnnnnnnnnnnnnnnnnnnnnnnnnnnnnnnnnnnnnnnnnnnnnnnnnnnnnnnnnnnnnnnnnnnnnnnnnnnnnnnnnnnnnnnnnnnnnnnnnnnnnnnnnnnnnnnnnnnnnnnnnnnnnnnnnnnnnnnnnnnnnnnnnnnnnnnnnnnnnnnnnnnnnnnnnnnnnnnnnnnnnnnnnnnnnnnnnnnnnnnnnnnnnnnnnnnnnnnnnnnnnnnnnnnnnnnnnnnnnnnnnnnnnnnnnnnnnnnnnnnnnnnnnnnnnnnnnnnnnnnnnnnnnnnnnnnnnnnnnnnnnnnnnnnnnnnnnnnnnnnnnnnnnnnnnnnnnnnnnnnnnnnnnnnnnnnnnnnnnnnnnnnnnnnnnnnnnnnnnnnnnnnnnnnnnnnnnnnnnnnncccggcgcccgcgacctgcaccgtctcgttctgcacgaagaacaggtcgatgacccactggtagatgccggtccacccggcgcccgcgacctgcaccgtctcgttctgcacgaagaacaggtcgatgacccactggtagatgccggtccacccggcgcccgcaacctgcaccggtccgtaattctggacaaggaacagattgatcagccagttggtgatgccggtccacccggcgccggccatgatcatcgggttcgctgccgcggcggtttgcaggtcggccatcatcggatcgggcgagtcggcatagattgccgggtcggtcggcatgtccgccatgtagagcagcagaagctcaccggcgaaaaccaacgtcaataaaagtgtgaaatacagaaacccttgctttttcactgagttgctttggaaatcgaaagtgtgacgcatcttctttcctcccttgtggtggtcgtttcgggcaacccttgttcgaacaaagcacctcatcttcacacagggctgctgtgtgaaaaactcttgtaaatcaagagcttagctcataacatgctcttccgtcatgatgatgacgcgtgtgacggggaaataatttgcaattcctattccaagtctcgattccatggaaaaaaggattatctcttctacctggagagaagacccggacaggacagatataagcacttacgtttgtaactgattgtttttatagatattatttgctgcttcggctgaatcggatgaacgatcgaccatatccctttctaatccggggaaaaggcaccgttgtctggaaagctataaattttgtcaaaatattggcgtctggctcttgccatgacgtaatgacgattggatgacacactccgacgggaaaaaattgccgctcagaatttgccgggcgcctcttctccgctctggcttgatcgccccgttcgcatcttccggagccgccgccacccctcgatcaggccgatgcccgccagcgccaggaaccacggggtcacgacctcgcggaaaatctgacgcgtgtgaatcaccgccgccatcgctgagaaattgaggaaaaagtagagtgaataccggaagatcggcggatttccggaaaacgaaaaaaccacgccgagcagcaccagcagcgtcagcagggcatgcggttcgatcaaccagggggatagccccgcgctttcgacctttatgctgcgttcgccgaatcggccgaaccagaaagtgaaaatccgcttgccgatgtttttaatcgtccggcggggatgctcctggaccacctgccaggtcagcttgagcacgaaacgatttctcgccgcatcggtcaaactgtcccaattctccggcttgtgttcgtcgaggtaactccacccgatgccgtgcggcgccgtttccccctcatccagaaccgccatcagcatcatgaaacccttccggtcgtaaatatatgaaaatccatgttttttctgcatcatctggtagatcagcaacggcgtcgaaaagcaaatgaccaacgccgtcaacgaggccgccacccgccggcgcttggccggattgcgcaactgcagcgcccactcgccgagcagcaacgccagaaaaagcgtcagcaccggccgcgtcagttcggccagaccgaaacacaaaccggccggcagcatccaaggccagcgatgaccgcgccgaaccgtcggcagacagagcagcgcgatcaggaaaaagagggcgtgcatcgtttccggacgcagcgagcaagccgccgccacgctcggcttccagaacgtccagagacccgcggccagaaccccggccgcccggctgtgccagcgccaacccaaaccgaaaatcggaaaaaccagcagggccgaaagcaaagcctgatacagcagaaactcggtcgggttctcgaaccgactcagcgcgtaaggaagcagcggcggctttcgcgtatggctggtgcgcgcataagcctcgtcggcgtaaaccatgccctcatcttgggcgatcgaccgcgaaagcatgtagtacgccgcgtttgtgtcgatcggcgcgcgactggccggctcctgccgcaaccacaacgccggaaaaaacaatagcgcgggaataacccaaatccaaaatttctggaggatggggcgaaactgcttgctcaacggcggcgccatgtcagccccatctgcatttgctccccggtttgccaccccgccgtgagggtggtcaggccgggacgcggcgtgggaagccaatgggcggcgaccgccgtttccaccgacagcgccgatttccaccaggcaaccgtggggatgaaaaccgtcaaatcgtagcacggcgccggttcggcgcgacgatccagcaactccaggcgaaattttccttctttcgtcttttcccaggttccatcaatggcgacgccgtcgctgtccaacgcaacctcgggcagccagtccggcaacgcctcgccctcgacgatcaagctcgcccgcaggatcggaaacggcagatgcagctcgcgccgcccgaaaggtattcgcaaaagcaacgtgctccgcccggccggaacgtccttggcgccctcgcgcccggccagcaactccttctggctggtccattcgatccgccaggagtccccggccagcagagtcaattcgggatcggggcgggggggaatctgtaagtcctccaccggcctgtatttttcgattccgccccaggcgtgatcgaccgccgcccccagcagcggcggccggcgcgtccgaatctggtcgctcggccggccccggtccaacaccgtcgccgcgtccggcacgcggccgtcctcgtcgtaaaaactgaaggaatacaccggatcgtagacgtgccaggcgccgtcgtactcgatttccggcgccgcatggccccgcagataaacgatccgcgccggcagatcggccgctttggcggccagggcgatgattatcgccaggtcgttgcagttgccgtagccgaaggcgtacagcacccgccagggcgacatctccaggtccgtgacgcccggccgattgtcggccgcggccaggtgattgcgcacccactcgaccagcaccgccgctcggtcggccgcttccggcaactccgcgaccgccgcggcgacctgatcctcaaacgacagccaggggttgcggccgtcgatgctggcgaacggattgaccagcggctcgttgccggtgttcgcgatcgtcagcgccagcggcgccgtttgcccgaccggatgcacgccggccaaaatccgggttcccggccggtcgatcgtccagatgtcggtttccgttttccaccacagcccgtcgaaaagaccgatcccttcgtgcaccacgaaaatgaataaaatgatcgccacgctcgccagcgccagcgtcatccaggccagccggctcagcattcgttttttcgatcgcggcatgagcggcattctacgcgaaaaaccgggcactggcgaccggttgtcgccgtcaagaccgcgggcgtcgcaatggccgcggcctgcttgcatccgccggtaaaagaatccatgatgacgcgactacgaacaacggagctgagcgatggaatttctgcataatattccaatctgggtgtggattgtggccgcggtgctcattatcggcggatttttcgtgaagaaaatggaaatctacgtcatgttgatcgtcgtcggcctgggcatctacgtcctttcacagaattacgcctgccagttgttgaagtagccgccgtctggatgcgccgcgtcggtgccgcgccgtgtctgcggaaattccgcggaataggtgaatgtcgccggggcgtttgttgatttcctgatcgggtcgagcgttcatgaacaccagcgagaaattgcgcgccgatttgctggaaggtctccgcgacctgcacgcgcaggtggatcgccgcgccggcgaggtgctggccgcgctgaaccggccggtgcgttgcgggccgggttgctcatcctgctgtcaggacgaattgacggttttcgagatcgaggcgctgcggatcctggcggaaaacgcggcgatgctcgaaacgtccgcgccgggttccccggggcaatgcgcgatgctggacgaggcgggcgactgccgaatctatcaggcgcgaccctacgtctgccgcacgcagggcttgccgctgcgctggctggaggaaaccgacgacggttggcgcgaataccgggatatctgcccgttgaacgagcaaggcttgaacgtgacgaaattgtccccggccgcctgttacaccctgggtccggtcgaggaagcgttgcgcactctgcaaaaagcgctggccggcggcgccttggcgcgcgtcaagctgcgcgacctgttccgcaccccggtccgcgccgcgctgtcgggcgccgaacaatgaatttgaaatgcatggcgtaagaccgacaagcggaaagcgacactgaccggtctcccgcctccagtcttccagccttccgggggaaccattttcatgggtgtccccatcattccgagaattttctcatcggtaggggcgcatggcatgcgcccccaatgggcagacgcccggacgcaacaaactatgaatttggcgaagatagcgatccggtagttactcatagcaataactaccattcagtgttgcttttttggtttgtgcatggctccaaattaactgccggcaggcggatgtgggggaatgatgataatgacaatttaccggaagcggcagaatgcggcatggaaatcaattcagccagccattttgtctgtcatgggacaaatgttttagccaccacatcaaggaatcgccgattcgccgcttttctcggttcttgcgataatggcatctggtgtcacaccgcaaccatgagccaacgatgtctagcggaggccttgctttttcgtcgagttttcgcagtcgttgccgccacagacagtgttaaatatacgtccgattccgatatcgattacgccaacgaatggacaattcaggaaatcggttatcgctttgcccactatgtcactaaaacctcaccccaccgttacttcgtgggcgaagccttcttcaccgccgcagcgccgggggatgaggcgccgcccgttttggacatgagcgatttattaaacatcctacacctgaacttgctgggcgatccgcgatcgcgcatcaaaaacaatatctgagattaccaaaagaagtcggtcgtttttgggcgaccagctcgggccgccattttttcggtattgcatccgattgttgaaaaagcccatccctggcgctttcaacaacttgctaacggatttcgaaaatcagccagtcgtcgtcttcgaggatcggcgcacctaagagcccgaccagccggtcgcgcaggcggttttccaatgccataccgtcgcccgtgggatcaaaccgcctgccgcgcaaggcgcattgacgtcgattgacgaccacatgcaacacgccgcgctctttccaagccgccagcgccgcggttgagggcgccggcgattgctcgccccgcgaccagcgattgaaaaccgtcagaaccggatcgtcccgcgtcaggtccgtaaaagcgggcgactccagataggccaggtcccgcccccgcccgccgaccatagccttgcccgtcagcacgacgagcggcaggtgataatcgtcggaacccacgggcaagggaatgaaggctttgcccgaacgggtcgccagggcatccgtcgttcggtgatcgaaaaagggaccgatgaagggcgtcgcccgcacaaaaaccgccgaccaggccacggtcatgacgagcaacaatccagccacggccgtggaaatccaggcccgctccggacgcgcgcgcagggaaagaacgatgaccatggtcatcgccatcacggcgtaaggccaaaaggtatccggccaatacagccgattgaacgagggaaaccagttgtaaaggccgatgtagaccggattgcggaaaatataactgacccagccggcggactcccgccagatcgacagcgacggcgccggtccagcgaccagcagcgagaaaaacgcggcgatcatcagccaaaggcccgttttccgccaggcccgtaaacccagaaccagcgccgcgccggccaacgccagtaaaaagccggtctcgattttcgccgcccattcatgaccgaaaatgacgtgcaccgacccccattgcagaatcatcaggtgctgcggcacgggcgtttcgcgcaaggtccggttgtcgggaaacgccgccggccattcccacggggcgtcctgtccggccgtcaccgaacgcgccagcggcccgtaaaaaaccgccgcacccgccgccacgatcgcgatcaccaacacctgcagcagaaggtagcggcgcaggagcgttttatctcgccggtgatgcaacgcgccgtaaatcgtcagaaacgccgccagaaaaaagacgccgtacaggtgctgatagtaaccgcagccgtccaacagcaagaccgcgccggccgtcgcggcggccgcccaggtcggttttttcatgagccgccacatcgcccaaacggccaggggaatgaaggtcaggagaatctggggcagatggccgtcgcggaattccatgaacttgaacggcgcgaaagcccacaagaccgccccggccaaagccgggaaccggcggcgcaagatggcgcggaagaccagaaaggccacgacgccgtcaagcaacagaatgaaaaaacaccagagattgttggaaagcggcaacggcaacccggccaggaagggatagtagaacaagacgttgagcaccgatccgtagagcggagcgaccgccgtaccgaccggaaagaacaggctgtcggtttgccagagggaaaaccggccgtcgcccagggccgttttcacccaccagttccaccacagcgtaccctccgcgtcgcccttcccgccgaagatgccgatgaaggtatgctgcggatcgcgcaacatcggcaggcaaaacaccgtcgcgaggatcatcaggaaaaggacgctcagccaatcgcggcggttccatcggatgggtctcgattcaggcatacgcacgttaaagcaggtatggaagcgccctggcaagagccggcatcggtcaatccgccggacgctcctcggcgggaaggcgaccctcaaaggcgcctttccataaaccgatgaaaaagcgccgcgcattcgtgcccagattgcggatgcgatagcctccctcctgcacgacgaccgtgggcaggcgcagggcgccgatcaggcgaccgttgctttcgaagtccggcgcggtcagcgaccaggagcccgtaggatccgccttggcgggatcgagaccgaaggccactaccagaaacgtgggggcaaagtcggaaatccgcttgagcgcctttttcagatgggaacggtataactcgccttccagtttttccggcagcggaaagttgatgttgaatccctcgccctcgccctcgccgcgctcgtcctcgaagccggtaaaataaggataggcgaagcgcggatgaccgtgcagcgagacggtgagcacatcggcccggtcgtagaaaatggtctgcgagccgttgccgtgatggtaatcgatgtccagcaaggcgacccggccgtgacggctcaggtagtgcgcggcgatcgccgccgagttgaaataacagaagcctccgaacgcccgtttctccgcatggtgccccggcggccgcaccaacgcgtaagccaggcgattggtctccagcacgctttgcgccgcggtcagggcgcaatccacggcccgtcgcgccgaatcgtaagcccggcggttgagcggcgtgaaggtgtcgatgcagtaataaccggcccgcaccggcaggtccaccggcttcctggtcgcgttccgcaaggggaagacatagggatataccgatttgttttcgtcgatcttctcgcagacgcgatgcagataatccacgaaatcagcatcgtgcaccgccaggatatgacggttcgaaaaatggcgaatcggcaacggcgcgaacaaaccggtcgtcgcgagccgctcgtgaatggcgtcgatgcgggccggcgattccacatagccgcgctcgcgcacatggtggatgcgatgccggtcggtcatgaccagcgcgatgcgccggtcggcggccagatccgtcgcgacgggccggacatcctccggtttgatataacgcggttcgcgcagacgggtgggctcgtcccggaaagagcgcaccaccatcttgatatatttcggcggacacagatggctataccggcgctccaaaatggcccggacgatttgccgcgccgtttcccgccgcaagggacgacccgttcccaggtcgtcgaacatcagactcggcgggcagggatcatcctcgcggatcggcgtctcgtaccgcgtcccgatgacgggccgggcgccgaagcgctcgtagaatttcattcgcgccttgttttgcttgataaacgcttgatcgcgacagatcgccggttcatcggaaaggcactccatgaaaatgccgatcgcgcccagcagacgcgcttcctgacgcaaccgttgatacagcgccgcccccactccgccgcccgtcgcccgcggatcgacggagataaaatcgagataacaaaaaggcggcttggccgagtgcatcatcaaggcgaatcccgccagactgccctgccggttttccgccgcgaacagaatggtgcgcagccgatacttgatcggattgtgcaagtggtccgggatcgcctggacctcatcctcggagaccaggctgaattgttcccggagaatccgctggacctgctcgacgatgtccttttctctgggaagaacgacgtcgtaaatccgcctgattctaaacatccatgccccccgaatcgttcgccataatatagccggggaaagcgggaaaaaaaatgcgggacagccaaagcgactgatcccgctgaaaaaatggtgcggaaggggggacttgaacccccatggccttgcgaccactggaccctgaacccagcgcgtctaccaattccaccacttccgcataaatcacagaacaaatgcaggaatgtcttttacccgatcggcggcgagattgtcaagaaacatttcgccacgcaaaaaccttgtgaaactaaagcgaattcgctacattggcccagagcgacgatccgcgacacgcggcgcggcggacaaaccgatcaggtacaaaaagggagtctcgaccatgcctttcgctcggcgatataacccgctgttccttttcctgcccctcattcttctcttggccgtgggctggcacatcaccggttgcgggggtgcaaaggaggccgccgagaaggcggccggaccggaaacccctgtgccggcgccgacgaaagccaaggcgccggcggcggccaaggctcccacaccgaccctccctcccggcgaaaaaatcgaaggacaggtcaagcaaggccagacgctcctgaccgcgttgagcgcgaacggcgttccgggacgcgaggcctatcgactgtataaggccctgcaaaagatcgatttccccgaatggcgcattcatcccggtcatgcgttcacggtctggctggacgaggaaaaggcgaccggcctggattacttcttcgaagaaaacatcgtctaccaggtgcgcattcaagacgacgaattggtcgcccgtctcgtcgaggcggaggcaatcgccgtcccggtcgaggttgaggagtcgccggaagacaagctgcccgagcccaccggccaagcgaacaacggcgtcgtccaggaaggcgacaatctgaccgcggccattaccggcatcgacatcgatccgcaacagaccgaacgcatcatcaccgcgttgcgcaccatcgactttcccttccgcaacatccggcccggccagaggttcgtcgtttggaccgacgggcagggaaacgtcacggcctttgattaccagctcgaccgcgtcaccaagttcgtggtgcgcaccgtggacggcgcgctggtggcgcgccgggtcaaattggtcaccaccacgaaggtcggccgcctcggcggacgcgtcaacaccagcgtgtatcaggcgattctggatgaaggcgaaacggacaatttggcctcgctggtgtccaatctctttgcctgggacatcgatttttactccgatccgcgcgtcggcgattcctttcgcctgattttcgagaagtattacctgccgaacggcgaattcctcggttacggccgcctcttggccgccgaatacaacggcgaggcgaccgggcggaaattcgggtattggtacgacaccgcggacggcgaatgggacggtttctacgacgaaaacggaacccaactgcgcaagtcgttcctggtggcgccgctggacacgatgcggatcacctccaacttcggcatgcggatgcacccgatcgataaaaaacggaagatgcactacggcgtcgattacggcgcggccgtcggcacccccatctgggccgtggccgacggcgtcgtgctctcggcgggccgctccggcggcgccggcaacatggtgcatctggaacacgcgggcggctacgaaacgatgtatctgcatctgtccaagatcaacgtccggcggggacaaaacgtccatcaaaaacaaatgatcggtaaagtcggcaattccggtcattcgaccggtccgcatctggatttccgcgtcaagcacaacggcgattacatcaatccgcgacgcttgcgcgccatcgccacgccgctgaaaaagttgcccttcgagcaaatggcgcgttttcggataacgattgaggaaatgaaaccgcaattagccttgattccgctgcccgaaatgtccacttgacgccgtttccgtccccgcggttcaccgcacgtagacaacccagccgacaaccacgacgtacagcgccagattgacgatcatcgacttgtcgctgatcaacaccttttccagcgtgtaggcgccttccttgatgtgcaccaggtaaagatagcgaaaaatgccgtacaggacgaagggcacggtgtacaccaaatcgctcgaatgaaacttgtcgacggtcgtcggcgaacgcgtatagagggtgtacgcggccagcaaggcgctggtgatcaccgccgtcatctgatcgagcaggtacgtgctgtattcggcgagagtcttacggtgattgcccgcgtcctcccgcaaaacgcggatctcgagggaacgcttggacagcgcgatgaacagggacaacagcatcgtgcagatcaacagccaactcgagggccgcacgccgatcaccaccgcccccgccactacccgcagcacataccccgccgccaccgcgaacagatcgacgatgaccacattcttcagcagcaggctgtaacaaatcgagatcgccgcgtagaccgaggcgaccaggccgaacgaacggccgagcacaaacgaaccgaccagagccgccgcaaccaacgccagacttgcccgtagggcctgaccaagcggcaatcgaccggcggccaccgggcgatggcgcttgctggaatgcaaccggtcgcgttcccggtccaccaaatcattaagcaggtaacccgcgccggacaatccgctaaacagggcgaacgccgccagcgagcgcagcaggctgagcggttccgtcacctgcccggcgaaaacgatcggcgcgaacagcaagacgtttttggaccaatgacggggccgcaggctgttgagcagatcgcggcgccgggcggcggaagccgcatcatttgccaccttccggccctttcacgttcgcacccgccttgggggaaggcgtattggtcaccggcggcggcgtggtcacctcctccggcataaagccttcttccttgccgtcctcgagcgtaacgaaaagcctgccggaaaagatgtcgtagcgtgaaacgcggccgatccctttcggggtttgcgcccgcttgccgattttcggcaggccgcgacggaattcggcatacgtttcatgctcgtaggaaaggcagcacagcaggcgcccgcaaccgccggagactttcgttggattcaacgacaagccctgatccttggccatccggatcgaaaccggggtgaagccgctcagccattgcgcgcagcaaaagatgcgcccgcaaacgcccaagccgcccaggatcttcgcttcgtcgcgcacgccgatctggtacatttcaatgcgggtgcgcaagcgttgcgccagtcgccggaccaactcgcggaaatcgacccgtccctcggcggtgaaatagaaaatcaccttggtgccgtcaaacaggtattcggccttcaccaacttcatcggcaggtgatgctcggcgatggcctcgacgcaaatctgcgccgcctcgggctcgcgggccttgtattcctgcgcttttttcaggtcgtcgtccttggccttgcggatcaccttgagcggcggattcgaccgcttccattcgatgtccgtcgcttcgctcgccacgctgcccaaacgcgagccgcgctcgccttccacaacgaggatttcgttgagcgaaacgtcgaacgcctccacctcgtaggtatgcagcttacgcgaaccgggaaagcgcatttgcaccactttcatcgcggcaatctcccttcggcaaattcggtcggcgtcggcgacagcaactcgatcccgaggccggcggcaatcgccgccttgttgacattgcgttccaccaggcgtcgcgcgtacaccaatgcgccgattttggccgataactgcgcggttgtcatccgtcccgcgtagcgctcgatgtgcggcaaggcatcccggtggcgcaggcgccgttcgtcgcccgtcagccgccagaccaccgcatcgcgcagaaacgcggccagcagctcgatgccgtcgcgcaggtcggccgcggtttccagcaattgctcgccccaggccaggccggccgtcgtgtccgccgcctcggcttgcgccaacccctcgaacaaactcaggcgcggtcctttcagaaaagtcaggtccaacgcggcggcccgccccggcgcgccgccggccaacaacgccgtcagccggacgtccggctcggccaattgcaggtgctcgcggacgtaagcctccaccaattcgtcgggcaccaaaccgaaacggacggtctggcagcggctgaccaccgtcggcaacaactggtgcggcgccggcgtcagcagcatgaagacggtgcggtcgttcggttcttccagggttttgagcagcgcattggccgcctcgaccgtcaactgttcggcgccgtcgatgatgaaaatcttgaaccggctttcgtaaggcgcgtattgcgctttcttgatcacctcgcgcgcctgctcgatcaacaggttgtttttgtcctcctgtttgaccatttcgaaaaagtcggggtggttgccatcgagcagcttgcggcaactccggcaggcgccgcaggcgtcgtccggcagtgagaggcaattcaacgccgcggcgaaggttcgggccaccgtatgcttgcccactcccgccggacccgcaaacagataggcgtgcgccaccttgccctggcggatcgcctgccgcaacatgccgatcggtttctcatgaccgagaatgtcggcgaaaccgctcattcggcaactcccatgacttgatcgagaatcgcttgcgtactccgccacaccgtctcgatatccgggccggcatcaataacgcgaaaacgctccggatgaagctcggcgagacgcaaaaagccctcgcgcaaccggcggtgaaaagcgaggtcctcccgctcgaaacggtcctcgcgccggtgctcggccagtcgctcggcccgggccacggcgcgcgtcaacccttgttccaccggcagatcgaacagcagcgtcaaatcgggccgcaaaccgtcggtcgccgtctcattgagacgatccaccagttcgacgcccagcccccgggcgtaaccctggtaagcccaggtggaatccgcaaaacggtcgcacaacacgatttcgcctcgcgccagggccggtttgatcttttccgccacgtgttgcgcccgcgcggcgcaataaagaaaaagctcggccaggggcgtgatcgccgcgttatcagccgccagcagcacccggcgcaattgatcggcgatgggggtgccgcccggttcgcgggtcagcagcacccggcagccgcgcgcggccagatactcggccgcccggccgatctgcgtcgatttaccggaaccttccggcccttcgaaagtaataaacacgagcatttcctcggtgattcgcaaacgccgcaccctaccgccaagcaacgggtaaatcaagttgccgggcggtcagaatcccttttattcggacggaattggcgtgggaatggtctcgacggcataaaacatggtcgataatggcacgccgtcctccggcgccgtccaactgccgagcagcagaaacgttcgttgcccgtcgcgccaggcgaaggcgatcactttccggtcgcccgcgcccgcgccgcccgaaagccggccttcccgatcaccgatccgaagcggttgggcgatcgccggaggctcgatgccggccatcatcgccgccgcctcgacgagttccggcaacggctgcagacaatcgtcgccgacgatcagccgcaaaccggcgcggccggccggccggggcggcccgtcccaactcagatcatcgggcagaacgttccgcgcctcccaaccgggagcgagaaacaggcgcagaccatactcgggcaactcgacggccgtcaaagccatcgcttccggcgagggcaattcaaccaacggcggacgcgaaatcgcgcaaccggccagcaggaccagcacactgacgaccagcgggattctttttctcatcggctcattccttgatgcaaatccggctgaatatctcatcgagccggcgttgatcgtcgtccgcagaggcggtcatgataatcaagtagatcccccgatcgtgatccaccgcgaacaaggtcatccgtatttccggagtcacgttttgcatccccaccgcccggtgcgcaccgacgttgccgatcagcgccgtccagccgtccttcatccccttgtttttcaattcctcttcgattttcccgatcacgtcgctcgcctggagggccaacggatcgatcgaaatcagcatcgacgcctgtcgtccggcgtcgagcggcgcgatgcgcaacgcggcggtcggcgcgggcagccactccgcccgccagtcggcgggcacttccacctccagatgcaattctcgacattcatgaatgtgaccggttctttcgacaggcaccggcaggccctgatccttgtccgccggcgggcgaccggccgttgcgcaagcgaaggcgaaaaataaaagaaagaacggcccagaccattttatccgcacaattactccttcattgaggcatccaccctgatcttggcgcaaggcgcttttcctggcaagcacattgtcaagctttaaccgagacattacactatgtttctgttttacatcgaccggaaaggaagacgatgattctcaaacatctggaagccggaccgctggcgaccaattgctatattctgggctgcgaggagacgaaacaggccatggtcatcgatccgggcggcgacgtgccccggattctggcgatcctggcgcaagaaggtctgacctgtgtaacgatcttcaacacccatacccatttcgatcatatcggcggcaatgccgaattgaagcaggccaccggcgccgaactggtgacgcatcccgaggaagccaagcagatgggcacggtttcggagagtgcgcgtctcttcggcctgcgcgtcccgcccagcccgccggccgaccggacggtggtcgagggtgaggaaatgacggtcgggctgctgaaaggaacgatcctggaattgcccgggcatagcccctgtggtatagctttggtgctgccgggtcacgcgttcgcgggcgatgccctgtttgccggttccatcggccgcaccgactttcccgggggcaattttgcggcgctgacgaacgccattcgcaacaagttgtttactttaccggaatcaaccgttgtctggccgggccatgggccgcagaccacgatcggtcgggagaaaatgaccaatcctttcttctgaggggaacagcagggaggaacgatcttgctgaccggcaaaaagattatcctgggagtgaccggcggcattgccgcctataaaacgccgttgctggcccgattgttggttaaggccggcgctgacgtgcacgccgttctgacgaaaaacgccgcgaagctggtcgcgccgttgacgctccagaccatcaccggccaccccgtccatatcgaaaccttcgagctgttggagagcaaggacatctcccacaccagcctttcggacagcgccgatctggtgatcgtcgcgccggccaccgccaattttatcggcaagtacgccgggggcatcgccgacgatctgctttccaccacgttgatcgcctcggaagcgccggtgctgctggctccggcgatgaatccgcgcatgtggaaccatccttccgtcaaggaaaacatgaagcgcctggaggaccgcggcgtgcaccgcatcggtccggaaagcggcgaggtcgcctgtcgggacgaaggcatcggccgcatggccgagccggagacgattttcgaagccgctttgccgttggtggccgagcaatggctcagtgagaaaaccatcctggtcagcgccggtcccacccgcgaaccgctcgatccggtgcgctatctgtcgaaccggtccagcggcaaaatgggctacgcgttggcgcgcgccgcccatatcctgggcgccaaggtcattctggtttccggcccgaccaacctgccctgcccggtgggcgtcaagcgcatccaggtggagaccgcccaggacatgttcgaagccgtcgaggaagccttcaccgccgccgatgcgctgatcatggccgcggcggtggccgacttcaaaccgatggaaaaagcgaacgccaaatattccaaagacgagatgagcgaatcgatcgtcatgctgcccaatcccgacatcgtcgcctcgatggccgccggtaaagtgaaacgcatggttatcggcttcgccgccgagaccggcgacgcggataaaaaagccgttagaaaaatccagcgcaaaggtctggacgccatcgtcgccaacgacgtgtccgagccgggcatcggtttcgatcacgacgaaaacgaggtgcgcgtcatcttcgccgacggccgcgccgttcccctggcccgccagcccaaggaaaagttggcctttcatattctggaaacgctgttcaagccgatcgaataaacgaaacgattgccggacgccaagcggatcgcgtcaatccgctttccgcaggagtacctccaccagttccatgattgtgcgtaggaaagccggcgaaccgaacaaaacaaagcgcgccttccgcgtttcggggtggtaaataaggtcatagcgggtgggaccccatgccgggtccttggtgttgagcaccgcgatgaccgtgttggaaatccgcgacacttcattggaatcgccttcctcgatttccaacaccgcggaaacgctgatccgttctcccaacggcctttcgctgacaggctccgggggccggttcgccagttcgccatgggcataaatgcgcaggtcctcctgcttgatacgccaggcgcggccgattttatgcgccttcaatgcgccctgatgaatgaatcgcagaacggtcttgggatgaaggtccagaattttcgcaacctgttccactgtgtacatttcagtcattttaagctccttcgatatggagtatagagtagcattagggagcagtcaaggacataatcagagtattaattgtagcattatttttttaatgattaactctctttggccagcaattgcgccggattgaagccgatacgcaaccagatttccacgccgagcggcaggcaatcctcgtcgatgtcgaactcggggctgtgatgcccggcgaccaaacccccggccggattcccgcaacccaaagcgatgaacgcccccggcgccttttgctggtaaaaggaaaagtcctcggagaccatgcccggccggccggcaatcacccgttcggcgccgaccacctccgcggcaagacgccgcaggttggcgatcatgcgcggatcgttgaccaccggcggattggtttccgccacccattccagacgcgcctcggcgccgaaacccactgctacgccgtcgatgagacggcggattttctcttcgatcgccggcaaggcgtcttcgttcatgaagcggatggtgccgcccagtttcgcctcggcggcgatggccgtgcgcatagtgccgctggcgaccatgcccacgtgaataatcaccgggtccatcgggtccgttcccagcgtcatggcgctgcgcagagccacgatgatgtgggcggcgacggccagcgcgtcaacggtgtcgtcgggtttaccggcatgcccgccgcgccccttgatcgtcacgtcgaaagcctgggagccggccatcgccgggccggaaaccaggttgaccaaaccgaggggcagattggaaaagacgtgaatgccgacgaccgactgcaccacctccatgacgccctcgtcgaccatgaccttggcgccggtcgtttccggaacgtccaaacccggcggcggcgtttcctcggcgggttgaaacaacaagcgcacgtgtccggcgatctgctggcgatgcttggccagcaccgcggcggcccccaacagcatggccatgtgcgcatcatgaccgcaggcgtgcatcacgccctgattttgcgaggcgaaagacagaccggtgttttcgacgatcgccagcgcatccatatccgcccgcaacgccacccgcggccccgaacgaccgccgccgatatcggccgtcacgccggttcccgccacccggcgcggttccagccccatgtcccgcagccgttccgccaaccaatcgccggtttggcgctcctgccaggacagttcggcgtgttgatgcagataacggcgccattgcaccacttgcggctgcatgtccgtcgccaatttccgataattcatcgtcgcgcccccgggcttggatatgggaaacggaaccgacgccgaccgccggtcccgttggctgttcgggttttcgttgttacagcaattcgtccacgttgtcctggaccttgcgaatcgcttcgatgatgtcgtcgatgtccttcttggtgcccatcaggaagggataatgcacccagacggcttcttcgtaagtcgcctttttcgtgaccggcagatcgacggcgtgttcggcggtgatcgcctcgccgtaacgttcgcggatggccgggtaaaaatccgccgtgaccgggaagatatcgcgtccgggaagcggctcgtaaaaatcaccgtcgaaggcgacgccttccgccatcagcgccatcaggaaggagtcgcggtgcagacctttgaaaccttccggattgtacttgaagatgtattgataatggtgctgggcggtcagccgcggatcgcgcttgatggtggcgagacccgggatgcgctcaagctgctcgctgaggtagtcggcgttctgctcgcgcagccgagtgcgttcctccagcgattccaattgcgcgatgagcaccgccgcctgccattcgctgatgcggtagttccagccgaccagccagcctttgaattgatcgtaacccggttctttacgcccgcagttcaccaggctgtgtagcttctggttgaactcgtcgtcgttggtcagcacgatgccgccctcgcccgaggtcattaatttactcgactgaaacgagaacgatccgaaatgaccgatcgagcccagccccttgccgcgccacttgccgccgtgcgcgtgggcgcagtcttcgatgaccagcaggttgtgcttggcggcgatgtccatcaggcggtccatgtcggccgcgctgctgcccaggtggaccgcgatgatcgccttggtcttttcagtgatcttggcctcaacaatgtccgggtcgatcgtgtagtcctcggccttgacatcggcgaacaccggcacgccgttggtggtcaccaccgcgctggccgtggcgatccaggtgtagggcgtgacgatcacctcatcgccgtacttcaagccgccggcccgcagacacatttccagcgacaccgtgccgttggcgcagaccacgccgtatttcgcatcatgggcggcggcgaatttttgattgaattccttggccctggcattcggcgagggatatccgccccatttgccgctttccaacactttcagcaattcttccttttcccgttcggtcctcggcggccacttcggccacggagcggtccgcaccttggcgccgcccttcactgccagtttcgccatgactttctccttttcaccggaagcgccggttgcgcttttcaccctgacgtatttgaacacccattcaaagtcaagttgatctagtatgttaaattaaaacggattgctcgtcgagagccgttttatacgttcaggcgaattatcgccagatcatcccggccagcctgatcggctccagaatcttccattcccaagcgcggaccagttgtccgatcccgtagctggcgccgttggccaggaacgaagcggacagggccattaaaaaaggaagcggccgggcgagcgcccggaaggtcactgcctcaatacccgcgaccaacagctcaccggtggcaatgtaaaggggataaaccagatcgtgcgtcaaccgaccatgacttgcttcgcgcaacgcgccgggcagcaagtcgcggaaccagggtcgatcggccagatcgaagagtaaaccatagacgaacggccgccagacaaaccacagcaatggatgagtgatgaccgtaccggccatccccgccaaggcgccctgccagatcccgacggcccggtaggcaaagaggacgaagatcggcgtttccagcgccagggtcatcaaataggaaggcaaccataatccgagccagtgcgccgtatcgatgaaccgctccttttcccgtccgtgtgtctcgttgtttaccatgcgccggtcatgaaggccagttgcgccggcgatttgcccccgctccataaaacaaggtattactacaatgactttaaccgtaccggggcgcgatgcacgaacaaacttccttgcccctgccgatcaccacgccgcgccgccggcggcaggcggcgttctgcctgacggcgacaatcgccttcggcgccctggctgtgctctggctcatgaacaccgaatggtttctcagcaaattggcggtgccttatccgatgcgcttcatcgcggagaattatcgccaaaacctgatcgacttcccttacctcctgctggtggtgaccggagcctttgccctgttgtcggcgacgctgtgggaatcgagccggcgcccgaacgcctggccggattcgccgtttttcgttcttccctcctgggcgaccgctctgctattgaccgtcctgctgggccttgccgcctggttttcctaccggaactggctgcattggggaaaaccgcgttgggacgattactggaaattcggagaaattctcaattatctgtggcgtcacccgaccggtgaaaactgggcggcaatcaaacaaagtctgcaatcgtatccgcacgcggccagcccgctgacgccgctgttgatcagcctgttgctcttcctgcacgggaattcgttgttctggctgcaaatcctgaatttcgccgcgacgatcggctcgctgttgctgctgggccgcctcggcaaaaaggtcgctcccgcgctttcgttttggattttaggggcgctgtttctgaccaacgccgccacgatgcgcaatgccttcttcatccaactcgatgccgtcagttcatttttcgtgctgctttttttcgccctttggcgccgccggctggcgcggccgacgctgctcaacgcgatcctcctcggcggttgcctgatcctggcggtgctgcaaaaaacgacgctctttccgctgctggccgtgcccctgacggtcgccgttttcgaagccgcccgcgaccgaatctggaattggccgagcctgatcaaaaccgtcctgttgaccgtttttttgccgctgggagcctttctcgcttatctgtacggattcggcttcctgagtaatttcagttcccaagtggaaatcatggggaccggttggaatgaattggatttttctctttcccgcttcgtctttgcgaccggctttatgttggggccctacctgcccctgatctttttcgccgagccccggcgcgagccgttacatctgggactgctgctttttatcgcccttttctttctgagcatcgtcgcggtcaggggaccgttctggagccggtattattcgcatatcctggctccgactctgctgctggccgtgccgcatctctcccgcgccgccgtcaccggcgcctggcggccggttttgcccgcttacctgctgggcgtggcggcggtgcaatacgccatgctgctctggcatattttttaggaaaagccggaaaatattgtccaatatattttacttttgatcttttcgtcattagctttaattagaagctttggaggtggaagcatgccgagtattcgccggattatccgagttacacgatttacaccggcctatgaaggcgcgggcgtgcgtctgcgacgcgctttcgcccaccccgatccacacctggatcccttcctcctgttggatgatttcggctccgacgatccggcggattacatcgccggatttccctggcatccgcatcgcggcatcgagaccattacctacgttttgcggggacggatcgaacacggcgatagcctggggcatcggggcatcatcgaggagggcgacgtacaatggatgacggccggcagcggcatcatccacgaggagatgccgccgaaaagttcgtcggggctcaggggtttccagctctgggccaatttgccggcggcgcacaagatgacgaagccgcgttatcgcgaggcgaaagcctccgacattccccaaatcgaaatcgaccgtaaaattcggatcaaggtgatcagcggtaaggtcaagggcgtgatcggtcccgtctgcggcatcgtcaccgaacccacctatctggatgtccgcctcgatccggatgcccgccttacccacgagcttcccaaccatcacaacgctttcgcttacgtcgtcgaaggcgaggcatttttcaccgaaccggcgaaacgaatcgtccggcgcgggcatctggtcgtgttcgaccgaggcggagatgtgcggatcaccacggccgccgaaggggtgcgcttcttgctgattgcgggcaaacccatcggcgagccggtcgtctggcgcggtccgatcgttatgaataccgaggaagaggttcgccgcgccttcgaagaatacgaaaacggcgccttcattaaatcgactgtttgactttcccgcccagttgcgtttgtatttcgattaatttgacacccacatcggcatccatgcgggtcttgcggatcagccatgacgaaaatgaaggttgactatcacgactcattatgccgcctgctgctgccggcaatgcttttggctctgctgttggtttttgccggtccggcttgccgggaccggtcaagcggaacgcgaaccaagccgctgatcgacctgcagccgtgcccgcccggcgagccgccggaaggactggccgccgaggtcgatggtcgttgcggcgtctttgaggtttacgaaaatcgcgagacgaaaaccggcgccgtcatccgcctgcgggtggcggtcattcccgccctgagtcgtcattccaagcccgatccgctgttcatcctcgccggcggtcccggtcaggcggccacggaagtcggcccgctgttattgcctttcctgaaaaacgtcaaggtcgatcgcgacatcgtgctgatcgatcaacgcggcaccggctcctcgggcccgctggattgcgattttgaaaccgaagaagacctgctgtttcaggatcccgatccggatttggtcgagcaatgcctggccgagctcaagaaaggcgccgacctgcgccgctacaccacgccgctcgcggtggacgatctggacgaggtccgcgccgccctgggctatgaaaaaatcaacctgtacggcggatcctacggcacgcgcgtcgccctggtttacctgcgacgccatcccgagcgcatccggagcgtggtgttggacggggtggcgccgaccgatctgaaactgcccctttacctggccgtcgacggcggacgcgccatggaattgatgctttccgcctgtgaagaaaacccgacctgccaaacaacctttcccaacctgcgccgggaatggaacgaattgtcggtgcggctgaaagagacgccggccgttgtcgggctgcgccatccccgcaccggcgaagccgtcaccgcgaccatcaatcaagaggcgctggccgggacggtttttgccgctttatacaatgcggagctgacatcgctgcttcccctggctatccatgccgcccgggaaggcgattttcaaccactggcggccatttccaataccttgggcggctcggccgaaaacatgagtttcggcatgcatctggccgtcttgtgcaacgaggacctgccgcgcgtcacggccgaggacatcgcccaaatccgacaaagtccctttatggctgacagtcgtttacagctctaccggcaattttgctcgtccgtgccgcgcgttgagcttccggcggcgtattacgaaccggtgcattccgcgattcccgtgctggccctctccggcgagatcgatccggttacgccgccgcgctggggcgaggctgtgtgcggcaacctgagccattgccgacatctgatcgttcccggcaccggacacggcgtcatcgcgcaaggctgtatgccgcaaattattcatcgctttctggaaacggccgatcccgccgccgtcgactccgcctgtttggaacgacaaaaccggccgccgtttttcatcaatccttcgggctccagggcgcgaggcgaaccatgatcgatgtgacggacctgcgaaaacgcttcgggtcggtggtcgcggtcgacggcgtgaccttttccgctcccgacggccgggtaaccggcctgcttggccccaacggcgcgggcaaaacgaccacgttgcgcatgatctacggcctgctggcccctgacgccggtcgcatgtgcatcgacggaatcgacgtgctgggcgacatcaccaaggcgcagcagaacgtcggcgtgctgcccgacgcgcgcggcctgtaccagcgcctcacggcccgcgaacacatccattacttcggcaggattcgcgggctgaatcgcgccgaactcgaccggcggaccgacgagttggtcgaactgctggacatgcgcgacatcctggaccgccgcgccgtcggtttttcacaaggcgagcggatgaaagtggcgctggcccgggcgctggtccatcaaccgcagaacatgctcctggacgagccgaccaacggcctggacgtgatgagcacgcgggcggtgcgccaattgatccgcagtctgcgcgaccaggggcgttgcgtgctgttttccagccacatcatgcaggaagtctcggccctctgcgacgatatcgtgatcatcgcccacggacgcatcgtggcccagggttcgctagatgacatccgccggcaggcccgcgagcaaaacctggaagacgccttcctcgccttgtccgaggcggcggaggaggaagcatgagccggccgccgtccctgggcgaggtgatccgcgtcgtgttccacaaggaactcagcgacggcttgcgcgactggcgttcgatcatctcggcgttgatctatcccatcctggccccggcgatgatggtcttgattttctacttcatcgccgacaccaccgccgaaccagaacgcctggtcattccggtgaacggggcggaacacgcgcccggattgatcgactggctgaagaaatatgagatcgacacggttcccggccccgcggacccgaaaaccgcggtgcgcgacggccgggagcatctcgtcctggttatcccggaggattacggggacaaattcgccgaagcccaagccgtgaccttgcgactgtacatggacagctcgcgcaatcgcggccgcgccgacgtggtcaaggtctcccgcctgttgcaacagtacggccagcaatacgcctccctgcgcctgatcgcccacggcctgaatccagaagttgcgacgccgttgatcgtcaaggaaatggatgtagccgacgaccagcggcgggcgatcgttttgctgcacctgattccgatgtttgtgctgttgggcgccttcgtttgcggcatgcagatcgccatggacgtcaccgccggcgagcgcgaacgcggctcgctggaaccgttgctgctcaatccggcgccgcgccgggcgatcgccctgggcaaatggctggccacggtcgttttttccggcgtgggcatggccatcactctcgggggcagcatgttggtgatccgttatttgccgctggagaacctcggactccgcatcgatttcggcctcgcccagatgatcggcatcttcgccgccgtcttgccgctttcgttgctggcctcggggatgcagatgctcgtcgccacctacgcgcgctctttcaaggaagcccagacctacctgaccttactcatctttttgccgctgattccggcttactggggcatgatgttccccttcagcggccggccctggatgattccggtgccgctgctcggtcaggaagttctgttgacgcaggtgatcggcggcgaatcccccgacttattctcctacgccctggccggtctcacttcgctgggcttgggcctggtgtgcctctggtggaccgccctgctcttccgtcgcgaagagatcatcttcggaagataggtggaccggtaagcgcccgtgattcggtgcgatcgggactgcggcgcggtcgagtccattctgtccctctctcatctccggttcattccaggtgcttctgattacccggttccaggtcaatcacaggccaggcgttcggcggtgaggtcccagagcttgatgagagtggagaattgcggccggcgcccgcagacctccgcggccaattccggcgcatcggcccaatcatcgacgtactcgacgtgaaagaccgccttgccggcggcgatgaaggggtccagggcgtcgcattcgtcgtaggcgaggcattcctcgttgagcgcccaatcgaaatcatccaccagggcggccacctgctccaggtcgtttttcagaccgacggagaggccgcgcgcgcgggccgcgtcggccaggaagcggttgtaggcgagctgatccgcggcggtcagatcgaagccgctgtcgttggcgaaggcgtcgacgttgtcgggctcgacgccgtcgcagcccttggcgacggccagatcaaggcgggcgcgcatgatatcgcggacggcgtccaggcgcacgtcgagccaccattcgccttcccattcgtcgaggggctcgccgcgcgccgcggcggggaagtcatcggcgtcgggccgccagttttcgtaactgccggccgaaaaatagcagacgaccacgcggccggcggcttgcaagtcggcgatccggctcgtcgcggtttcgaagagatcgacgtcatacatcgccacatcgaacgagtcgtcgatttgtccggtaagctgccactgccaggtcgtgcgcggcgcgggcatccagacctcaccgccgtcgtcagcgtcatcatcatcgtcagcatcatggtcgcaggcgaaaaacgccgccgccgcgaaaacggcgaggcagacaaacccaaatcggacagttttctttttcatcggctatcccccgctcggttgtcgaaaagcccgccttggcctgtcggcatcataacggatcgtccgatcggcgcaaagcaacgcaaaaagtctttttcaaacgggagagatgcgatatactcgtcccggattgaaaaatggaggtttcaaatgaccgaccattttggaagtttcggcctcttcctcctgctgctgtttttcctgccggcggccgcctgcgacaacgacgatgacgacgatgacaacgacgcctcgcccggcgacgacgacgacgataacgacgacgcctcgcccagcgacgacgacgacaacgacacgctcggtccgccgcagatgcatacgccggagttggtcgacggccgggcgccggggcttttcggcacggcggtcggtttcctgcccgacggccgcgcggccgttgccgcgaccaggggccgcgcgctttattattatgtagtggacgaggccaaggcggagctgacctcggagccggtgaccgaatatgccgaggcgcccgatctggcgatcgacgcgaacggggcggcgcacctggtctacctgaacagcgccacctggacgatcgactacgcgacgaacgctagcggcgcgtgggtccgcgagtcgatcgaggcagtcgtgcccacctatctttatccgctcattttactggatgcggacgggcaacctcacgtcgcctacgtccgtcacatcacggacccgcgacaagatgaagtcgtctacgccgtcaaatccggcgctgcctgggaaattgaggtcgtcgacgaagcggaacacggcttcgagagccgcgcccagtttattctggatgcggaagggaacgcttacctgggctacaagaaggatatttcttaccgcatcttcgtggccgataacgccgggggcgcctggaacatcgaggaaatccggcaaacagagacggaaggaggtcagttcgccctggccctcgacggggcgggcgtccgccatctggcctattcccaaaacgattattattacgggagcagcgaactgatttacggcaacgacgccggcggcgcctggacgttcgagacaatcgactccgacgacaattacccgctgggcgcctgtctgcaattgcgggcggatgcgtcggggacgctgcatctggcgcacatccattacgcctggagcgatatcgatctgcggttgttcccgacgcagcgcgtgtacggcaaacgcgtcgcgggcgtttggcaactcgaagaattcgcgtcaaacgaccggtcgccggtgcagttatcgctggcgctgaacgccgccgggcaagcgatgatttccgcccacgattccgtcgcgttcgatctgtatctgttcgacaacacgaccggcgactggcgcacccggatgatcgaagcgggcgccgaccggggccagcgcaattcgctggccgtcgatcacgagggcaaaccggccgtgagccattaccagtggggcgacccggccctgctcctgaccagcttcaacggcgaaagctggcagaccgacacgatcagcgactccgaagtgtcggcgaattccaaggtggttttcgacagtcagaacgtcccgcacgtcttttacatcgccggctcgccggagaaattgctgcacgcccgaaaaaacgggaacgcatggcaaaccgaaacggtggtcgccagcaacttactgagcagcaccgtgagcgtggtcatcgcggtggacgattccctccatctgctgtatgccgatctgtcgcgggacaccttcaattacgcgaccaacgcttcgggtcaatggaccatcaccgtcgtcgagcccgacgcttatctgttcgacgatcacgacctggccctggacagccagggccgggtgcacgcggccctgtcctcgaactcgaatcataatgaaccgctgtattacgccaccaacgcctcgggcgaatggacgaagcggcgcatcgaatcgccgggcgaatgcgtgggccggatggagatcgagatcgacagcgcggatcgagtgcacatcgcctattacagccggtacgattacgagccacaggacgtctcctgggaatacgggatgcgctacgccagcaacgtcacgggtgaatggcaaaccgaactggtcaaggttcacgccggcatggcgatcgcgctcgccctggatcggcgcggtcggccggtcatcgtttttagcgagggcggccggaacaatatggattgtggcgatctgagcgcggcctggaaacaggacggcgcctggcagacggccatcctggatcaaccaggcgaagtgggcgattatctctcgctggtccgggacgccgacgacctcttccacgtctcgtactacggcgcccgcagcctttactacgcgacgtttacaatgaacgaatagcctgacgccgcagtttgacatgccggagcctgccgtgtaaattgaacattgaatgttcaattatcatggcaacgcacatgattgaacgcatcttggcccaaaaatgccgacaattggccggacagtttccggtgctcaccgttaccggtccgcgacaatcgggaaaaaccacgctggtgcggtccgtgttcaaggatcacgcctatcagtcgctggaactcccggatcaacgacggtttgccctggaagatccgcgcggcttcctcggacaattcaagggtccggtggttttggacgagatacaacgggcgcccgagttgttctcctatatccaggtgtcggtcgacgagcacccggattggacggggcattttattctgaccggttcgcaaaacttcttgctgttgcagagcatctcgcaatcgctggcgggccgttgcgccgtcctcaatttacttcccttctcgctggcggaactgtcgggacggccgggcctgtcgccgggattcatgggtcaggcggaattgaaaaatccgcaaccgccgaaaaccgacctgtttcagaccctgttcaccggtttctatccacgcattcacgacaagcatctatcgccgcgcgactggctggccagttattaccaaacctatctcgagcgggatgtgcggaacgttttgcaggtgggagacgccgaaacgttcggcagattcgtgcggctctgcgccggccgttgcggacaattgctcaatctttccggactggcggccgacagcggcgtttcccacaccacggcgaaaagatggctttccgtactggaagccggctttatcgtcatgcttcttcgtcctcatcatcgaaactttggcaaacggcttatcaaaagcccgaagctctactttctcgataccggcttattatgctatctgttgcaggtccgttccccggcggaactggttcatcgcgccgagcgtggtgcgattttcgaaagttacgtcgtcgccgaactgtataagaatttcacccatcggggggagcaaccgagtctttttttctggcgcgatgcggccggccatgaggtggatattctcatcgaccagggtaactccctgattccattggaggttaaatccgggcagaccgtggcctcggattttttcgacaatctacgatactggctacacctttccgggaaacagtctgctcccgcggcgctggtttacggcggcgagcaatcgtccaaacgctcaggctcggttgtctatccctggttcgcactgtaacaacgccgcgtcggccggcgaaagcatctgctttgtcggatcgggcgattgcgttatattcaagccatgaacgggctatcgaccgagaggcgacagaagcaggcggtcgggctggcttgcctgttggcggcttcgatgctgacggcggtttgcgccgacgacggggagcctggaacgacttcgtggccggacgggaacgacgacgacgtttaccagccgcccgacgagctgaagatcaccttctatgacgtgggccagggcgacgcggcgctgctgcgttttccggggggctcgacgatgctggtggacggcggcccgaacggggcgggggccgcggcgatcgtgccgaacctacgggaactcggcttggattacttggacatcatggtcgtgacgcatcccgacgccgatcactgcggcgggctggacgaggtgctcgcggcggtggcgatcggcgagttgtgggaaaacggcgagaccaaggatacgacggcctgggacgcgttttccgacgcggtggacgcatccggcgctccccggtgcacggtgtcccggggcgacgagcacacgatcgacggctgtcgcatcctggtcttgaacgccgacgagggttggagcgacgtgaacgccaacagcgtcgtgctttcgatcgactgcgcgggaatcaccctgctgctcaccggcgacatcaccgccgaggcccaggacgacctgatcgctgtttacgatgacgacctggcggccgacgcggtcaaagtgccgcatcacggcagcgccaatcgcgccgcaacctttccgggctacgtgaagccggaggtcgccgtcgtttcctgcggcgcggacaacccttacggtcatcccgacgcggcaacggtcgcggaatgggaagcagcgggcgcaacgacctaccgcaccgatcgagacggcccggtcgtcgttacggcccgggagggcagcatttccgtggaacaagagccctgaagcgagccggcatgaatatcgacgagcgcatcaagcaattcaccttcctgatgcagaaaattctgcacgacgtgaaccgcagttcgtcgcgcgagcagtacatcgagcgggtgtcccgcctgttgctgaccgtgttggacgtggaccggctggaattgcgggtgcgggaggtcgattggttccattggggccgggcggagcggcggggcgggcgcgtctggttcagaagctctcatgtcccctacccgctcgccttcccggccaagcgcctgccgatcgacgacaacgacagcgcctgggaacgtttgtgccgggcggttttcgtggacgagcgggatttcgcgccggggcatttcacggcggcgggcggttttttcagcaataacctgacggcgaccgttctatcgcctctctggccgggcggcgcggtgaaggcgccggacgaggcggaataccgctcggcggcgatcattccgctgcacatcgaacaacggcggctggggctgatgtgcgtggcgtcgcgccaggcggattttttcacggccaacctggtgcacggctacgagtcgctggcgggggtggtggcggccgcgctgtcgcaccagcgggcgatgttcgcgctgcagttgcgggtgaaggaactgagctgcttgaacgagatcgcccaggcgatcagccggccggacgtcgatccggacgagacgcttggagaaatcgcgcggatgatcggtccggccttccgttacccggaaatcgcctcgtgccggatcgaaacggaggaccgcgtctatctttccagccgtttccgcgagggggaccagcgcctgagcgtgccgatcgtcgtccgcggcagaccgcaggggcggttggaggtgaactacgccgagccgcgcccggcgctggacatcgggccttttcttcaggaggaggagcaactgctgcggacggtcgccagccagatcgccctgttgctggtggaaaaacggatcaagacgcggatcgtgacgatggcgcagcagttcagcgcgccgctcaaccgcattttgggattttccgagctgatgctccgggaggaagacgtgccggaacggctgcggtccgatctggagaaggtgcagcgtttttcgatggaagcccgcgagatcgtgcggaaaatttcctcgaccggcgatgagccgccggccggcgacgaggagcgggaatgagcgaagcgctccgtcaaacccggagtctgcgtctgctggtggcggaggaatccccgcacgatctggagattctggagcgccacctgaccgccgcgggccatcgggtgtggaccgcggtgagcgcgatggaaacgctggaattgctggaaagcgaggaagcggacctggtgatcacgggcttgcacattcccggaaagagcggcctggacctggtggccgagatttgcgtgaaccatccgcagtcgcgggtgatggtggtggcgaattacgcgacgatcagcggcgcggtcgaggcggtcaaggccggcgccgacgaatacctggccaaaccttacacgcgggaggagttgctgggggcggtccagcggatcgccaagctgccgccgcggaggccgagcacggttgcggcggccgagcgcgccttgtcggcgacggcggggatgatcggcgattctccggcgatgctcaaggtcttcgccaacatcgccaaggcggcgacgaccaacgccacggtgctgatcaacggcgagagcggcacgggcaaggaattgatcgcgcgggccatccattacaacggcgaccgctcggccgcgccgttcgtgccgatcaactgcggcggcatccccgaaagtctgttggaaagcgagttgttcgggcacgtcaagggcgcgttcaccggcgcggtggagacgcgggcgggctttttccaggtggcggacggcgggacgatttttctggacgagatcggggagatcagtccggcgatgcaggtcaagctgctgcgggtgctgcaggacaaggaagtgtgcatggtcggcgacacccggacgcggcaggtggacgtgcggatcatcgcggcgacgaacaaggacctggaggcgctggtgcgggagcggttgttccgggacgacctgtacttccggctgaacgtcatttccatccaggcgccgccgctgcgggagcggcaggacgacctgctgttgctgctgcaccatttcgcggggaaattcgccaaggaactgaaccgtccgacgccggaattcagcgaccgggtgctcgagtatctgcgcgcctacagttggccgggcaacgtgcgggagttggagaacatcatccagcggttgatcgtgatgagcgagggagcgtacatcgacgcgggggaactgccgatgcagatgcgctcggcgacggggggcggcggcgggtggcgcaaaacgctgccggaggtggaggcggagcacatcgccaaggtcgtgcggcaggtcaaggggaaccggtcgcaggcggcgaagattttggggatcgaccgtaaaaccctgcgggagaagatgaagcgttaccaaattgatgagacataattccccagtcggcactggggaatttcgccccactggggaatttctccccatctccattctccaatattaatcaatcccattctacatcgctttgcgcaggatttgaaaaaagtctttattaataataagttatcctttcaataaaattattgtccaatattgagtaatttggcacgccaattgtattggagaattgccggcgaatgaaacagtgaagaataacaaggagacgatcgccgtgttcaccctccgtttttctccagccgcccttcggccggcccgtacgccgcaaggcgtcacggcgatcgtttccggttcttcagcctcccaacgcatatccggtcgcggcccgttggccgtgaccgccgccccgccgctgctctgcggcggcaaccggggacgctggaccctccggcggcgacaagtcacgggagcggaaggcgcaaagcgcccatcaactcaccagaaagaaaccgttcaaaaccgatcggacgagagaagatacaaaggcgtttgcatgacctgcaagcatcgcgagacctgcgaacgatcgacgattcaagatggcgtctggcattgcgacaaatacgaatgataccgacttgggctattgacgatgtattcacgattcatccagcacagacgacttcagaaacacacgggtcaacccgatcccgccagacggacccgctcgacaatcggccaatggatcgttctctcgctgatcggattttgggggagtatggcgtcggtcgtccccgcatacggcggacaacccatcgacttgacgctcgccgacgccatctccctggctttacaggaaaaccgcacgctgcaggcctcgcaggcggacgtggaggccgcggcggccgaacggcgggcggctttagggcgtttcgggccggtgctgaagatggaaggcaacctgctgcaatggaacgacgcccatgaaatcgacgttttcgactatctcgagctgccgccgacggcggcggagatcgtggatttcatggtcggcccgatggaccccatcgccttgcgcgaggaccgcacgcacagtctgtccttaacggcaattcaaccgctgacgccgatgttttccgtctatcagggctaccgggcgcgccgggccggcgaaaacgccgcccaggccctggaaagccggacgcggcaggacgtgacctacaaggtggtcgaagcctattaccggctgctgtcggtggggcaactgcgccaggtcgcacaggcggcgacggacaccatcgccgcgcatgtggagcaggcgcgggacttcgaggccgagggattcatcgaccgcagccaggtgctgacggccgaggtggaattatcgaactcccaacagaacctgctgcgggccgaaacgggcgaggcactggcccgggcggcgctggcgcaactggtggggctgccgctggacgcggagatccgggccgcggcggacctgccggcgccgggcgatccgacgccgccggagttggccgccgcccggcgggaagcactgtataaccgcgaagacttacaggctctgggttggaagatcgaggccttgcgggcgctggaagacctggggtggtggcagatggtgccgacgctggccctggtcgggcggtacgaatggagcgaggggatcattctgtatccggaagaggaaagcttcatcggcctgacgctggaatggaacttctgggagtggggccgtaaatacaacgaggcccaggctgcccgggcgcgggcgcgtggcgcggcgctgcaacacgcggaagcaaccgaactgattcaattgcaggtgcagcaaaagcgacaggagttgcaatgcgccggggcgcggcagcgcgtggccgagatcgcggtatcgcaggccgaggagaatctgcggctgaagcaactccgttttgccgagaatctggcgacctcgctggaagtgctggacgcgcaaaccttgctgaccaaggcgcacagcgaccggattcaggcgcggttcgaggtgctggtgggccaggccgccctgcggctggccatgggacaggatcccgccggcggtgaagggagcgaaggcgaatgaacacgaggatggcatggggcatattgctggcggcttttctgccggcgttgttcggttgcggcggccgggagcaggccacgacattgaccggcctgatggacgcggtggagatcgacgtggcctcgaagataccgggccggatcaaggaactgcacgtggacgagggcgaccgggtggaggcgggacaagcgctggcggagatcaccagcgatgaaatcgcggcgaagctggagcaggtcgacgccatcaccgaggcggccaaggccaagctgaaaatggccaacaagggggcgcgcgaggagcagatccgggcggccaagcggcagatgatggccgcggagcaccaggtggaaatcacggccaagatgaagcagcggctggccaatctcttggaaaagaaggcggtgccccaagcgcagtacgacgaggtggaattcaagcacaacgtctcgcaagagcagtacgaaatggccaaggcgcaatacgaggcgtacgtcaacggggcgcgggacgaggagatcgaagccttgacggcgctggtgcggcaggctgagggcgccaaggccgaggtggaaagctaccagcgcgagacgacgcaaaaagcaccggtcgccggcgagatttccaaggtggtgctgcacgagggcgagctggccgcgacgggtttcccgattctgacgatcgtcgatctggaaaatcagtgggcgagtttttcggtgcgcgaagacctgttgccggggattcacaaagggcaacgcatccaggtcaccgttccggcgctggaccggacgctggaactggaaatttaccacatcgcgccgatggccgatttcgccacttggcgggcgacggccgagcggaacagctacgatctgaagaccttcgaggtcaaagcccggccgaccgagccgacgacggacttgcggccggggatgacggtgcgctggaccctggagtaagggccgatgcgccgccgcccgccatcgccgctgcgcctggccggagaggtggggcgcggctttctggcgcaggcccggctgctggcccggccgcgctacctgctgatgaccgccttgctgctggcgatgtcctggctggcgatggaggtttaccataaccaggcgatccgcggtctgccggtgctggtgatcgaccgggacaactcgaaaatcagccggacgatccgctcgtttctccacgcctgcccggaaatcgacaccctggaccaaccggacgcgacccgggaagaagggcagcggctgctggccgcgggccggatcgccggcctggtgtacctgccggagaatctttcctcggaaatcaagcaagggcggcgcggcacggccctgatcgaactggacatgagcaacatcgtgatggggaaaaacgcctacaaggccgtttcccaggttctgacgaccgtggcggtgggcacccagatgacggtggtccggaagttaggcgagcacaagagccgcgccatggccaaggtgctgccgattcgggtcagcgaatcgttcgcctacaatccggcgacgaattacggcatttacgtgatgcccggcctgatctttttcttcctgcacgtttacgtgctgattctgggcgtcaccgcctatctgccgatccatccggccgatgactggaaaaaacgtctgggcgcgtttttggcgattctgccggcgggaatgctgctcggactgaccttcttctacggctttctgccttacgagaatctggctccggccagcggaccgggggtcgccgtcgtcgcgctggcggcgtttatcgtgctggatttgctgatggcggcggcattcaacgcggtgattccccgcccgatcttcgccttcgaggcgacggtggtggtgggaatgctgtcactgatgttttcggggatcacctggccgccggacgcgtttccggcggcgatccgtctgatcggcgcctggattccgttcaccgccttcgcacagggattccaggcgttcatccacgcccccacccgcctgagcgaactgggattcatgttccacgccttgggccggcaagcgctgctgttcggcggagtgatcgcggcgggcgccgcggcgcggcggatcatcgtcgcggcgaggcggtcatgaagcggcggacgaccggccggcgacgggcggcgcggctgcggcgccgggttggcgcctggctccgggcgttcggcggggcgatgctggacgaatggcgttttgtggggaagcaacgggtggtgctggtgatcctgatggcgctgcccctgctctatccgacggtgatttcctatctgtattacgaggatcaggcgaccgagcggccgctggtgctggtggacgaagacaactccggcctgtcgcgccgcctgacgcgggcgctgcacgccacgcagggagtggagatcatcgcccgggagacctcgccggccgcggcgcggcaagcgttgcaggcccgtcaggccgaaggggcgatcatcattcccgcggatttttcgacacgcctcaaacaagggtcgaccgccgccgtgaagctttggctgaacacggccaacatgtacacctactccgtatcctatacggccgtggtggcggcggcgaccactctgaacggcgagatcggcgcacggtactttttcagcaagggcatgccgacgtctctggcgtcgcagcgtgtgtttccgatcaaccaggacgtccgctaccttttccatcccaccgccagctacggcaacttcctggtgcccggtatactgatcatcgtgctgcaacaactgatgttgatcggattatgcttttcggtgggtttgcgtcgcgagttgggcctggaggacgcgggcgaccggcggccgttcaccagcctgctggcccggttcagcgcgcagggggtgttttacctgggcgcgatgctgctgatggtgtttttcgacattccgctgttcggctggtcggtgcggaacgcgggcgttctgctgctggtgttcatcggcttttccctggcgatggcgccgctggtgatgctcacggcgcatttctgccgggatcgctacatcgcctttcaactgctgatgttcgtctcgacgccgctgttcatggtgtcgggtttcgtctggccgtcgtcgcagatgccggggtacatccaggcgctggccaaattggcgccggccacgccggcgctggcggcgctgcggaccgtcacgatgaaaagcccggagatcggggccgtagcgcccgatctgctgcggctgctggtcttgacgacggcctatttcacgctggccgtgccgctggtgcgctggacgcacttccgccggcaacggtcgctccaaccatcacttcgggaattctgacggctcgacggtcacctcatcgaccgcgatgaggggcacgttctcgccgccggtctcggcgagacgaagcagcacgcccttgagctgcagccggaccggcgcgaagggcgcgccctgctcggcgaagcggccgccgcagttttccggaatcagcagaaacgccttgattttctggccgtcgatgccgctgtcgtaaaggacctggaaagaaccggcgcggccgcgggatttctcggccggagtcaggatttcccgggcggcgaggtcggcggcgactttccccaggtaatgcaattcggcgccgacgctgattttgccgcccgcgtaccgttcggcctcggcgcgcaaggcttccagggattcgacgcgccggtaatcttccgcccgcgcataaacggtaaggagaaaaaacacagtcagcgtcgtgaccagcgccgatttttttttatcgttcacccttttttcccaacgcaacgaagacgctccgagggtaaggaaagcggcggggaaagtcaatttatcggcggagcaagcgggaaacgcgcctcgaaccaggcagcgaggcgggccgcgcacatccggtggccggcctcgttccagtggacgccgtcggcgccgcgcatcgtttcgccggagcgttcggcctcgaacacggcgcgaccgacgtcgtcgagcaagggcaggccggcctcgcgcgccagttgtcgccaggcttcgtcatagggccggtcgtcgtccacgacaaacaggaccaattgccccggagcgcaacgctccttcatcatgtccagcaagcgcgccgtgatgaccagggattccctgaagagcggatgggccaggccgtcgcgccggatggcgttttcgagttggggtctttttcgggcataaagcaggcgatcggcgcgcgagagcagatagtagaggaagcgggaatgatcgaaagccagcccgtacacccggcgcagatgccggcggggtacgcgttgaatgatccggccgtcgagcgtcaggaagggacggcgcttgttgttgttgtttttgatgctgcgcacttccagctcgtaatgattgttgatcaggtcgttgcctgaggtctggagcagcaccacgtcgggccggaggcgttcgacgtggcggtcgaggatcatccattcctgcaacgtgccgtagccgagggcgccgtaggcgaagacttccgcccggcccgcccagcgtgcggcgagtaatccggcgtaggttttatcgtcggagacctcggcggcgtgggtgaaggaatcgccgatgacgagcacccgcagccgtccagcggcttgcggatcgccggcccggcggaagccgtgggcgtcggtggagaaatcgacgggataggcgacgccggcggcgtcggttttcattttttggaagcggacgttttcccgggcgcgccagccgagatcggcatccgggacgatcaggagggaatcggggctggtcagcaagaggcgcagaacgatttccccggcgacaaagagaaacgccgcgaagagcagcaaggcgacgagcgtatagagaagtcggcgttttctggtcatgggcttcttttaccggagtggtagtccggggtaaagccattttcccagccgagggcggctgggccacatgcagcttttatcccagccgagggcggccgggccacattgcactcagaaataagtgtaggagaaggtgcccatccagagaaaggtgtcgtcgtagagggggtcttccttgaagttgtacttggcgccgagggagacgttgaagtggctggtgacgccgcgcagactgagcagcacggagttgatatcctgctcgttggtagtgccgcgcatcagttcgccctcgtattcgagcatcagttcgacgaaattacggggatggaggggaaaaatgacgccggcgtgcaccaggccgctcttttcctcgtaggcgcggtcgtcgacgcccacatcgcgaaagaccatggtgccgtcggccatgatggcgaaggcgtagtcggtaaaggccaggtcgttcagttccagccccatggcgagcatcaccttgaaaccgtagtacttgacgtcgccggtgcggtattccgtcgtttcctcgcggccgcccgagtatttttcctcgacgtcgcgggtgtattcaccggtcggcgcgatgccgcccagggcgacggcgaaggccggcagaaaatttttctgcttgaggaacccccatttgaaggttccctcgaggccgccgaggttggacatatcctgggtgtcgaaattgcggaccttggcgcccacgaggttgaagtggcttttaactttcaggttggtcatgacccagggaaccttcagggcgaactccaaaccgcccggaatgccgacattgaagaggaaggaatactcgcggcggtagtattccggcacgtcgctgtcctcccagagggcggcggcgccgacttcgaaggagccgggttccagagtatgggtggacgaagtgaccatcatgccggaaaggccgtagatattaaaaggcaaattattgattttgggtttgggcgcggcgatctgcccctgcaagacgtcttcaggaaccttatcgaattcctgctgggcccaacccggacaggcgagaaagataaaacaaagcgtgattagaatatacttagcactatggaacattaaggctccattcctcaccagccgactgtggcgctatcttggcacgtccggggcgcgaccgtcaacaggctcttccacccgggttgccggccggccgacggcggtcatttggtccaataaatcgcggacttcgccttccgcaccccgctcagccagttcgatcagtcgttgcaggctcgcctgaaagttcaggggcaaatcgcgcggtttgtcgaggcgccggattttttcatgggcggtgtcggcgatgccctccgcctcatcccagagttcctcgcgcagtttttcgccgggacgcagtccgacaaacttgatttcgatgtctcgctccggctcgaatccggaaagccggatgaggttgcgggccaggtcgaggatgcgcacgggttcgcccatttccagcacgaagatttccccgccgtcgcccatggccgcggcctgcatgaccagctcgaccgcttcgggaatcgtcataaaatacctggtcatttcagggtgggtgacggtgaccggcccgccgtcggtgatctggcgacgaaagagcggaatgacgctgccctcactggccagaacgttgccgaagcgcaccgagagaaagcgggttttatcctgccggcgggcgaggtccagcacgacccactcggccaggcgcttggtgcgtcccatgacgctcagcggccggacggccttatcggtggagatcaggacgaacttggcgacgccggtggcgacggcagtttcggccagaacgcgggtggcgcggacgttgttgatggttgcggcgacggcattggattccatcagcggcacatgcttataggcggcggcgtgcagcacgatgtccggccgttcgttggccagcaggtttcggaccaggagcggatcgccgacgtcgccgaccacgggcaataccgggatggagggccagcggtgattcaactcccaattaataaagaaaaggctgttctcgttgcgctccaggagaatcaggcgggaggggaacagcgaggcggtctggcgggccagttcgctgccgatgctgccgccggcgccggtgatcaaaacccggcggcccgaaaaagcgccgcggatgagttcctcgtccaggtggacggcctggcggcccaggaggtcctcgacgtccacatcgcgcagttgcttgatcgaaacctgaccgtcgaggatgttgccggcggcggggaccatgcgaaagcgcacgccggtatcccggaagcggtcgagcagatcgcgtaagtcgcggggccggagggcgcgggaggcgatgatgatctcatcgatgccgtgccgcagcatgatctggcccagttcggcgcggccgcccagcacggggacgccgtgaattttaaaacccttcttggccgagaaatcgtcgatgaagccgaccacctgcatattgagccggggattgccgcggatctgcttgagcagttcgacgcccatttcgcgggcgccgtaaatcaacacgtggcggcgcaggctgcgcggcggcaacttgctcttttcgcggaaagcgcgcaggaaaaagcgcacgccgccgagaaaagagatgcagatgaaggcgtcgatcaggaaaaccgaacgcgggaaacgggtgtagaaaacgaacatcaccagcatgatgaagacgagcgtgctgaccgccaccgccttgatgatgccgagcatgtcttccatgccgaagtaccgccaccaaccgcggtagagatcccagaaatagaaggcgacggcgcgcagcagcaggatcagcggcagggttttgagcatggtgtgcaagggccaactgttttcgacggtcagatcgaattcgaagcgcaggaggaaggaaagaacgtaggaaacgatgaccagggcgagctggctgaagatcgtcagcttacgccggtgacgcagcagccaggccccaaaaggggtgtcgaaaaaatggttgtcgaccggcagttccttttcgctcaccgacttcctctccttccgggcgggtatcatagaccaaccgggccggttcgcgccacctccccgacgaggccccagactggtcattgccgtcgtggtcggtataatggcggcgatttatcacggaggaaaaaagatgacgacagcggaaagcaacctggccgtctttatcgactttgaaaatctggcgctgggtttcaaggacaagaaaagcaagttcgaaatcaacaaagtgctggaacggctggtggaaaagggcaagatcgtcgccaagaccgcttatgccgactggcaccgttacgacgactataaaaagcaactgcacgaggcggctatcgccctgatcgagattccccgccgggcgatgaccggcaagaacagcgccgacatccggttggtcgtggacgcgatggacctgtgttattcgaaagatcacatcgacacctttgtgatcgtctcgggcgacagcgatttttcgccgctggtttccaagctcaaggagaacggcaagcgggtgatcggcgtggggatgaaagactcgacctcgaacctgctggccgacaactgcgacgaattcatttattacgaggacttgatccggcccgacacgaagaaggatgttttggacaaacggattcccgagaagaaacgcgaggccttcgaactgatgatcgcctcgatcaccgcgctggtccgtgaaaacaaggaaatcctctggagcagcatggtgaaagacacgatgaagcgcaaaaagcccagtttcgacgaatcctattacggctaccgcaccttttccgaattactggaagacgcccagagccacgacatcatccgcctgaaaaccgacccgcgcagcggcacctatgtcattgtcggcctcggttcccgggccagcgtcaacggcggttgatgttttcaaccttttcgtcggagatccttttctttcccgtgtggcggcgacacccttgccgtccgatacaaggttttcgccgtcatctttatctccaagcgggcgcccagccggacacactatagaaaaagggcggccttgagcgggccgcccttgttgtggaacagtctcagcagcgattattcaccgcaattgtcggcgaaacactgggattcgcatgcctggaaaatatccaccgtgcattcgttgtcctgcatcatgcaggtctgaacgcaatccattaatgcatcgacatcgccggcgcaggcagccacgaaaccgttgtcctcggccaggcactcttccatcgaagcatagtatcccggatcgcaggtattcacgacgtagtcgcaaatatcgttttcgagggtggagccgttgtcgtcgtcatcggccgcgtcatcgtcgtcggccgcatcgtcgttatcattgtcatcatcgtcgtcatcgtcatcgccgcaagcaatgccgatcgccaaggcaaaggcgaccaacagggcgataattgcataccatttcatcgatttcattagtaaagcctcctgtagtcttgattattcggtttcttggaatgaaagaacacattaccccgcagggttaaaggctttgtaatggtttttcatttaagaatcaagtcatttggctgcgactacgtctcaatataagatataaaatcattccactcaggaggcagataccggcgatcggccccatcaggcgcaccgctagtaggtcgagtttaccccgggaaagttccgccaggactccagccagcaggatcgccaccccgttcattccttgaatgaccaaattatagacgccgaagtaaaggccgatggaaccgccgccggtctcccgggcgcaagcgatgatcgcctcgccctccaagccaagaaaaatcgccaccatcggcccgcctaaggcaaaaaggagcatcgccggtccggaaccacggtcgtcgccaagcagggcggtcagcgcatacaccacggccaaggatacggcggcgccgacaacggcgcgctcccacccccacctggccgagattttcggagccagcaggaaacaagggatcgccacgaccagcaacggtcccaacagcaacgccaccagttccttatcaccgcccagcagatccaccgcgataaacggcgcggcggccgtcatgatggtgaaagacatctgcgatccggaaaacaacaggaccatggcgagaaaacgccggtgtttcaatactattctcagcgattggccgacagaaaggctttcggatgccgtagcctgtcgttttgctccaactcgatccggagcggcatagtagggtaaaatcatcagaatcaaggccggcaccgccagataaacggcagcccggaaaaagccccatctctgcaccagcaacggactgaccacaaacgccaggcccgtggccagcaataaaccggcgcccaggatgttcgacagcgaacgacgcaacttgtcgttatcattggaataatcgtcgataaggctccaataggggaccgcgtacatcgtgtaaccgacgacaaaaacaaacatgcccccgctcaacagcaaccagcgtaaactccgcgacatctccggcgaaggcaaaaaacacaacaacaatcccaacgaagggataaaaaaggagaaccacagcagactttgccgtcgatgcccgcgccgcacccagccgtcgctgaccatcccggcaaccgggtcggttgctccgtcgaagatgcgaaagaccagcaacaacgccccgaccgcagccgcagaaaacaaagttgctcggccggcgccggtcgagtccggaatttccgtggcggcaaaggcgatgatccattggtaaaaatagcgcaccagagccatgatgccgatctggccgcacaaataaaagaagcgtttcttgagattcaatcacctttccccggtctgacttccgcaggagcttattaaatagcgagggctcccacaatcgggagccctctgcgtttcacacattgaataggatggttcgcgtctatttctcgtccagcacgacaaattcgacgcgacggttcattttccgcccttcggcggtgttgttgctggcgatcggctgggtttcgccgaagcctttggcaatcagggcgtcttccggaatgcccttggaaatcaagtattggcgaaccgaatcggcccgttgctgggacagcaccaggttcttttggtcattcccgtcggaggaggcgtgcccttcgacgcgtactttcttgatttcgtactctttaatggcctgcgccacctgatcgagcaattcgaagctttcgggcaagatcaccgcgctgccgacccggaattggaccacttctttaatcaggatcttttccccggtcacttgcaccttggtgtattccgggcagcctttgttggctttggttcccggctggttcggacattcatcctgcaagtcgaggacgccgtcgccgtctttgtcgccgtccgggcagcctttcaactgctgcaggccgggttcgttgggacacttgtcgtttttgtccaagacgccgtcgccatcgttatccaactcggggcagccgtccttgtccttgtaattgtcgaaatcctcgggttgattcgggcactgatcgacgtcgtcgttgatcccgtcgccgtccgaatccttaacctcttcaaccttcttttccttctttccgcaaatcggctcggggaagtatttcaggccggcttccacccgatagtccgggctgccgtaaccattggtgatgcccgcgccgccgccggcgtgcaccgcaattcctttccagatgtgcacttccgctccggccaggaattcgatcgggtttttggtttcacgactccaaggctctttcagaatcgtgcggttatccagttcggcaaacaccttgtaacagggcgttccgaccactttccacgccagaccgagccggtggtccaactcatccttgatcttgtgctcgttcaaccggcgggtctcatcccgaaggatgaagtccaggttataggccaggatgaagtattcccattccacatcgacgattacgcccgggaaaaaggttaacccaccatcgctggttaagctgtccggtccgaaaacggggacgtccatgccggctttgagcgccacgcccaggatgtcctcattccgtttcaggaagctgtatttcagaaagaattgccagtcatcccatgcctgtgcgcgcattttagggatgaattggttgatttcctgttcgatataagcagggcctttaatcgacaggtccagggaatccaggatgccgaaagccgcgtaaaggttctgatcccatcggttgttgaccatatccatgaccgaatcctggtcttcggcccacatcagcggcttgttcatgaacacggagtagaaacccacgccgtatttcagttgacccaggttcgtcgttccccacacggagccgaagccggaattatccaggttctgatgccagagttgaatgtccatgccgacgtgatcggaataggcccaggtgacggcaaccggcagaaggatcagcaacgcaaccaacggcaaagcgcggcgcaacgccttttcgcgtttgcgcagcaggaacacgccgcccagcataccgagcatcagccagaaggacatgccgccctcgccgttctcggccacgctgcatccgccgccgccgccggtttcttctttatgcccgctgccgcagccgggatcgtcgtcttcctcgtcctcgccgccgctcggcgtcggggtcggcgacgggctatagtcgtcatcaccgccgggcgtcgagtcgtcgtcgccgggagtcacgtcgtcgttgtcgttattgtcatcatcgttgtcatcgttgtcgtcgttgtcgttgttgtcgttatcgtcatcatcgttgtcatcattatcatcatcgtcatcgtcatcggcgcagggatccggagcattcgcaaagctatcggtttccaaaccggtcgcatcgcggcctccggcgatgaacagaccatactcatcatcaccaccgcccgcggcgcggaaagtcgcgccaggcaagctgattccgcaatcggaccacagatcggccacgggatcgtagacatagcaggcatcagtcggcgtatccgtgctgccatcgacgccgccgtaaacaaacagtttaccgcaagccaccgtatagccggcgccccacaacggcagcggcatggcggccagcgtcgaatcccatgtcccggccgcgatgtcgtacgcgtccatcgtcgccgtggccgtggcggtcccatcgaaaccgcccgccacatagaatgtgccgtcaatgacgccgcccgccgaccacatccggccgatcggggccgccgtcagggcggtccaggcatcggccacgggatcgtaggaagcgaagttggtctggccgttgggccagatattcggcgttgtgccgcccatacggtacaacagcgttccgtctgtcgccgtcacgtagccgcccgaatcgttcaaggcatccgcgcccgtggtccaggaatcggttcccggatcgtaaatttggaccgcgttgatgacgacgccggccgtatccaggtcatgaccgccggggaaatagagctttccgtcgatggccacgcctccggtcacgtaaagattcacactcggtccgatgccggtgccccaggtgccggcgacggtgtcatagatgtacagattggtgttcggcgtccagtaccaggaatccgtggcgccgaaggccaggtagtattttccgtcaaagaaaaagccggcatggtcgaagaccgtcgtcgggatgttcggcaggacgttgaatcgtttgatcgccgtcgtggtcagcagcagttcatcgacgtagccgcccgtcgaagccgtcaccccggcggtatcggtgtcgccgcccatggcggtttcgggaaccgcaacggtgacttcaaaatccccggcggcgccgttggccacctcgatttcagcgggtcccgtcgtcggccagtcgaaaccggagtaggtcaggccgatgatggctttggagccggaattgttgaagaccgagagttcatagacgacatcggagccggccaaacccgaggcggcgacaacgccccccagataaatgcccggttcgttcgaatcaccgctgagcgtaatgtcgtcgattccccaataccaattccagcccccggctacgtatgtgaagcggaacatgacattggattgtccgttcagcgccggcagttcgtaaacttcgacgtttccttccacacttgcttcccacccctgcaccggaacccagttcacgccctcgtcgatcgagtagtgaacccaggccgtatcgccgctcaaaacacgaaagtaatggctgaagctcaattcaatgttgatgtaatccgagcaattgatcggctcggtgatcaatgaggtgttcatcgtggtgccgctgccgcaggcgtcggaattagcctcgacataatattcatcaccgaagtaagccaacggcagagtgccagttccggggctggtccagacgcaatcccctccgttgttcacattcgtccaatcctcaggaatgccggcactgaaatcttcagtgaagaaatccaccgcccaggccggtgaaatccaaagcgacacgagtaccaagaacaaggcaaattttttcattcttttcctcctggaatgatttccttcgttgtcgatcctcaacgagttttattcgtgagggtgcttttcacaatttttgtctcgataaagcctgtaatcaccacaagttgcaccctattatttttctataacacccttaagtctggcattacaatagaatctcttttactcaaatgtcaagtagagtttcaattttccacgacctgggaggacgaggaaattcagcgtttttgaatgtcccttcaagcaaaatcaagcttggcggctcattcgttagatgttaatgtacactgcttttcgaggatcaacagttacaaggacaatccatgaaacggcttcctttcttcctcctgctggtctttttgaccttcattccactgtcggccgcggcgtttacgctgctggacatgcaaccccaatacgatcgttacgtggttcatcccaacgaaccgctgaccctggtgttcgacgcttcgttggacgcgaccacggttgccgcggacagcgtgaccgtcgccaacctgctcagcggcgaggccgtgccgggaacgattgcgctggccgccaccaaccaggccgacgacacgctgattttcacgccgaccgcgggtgttttcccctttggtcgccggttgcaggtcggcctcaatgaatcgttgctcgacctgggcggcgccggcttcaccggcgagttgccctccgggggcgtcttcgtcgccaacattcccaacgacctggacgtcgtggcggattatctggaacaatgcgcctcgtactacggttttgatccgaccgatccggaaaacacgaatcccgaggaatattatcgcattccgggcatgtcggtgaccgaagcctggaaaatgacgaccggcgatccgagcgtattgattgccgtcatcgacgtgggcaacgagggcttcgccaacactgaatttgcggaaaacgtctttttcaatcgcggcgaagtccggcagccgcaggacgcgggcggcctgtgcccggactgggactgcaacggcgacggccgcttcaattatctggactatataaacgatccccggtttgcggatttcaatgaaaacggctggatcgatccggatgacgtcttcaccgccttcaccgacggcgtggacgacgacaacaacggcttcatcgacgacatcagcggctgggactttttccgcaacgtcaacaaaccgttgggcgttgaggaattccccgaggggacgcacggcgacggcatcggccgcggcgcggcgggtctggcgaacaacggccaaggcactccgccgggggtctgccccgattgctcgctgatgtggattcgcgtcggcgacgcggtggtcaccgagggcaatctgatggccgccggcatcgaatacgcgaccatgttgggcgtagacgtggtggccatcgccaacggcatgtacaactacagcagcctggcgcaacaaaaattcgtcgaggcttacgaagcgggcgtcttcgtggtggccgcctcgggcgacgagttgggcatgcaccaggtgtatccggcggtgggcgacgacgtgtacagcgtcaaggcggttctgcccttcgccccgatcgaacttttcgggccgatcgacctgtcgttgatcgccttcaccgaaagctactgcacgaactacggagcttccgtcgaagtatccatttcctccgaccaatgcacttccaccgctacgtcgtacggcgccggcttggccggcctcatcctttcctgggcgcggcagcaaggcgacgacctgacacccggcgagatcaaacaactgctcaatatgaccgtggacgacatcaagtcgcgttgcttttcctttaacctgggcggctgcaaggaaggcttcgaccagaacttcggttacggccgcgtcaacctcgaacgggcgctgcaagcgatcggcgacccgctgttcggcctgcccgaacgcattccgcccgtcgtgcgcggcaccagccccgcgtggtgggcgacgatggatcccctgcaacaaccaaccttcgacgtcgaggcgcagatcgacgcccgcggccggtcttatgaatggaccgtggaactgggtttgggcgtcgaacccgatgacgacgagttcttcgccgtgacctccggcagttccacgacagcgacggacggcgttttggcgacgatcagtccgctggattacgtggatgaggaatggctgcgccgcgatccgaccgacaagaacgactttaccgtaaccctgcgggtgcgcgcctggtgggaagcggacggcgaagaggtgctcggcgaagcccgcaaagccatcgcctggcacaccgacgatcaggaagggaccggcctgctgcccgggttcccgctggatctgggagcctcgggcgaatcgagcccggtgctctacgatctggacggcgccctggacaacgcgctggaaatcatcgccgcctcatcctggccgcgggtggaagtgttcaaacgcgatccggacaccggcatgtaccagccggcgcccggtttcccggttgatttggacgccgaccgcttgtttcccgattcggtgttggcttcggtggcagtcggtccgttattcggcgacggcgtgccctacatcatcgtggccggctactacggccgggtatacgccattcaccccgacggcaacctgcacgatggcggtcccttcctggagggctttccggtcgacaccgatgtcctggataactccacgccgttgagctacgggcacggcaacgcctattgggcaagtccggtgctcgtcgatctggatatggacgggcagttggaaatcgtcgccgcctccgccgaccaaaaggcttacgcctggaaaccggtcgacgaggatcaggacggctccgccgaccggctggccggctggccggtgccgttggattccagcgccgaagccggtctggttccctatttcgacagttgcgaggacagcggtccggccccggtgatgggcacgccggtggccggcattctggatccgactcaccagaacgccgacatcgccggacaccccgcgatcatcgtggccagcagcgagacgtgcaacgaaggtttactgcccaccggccgcgtctatgccatctattggaacggtttggaaaatgccgccggccccttcctccccggctggcccgcccagccgttggcgccgctgggcgacgcgctgccgattccgccgctgacgatcggcatgacctcctctccggcggcgatcatctacgacgaacaattgatggtcggcaccggcgcgtttttctggttcccgcagttgatcacctgggacggcgcggaaacgaaaatccgtcacctgaaatccaagctcaacctcggcagttcggccgccggagccttcgcccgtttcgacggttccgacataccctggtacttcttccccagcgtcggatttctgcaactggacgggaaggccgtcggaccggccctggaagccttcaacatcaccggctggaagctcagtgagttgaacgacgggcccgccctgcggcttcgactggacgacatcaacttcttcatcaatccgatcgtggccgatctcgacggcgatgccctgccggaaatgatggccgggagcggcggttatcggctgcacgcggtcaattaccgtaaggaacaaccggccgattggccgaaattcactcattcctggcaaaccggcacccccgccatcggcgatgtggacggcgacggcctccatgaagtggtgtccttcacgcacaacggcaagcttttcgcctgggaaacaaccgggaaatcgtgcttttacgacggtcccaacggcgattggcccaagtaccaccacgacgcccacaactccggtttttacggtttggacgccacgccgccgggattgaccaccgacctgaccgtttacttcaccgatgttgcggacgttttcgaagtgactttcaccgcgcccggcgatgacggcgcctgcggcacgccggacggctacgacctgcgctacacgaccgatccgagcgccgatctacgcgatccggacgtctggcagtcggccgccgcgctgaccaccggcgcgccggaagtcggcggaatgccgatgagctttaccgtcacggcgcccagcgccgcgctcttcgcgctgcgcacttacgacgaggtcggaatgatgtcctacatttcgaacgccgccgccccgaccgaaccgggcgccgatgacgacgatgccgcggacgacgacgatgccgccgccgatgatgacgacgacgacaccgtggcgccggccccctccggcgacgacgatgacgacgatgaagggtgcggctgctgacgcatccgtgagctgaaaaagtatcccgtgcggctgaagccccggcgttgaccgccggatctttatgccgtaccgcaacaggggaatgactattcacccactccttgcctgtttcatgggtttttatcgcccaatctcctgattttcatcgcacccagccacatttccatcatttttccatggttgcgtcataaaatttgcacatcgatccggtatttatgcctcgaaggaggtaaggacccatgaaatccggcgagaaaaattttttttgcacgacgatcgccttgctgatcgccgccctgatctggatatcctgcctcgggcgatattaccaccccaatccggccgattatcgcgtcgagacgggcatcgccccgaaagcacacgcgttggccgcgcgacacctggccatctggatggacgaggcgacgaggaatcgcgaactggcgcgaatgttcgaggtcaatcccgagtgggattttatgagccgcacctttttcgtcctggccctggccaacatggcgctgcgcgatccggcaatgcaatcgcaagccctggagatcatcgacacgattatcgacaataccctgcgcatcgaacgtgaacggggcttgtatcattttctgatgggatattcgaaagattcaccctgggtgatgcagccggcgcgcagccaatttgtcgacggcgaaatcgcgatcatgctggcggcgcgccggatggtggcggaaaagcccgaataccgggcgccgctggcggagcggatcgccgtgatgatcggacgcatggagcaaagtcccgtgcttttggcggaaagctaccccgatgaatgctggctgttttgcaatgcggtcggtctggcggcgatccgcatgtccgacgcgctggacggcaccgaccattccgccttcctgaagacgtggatcgcgacggccaaaaccaaattgctcgatccgcagaccggcctgcttatcgccgccgccaccgttcggggaacaccggcgcccgccggcgaacatccggaaggctcgaccatttggctggtcaaccacatgctgcaactgatcgatcccgatttcgccgccgatcaatatcgccgggcgcggctcgaactcggccgttccatcgccggcttcggctacgcccgcgaatggccggcgatgtatccgacgcaacccgatatcgactcgggcccgatcgtgccgttgctgaacgccagcgccggctccagcggtctggccatgatcggcgccgccgccttcggcgacgcggattatttcacccgattgctggcttcgctcaattttgctgctttcccggtggaagaaaacggtcaattgaaatatctggccagcaatccggtgggcgatgccgtcatgctatatgcgatggtcctcggcccgctgtgggccgaagtcgaacggagggccgaatcatgaattggtcgctattcaagccgctccgacgccgccgattggtggtttatccgatcatcttcttcgtcctcttgattgcggcgcacctggccggcttccgcgagcatttgcaggtgctgtccggcgcctgcggcttcgttccctggtcgatgtttcagggcgcagcttacttgatattgtattttctgtgcctgatcgcatcgccgatcatgctgctggccgccgccctctcggcgatggcccgaatggtgatccgccgctcatcccggtgaattcagcaactgcaggcgtcttcatcgtcgtcgtcgtcatcgtcatccgacggtgattcgtcgttatcatcatcattaatatcatcatcatcgtcgtcgtccaccgcgtcatcatcgttattgtcattattgtcattgtcgtcgttgtcatcgttgtcatcgtcgtcggccggttcgccgagaatgccggcctgttcccccaggtaggcgacgaccagccgcgcaacgttgttgcattgctccagatcgagacgttcatacgtatcgtcccagtgcataaagccgctgagttggtaggcgctgcccagaatataggcgtggtaaccgaaatcccagaaactggcgtgatcggacgagtcgttgccgggccagaccaccccgacatgcgccgtccccgccgggtagacgtgggccagttgattcatcacctgaagatcgggccaggagggataattggaactggacaacgccgcgttgattccctccagacgccagccgggcagatcgaggttgagcagattgcggatttcgtcctggcgattgaaggacgcctccgcatgcactcggctgcccatgtgaccgctttcctcggagtcgaaaaggatgaaacgcaaggtttgcgcgaaggtgtagtcgctcagcacccgcagggcttccaacacgatgatcacgcccgaggcgttgtcgacggcgcccggcgcgtaatcgggatcctgggtggaatccagatgggcgcccaccatccagatggcgcctggatcggtctcgcccgcgatttccacatacaggttgctgcaactcaggtccgtgcgacagtcataggtctccacttcgaaaggcaaaccgatttccgtcaaccgatcctgtaaaaaatccagggctttgtcgtgatccgggtggtcgatatcacggctgagaatgtattcgccgtgatagggatccacgccggtaagaatccgggcgtcggcatcgatgcgcgccgggtcgattttcccgtaagcgtcgaggatttgcggattggctacctgggcccgggcgattccgccgcccaccgccagacaaacgagcagcaaaagactccattgcacacatgaccgctccatgatccctccatcgaccgtcatttcattatcaacattcgctccagcgctctccgtaacattctaccacaacatcgccaagaaatgatctattcaaaatcgactttcaggaaaacatcggcagcttctcggcgcaggcggtcaaaggtcaataaatcgaggggcgtcgccaaacccgcatggttcaatctcccggacaggcattcccgggcgatcatgaccggcaggcattccatcggggcggcgccgtcccgcagcagcaccgtgccggtgcgcgtcgatccggctccatagaccgtgacggagagaagcgcttcgcggcggaaaccggcggcgacggcgcgttgttgttctttcacgttcatcgggcgcgcgatggtttcgatcaggcgataagcccatggccgcttctgcggctggagcaggcgaatcaacccgaagatccaggtcggttgctcgcccaaatagaaccaggtgtgcaattcgcgcaggggaaagcgtgcggaaagcgccggcgtggcgatcgtcgggacctccagcagccggagccggccgaacggaaaaggcagttcgacgtttttctgcgaatcgccgagccgcaccggctgatccttgccgccggataaggcgacggggcggtacccggcatccaaaacgccgctcatcatcgaggcgagtccggaattcgcataggcatgttgaaattgggcgaagatgatttcggcggccttcgcccagggcgcatcctccagaagtctggcggccagcagcgtcgatacgccgggaatcgcgcccgccccggtggccaacagcagcccgtttcttcgggcttcggcgtccaactcgcgcatccgacggtaatgcacctgttcattggcgcaatccacataggggcgaccgcactcgacggccaggcgggcgatcgccgcgccgtggacggcatagggaccgatcgcattgatgaccagggccgattgttggaaagcccgccgcaaagccggttggtcggtcgcttccgagatcagcagttcgatgcggtctcttccctcgctcggtaaaaccgccgtgagtttttcagggttgcgtccggcggcgacaactcggtaaggggttcgcttgatcaagccctcgacgatcgtccggcccgccagaccgttggcgcccaataccaaaatcgactggtcggaaatcttcatcggttcattgcacctgatgcgtcttccatcaacgccaaaccacattcaatcaatcccgtaccccgacaattgaacatagcaccaaacgccggccggcaacaggacatgaaacggggggagggaggggattgcgcggtacgggcttttcatttctcatctccagccggttgcttcacccgagtaaatgaagcttttcacctccgtgcgcaatggccgattaaatagcggctgccggcccgaaaaccggcagccgcgggaggaaatgggactcgtatcaacatcaggcgggcggcgtcggtgtcgccgcgtcgcgccccggcacgcactcagtcaggcttgcgtttgcgcaggaaagccggcacatccagatcgtaggcgtcttccgcggcacgcagatcgggtgtttctttttccttgagccgaggatccagcccccgcggcggattgagccgtgcgcttcccacgtttttcttgccgaaatcgggccggcggatctggggctcgcggcgattggccggcggctgctcgcgtccgccctgttcctcctcgcccttgaacggttcgggacggggaatgttttgggaggtgaacgccgcgtggtattcggactggctgacatgatgggtggagcggttcagataggtcggcaccgtccgttcgatcatctgttcctgggcttcatcaaagccggtggcgatcaccgtcacgcggatttcctcgcgcaggttctcgtcgatgacctgtccccaataaatttccgcgtcgcgcgagcaggatttcatcaccagatcggccgcctcgctgacttcggccagacgcagatcgaaaccgccggtgatattgatcaacacgccccgggccccgtcgatgctgacgttttccatcaacgggcaactgatcgcctgcgccgccgcgtccacggcgcgcttctcgccggtggcctgaccggtgcccatcagcgccagttcgccggagacgttggtcgccttcatcaccgagcgcacgtcggcaaaatccagattgacgtgaccctgctggacgatcaggtcggagagcgagcgcacgcccttgagcagcacgtcattggcctttttgaaggcatccatcaacgtcgtgtcgctgccggccacggccagcagtttttggttggggatgacaatgatcgtgtcgatctcatcgcgcagccgcttgatgccctcctcggcgacggtcatccgccggcggccctcataatggaagggcttggtgaccaccccgacggtcagggcgcccatttcccgggccagcttggcgatcatcggagcggcgccggtgccggtgccgccgcccatgccggcggtgatgaagaccatatccgcgccctcgagcacttcccgcagggcttcgacggacttctccgcctcgcgcaaaccgatttccggattgccgcccgcgccgagtccggagcccaacgacaccttgatgccggccagattgttggccaacacctgcttgtcggtgttgcaggcgatgaactcgacgccctgcacattgtcctcaatcatggtgttgatggcgttgttgccgcagcccccgacgccgatcaccttgattttggctccggcccgttccggttccacaatgttgaacttgagacccatgataacctcccttgttgggggcttttcgcccccgtgccgcgtaattcaaacagagatcacggacttcccaacaatccggtgatccttgatttcacaccttgcaacatccgggaaaaccagatcggtttttcctcgtcccagggcgtcagattgacgttgtgcaaacccaacagcaccaagccgacggccgtggcgttgccgggactggccaccacatcgaccaggccgccgatatgatgcggtagaccgatacgcacccggcggttgaaaatcgaccaggccacatcgtcgattccccgcaggtgacaaacaccgccggtcaggaccaccgcggcgacgctgcgatccaggtcttggcggataatttcctcgttgaccaattgcaggatctcggccacccgcgcttcgatcacctcgcacagcttgcaatgatcgatgagatgggtccggccgttggcgccggcctcgacctcgatttcgtcgcccgggatcgcttctcccggcagacaatggccgtaacgtttcttgagccattcggcgttggacgctgaaatattcatcatctgggcgatatcattggtgatgtgattgccgccgacgggcagcaccgccgtatgcagcaccgcgtccttcttcatgaccagcaaatcggtcgtcccgccgccgatatcgatgaccgccacacccatttcccgctcatcggacgacaaaacagcctcggcgctggccaacgccgaaaggaccaactgatccacatccacgtcgcattgcttgcaacactgccgccggttggccaaagaggttttcgagaccgtgacaatgtagcaacgggcttccaggcgcatgccgcgcatcccgatcgcattcttgatgccggagacctcgtcgagcatgtattcctggggcaggacatgcaacacctcggattcctccggaatcgtcaccgattgcgtgccttccacgacacgccggacgtcctccgccgtcacggtgcgaccctgcaacggcaacatgctgtcgctgttgaaacccttgacgaagctgttggagatgctgacgttggccgagcggatctgcacctgcgccattttctccgcttcctcgacagccttggagatggcttgggcggtcttgttgaaatcccgaaccacgcctcgccgcaaaccgacggaaggatgcgtgcccaggccgatgacctcgattccgcgatccgtttcctcggcgacgacgacacagattttcgtcgtgccgatgtccaatccgactactaattcgccgttcttgttcttcatgctcccgaaccccttcgcaggccgcgcaccacgaccttaccggccacggccaaatcgacgacacggacttgattcatttgctcacccaaatgctcggcgaccaaggaaaaatgcctaagcttgcgctcgtaatccccgtatccgaagtgcaccagcatccccgtttgcgcggtggtcaacgagaaaccactgaccgtatcgaaaccgatttcactgacgcgctcgtccggaaagacgccggtttcaccgcccagccgcaacaactgcaccgcctcggccacccgggcggcctgatggctggccgaagagccgcccgccgcgaaggagtcgccgcggaacccggtcagcacgggcaaatcgatcggatcgccgctaccctgccgcttgaaaacaacgccgcgctcgtccaccagataaaggccgccggcgtgcagcaacgccacggcatgccgctcccggatgtcgacgaccatgccgtcgggcaattcgcggcgcacggtggcagcttccacccagggatgcgaaacgacacgctgcgccacgtcgttcagatccactgaaaaaatgttttgccccagccgcgtatgcagaaagtccagcagttcctcgcgcgacacttgctcttcggtccggacgtcaatccgggtcagacgaaagtgatccgcataacgcgtttgatgccagacggttagcccgatcgccagcagcaacaccaccggccaggcccgccaggcgtgggctttaatgaacgccgccgcccaatgccaaaccgggcgcaacggtttggcgacacccgcggccgcccgtcgcagggtcttgaccaggcgcccccgataatttttgggaggcgtccgccgcttattgggtctggttttcgcgcgcctcgacattgtgctccaccgtcaaaccggcgactcgattttcaagcgcgccgtgttcaacaccgtttccaccaactgctcgaacgccatcccctgccagtcgcgggcaatcatcggcaccaacgacaattcggtcagaccgggcaaggtattgacttccaacaaccaaggctgcctctgttcgtcgaggatgaaatcgacacgcaccacgccctcggcccgaatcgtttgggcggcggcgacggccaggttctgcacctgggcgacgacattgtcgtccaaaccctcgggacgggtgatgtagtcggtcatgcccttggtgtatttgtgccggtaatcgtaaaaagtaacgctttcgcccggcaacttcttcgggcggatttcgaccaggccaaacgcctgttcacctaaaacggccacggacaattcgcgcccgggaatgtactgctccaacagaacgcattcgtcgtagcgaaaagcttccgtgagcgctttttccagttcgtactggcggccgacgatggcgatcgcgacgctggagccctcggcggccggtttgacgaccagcggccagccgaaaggggattccatcaccccattgcgcggtccgctccgccgcagcgtccaatacggcggcaccggcaagccctcgtcctcgaacagttttttactcaccaccttgtccatcccgatcgccgaacccagcacgccggggccggtatagggaatccgcaggatttccagcaggccctgaacgcagccgtcctcgccccacttgccgtgcaaggcgttgtagaccacgctgacgccctcggcgacaagaagcgcggctgtttgttcattcagatccagctcgaccacatcgtagcccgtgtcccgcagcgcccgcgcgacagcccggccggtccgcagcgaaacctcgcgctcggaactgggaccgcccatcagcacgcccacttttttattgcgatacatcacgctctccccaaatgatcacttcgggttccagccagatcccggtttgttcgaagacgatctgacgggcttgttcgatcaacgccagcacatccgccgccgaggcgccgccctcgttgacgatgaaattggcgtgcttctcgctgatccgggcgccgccgatccgccgccccttcaagccgacggcctcgatcagccgcccggcgtaatcgctttccggattcttgaaggtcgaaccgccgctgggcagttccaggggatagcgggcgcgccgccgttcgattgtttcctccacccggcgccggatcctttccgctgcaccgcggcgcaaggacaaaaccgcctgggtgatgacgtacgggccgtccaaggccagaccgcggtaacggtaaaccagctcggcgcggggcaatcgccgcagtcgcccttcggcgtcgactatttcaatctctgcgagcaccgaggcgaaatcgccggcgctggtgccggcgttcatccgcacaccgccgccgatgcagccggggatgccggccagaaactccaggccggcgatgccttgttccatgcagcgctccagcgcgatttccatggacaggccggcgcccaatgtcaggcgtacggcgtctctggcttctgtggccgcgaattccgtaaagttctcgcgcatcaggatcgtgacgccgcgcaatccgccgtcgagaaccagcagattcgagccggcgccgatgacgcgcgtctgttgcccggccgccagtgaccagcgaacgatcttggcgatttccaccgccgtttcgggctgcaccaggcaatccgccggaccgccgacgcgccaggtcgtcaacgaggccatcgataccccgaggcgacaacgcgcgccgagcaattcggtcaattgcctttgcagcttcagatcgatcacgctctctcccgcttcaaacgttcgaccaaccgcgcggacaattgattcaaatcgccggcgccgagggtcaggatcaagtcttccggttgggccgccgcgatcagcaaatcgagcatctcctgttgatcggcgacataggttacatccgggtggcccatcgcccggatgccgtccaccagcttgcgcgagttgacgccttcgatcggcgtttcgctcgctgcgtaaatatcggttaccaacagcttgtcggcctggtcaaaagcggtgagaaactcatcgaacaggtcctgcgtccgggtaaaacgatgcggctggaaggcgacgaccaaccgccggtcgaagccggcgcgcgccgcggagagggtagcgcgaatctcggtcgggtgatggccgtaatcgtcgatcaccaggatgttgtcgatctcgccgatgcgctggaaacgccgccgaacgccggtaaacgaactgagcgacttggcgacaatctcgaagggcacaccgagctcgcgggccacggcgatcaccgccaccgcgttttgcaccatgtgccgaccgggcaacggcagcaccacttcgcccagttcgccctcgcggttgctgaccgcggtgaattgcgtctggaagtcatgctggcggattttcacggcccgcgtctccgcctccggcgacaggccgtaagtggcgatgcgcttgcgcacgcccgggatgatttcgcggacgctttcatcatcgatgcacaacaggcagagcccgtaaaacggcaccttattcagaaactccagaaatgtgcggcgcagttgctccattccagaatagtgatccaggtgttccagatcgatgttggtgacgacggcgattgtcggattcaacagcagaaaactgccgtccgattcatcggcctcggtcacaaaggtgtcgccggcgccgagtttggcgttggagccgatggcgtcgacgcgcccgccgacaaccaccgtcggatcaaagccggcggcgcccaataccgtcgccagcaggctggtggtcgtcgttttaccgtgacttccggccaccgcgacgccgtattttttcatccgcatcagctcggccaacatttcggcccggggaatcaccgggatcttggccgccttggcggcgatgtattccggattgttcgacttgatggcgctgctgatcaccaccacgtccgcgtcgtcgatgaacctgctttcatggccgtgatgaatccgcgcgcccagacgctccaggttggtggtgatgtcggtttcccgcaggtcggacccggaaactctaaagcccaggttgagcaagatttcggcgatgccggacatgccgatgccgccgatgccgaccaggtggatgtgttccgtcataccaagcatgttcattctcccgcttccgcttcttggtggcgcatcgccagcaggttgaccacccgttgtttgccggcggcctcgcctcgcgtctgggcgacagcgaggatgatgcccatcaggatgaaattgagcagcgtgttcgaaccaccgtaggaaaaaaacggcatggccagacccttgttcggcaacacggacatcaccaccgccgcattgacaatgatctgcagtcccaacaagcttgccgcgcccaccccgcaatatcgcaggaaggagtcttccacccgcatcgtcagacggatcgagcgccagacaatgaaaaagaagatgcccaacacgcccagtaatcccaccagtccgaattcctcgcccaagttcgccaaaatgaaatcggtgtgaatttccgggacgtaatgcgctttttgccagccgttgccgaaaccgacgccgctcagcccgccggagccgatggctatcttcgcctgccaggcctgccaattgacctgatagagattctgatccggattcagatagccccgcagccgctccatccgccaggatgaggtgaggatcgccagcgtaacgaatgtcacgcccgccgcgcccaggatgcccagggaactgagacgcgccccgccgatgaacaacatgacgatcaacaaaccgcagataacaaccgcgccgcccaggtccggctctttcgccaccagcccgatataggccgtgacgatcagggtcaccggcagcacgccgaaaatcaaagaccgaatccggtcctggcgcaccgccagataatgcgccagaaacaacacgaggaccgccttggtcaattccgagggctgaacattcagccccccgcatttgaaccagcgatgggcgcctttggcttccccgccgaaggccggaacaaagaccaacaccaacaacaacaacgccccgcccatcaaactggaaatcaacaccttattattgaaggctttcagatttattcgggtgatcaacagcatgaaaaacaatccgacggccacgttgaaactctgtttttccaagtaaaataccggcccgtgtttcatcggctgggtgacgctgtaaatggtgagcaagccccagaccgccaaacccagcaccagcgtcaggagaatccgatccaaaccgggcgcccgctgttctttgactctgttcattgcgcctccacccagcggcgcatggcctcgccgcgctcctcgaaattggcgaattggtcgaagctggcgcagccgggcgacaagagaatcgcttcgccggaccgcgccgcggcgcgcgcccactccaaggcttcggccatgggcccgacccgatgcatcgccgcgtcaggaagcgccccggcgatcaactcggccgcttcgccgtaagccaccaccgccgcgcatttttcccgcagcagcccggccagaaccgtccaatccgttcccttgtcccggccgcccagaatcagcacggccgggcgatccagcgccaacagggaagtgcgcaccgcgccgggcgtggtggccttggaatcgttgatgaaccgcacaccctttttctcgcccaggtcttccaggcgatgcggcagaccgcgaaattcgaccatggcgctttcaatcgccgccggatcggccccagccaacgtcgccagcagcgccgcggcggccaggttttcgcggttgtgccgtcccggcagacggtaagcgcgcaagggaatccgttgctcccgttccgttagtcgcaacaccagatcctgatccgtgcaaaaggcgttcgcctgcaggccgttgaacgtgaacagccggcccggcaacgatccggcaaagcgcatcaccccggcatcttccgcattgaagaccgccgcgtcgcccggcaattgccgggcgaacagtcgcattttggctgcggcgtaagcggtcatatccgggtagcggtcctggtgatccgaagccagattgagaaacgcgccgatgatggggcgcaattcaacgatggtttccaattggaagctggacaattcgacgaccgccagatcgagcgtcgcgtcatcgagcagcgcctcgctgagcggttgcccgagattgccgccgacgaaaacccgcttgccggccgctttgagaatttctccggtcagcacggtggtggtcgatttgcccttggttccggtgatgcccagcagcggacaagacagttcgccgaacgccagctccacttcgccgatgatccgcgcgccgcgttcgcgggcctgcgtaaaaagcggctgggccagcgggacgccgggactgatgacgatcgtgtcggcccaggagaaaagctccggtgtatggccgccccattccaccgcttccaactcggctcggatcggctccaacagactgcgcaacttcggattgtcgcccgcttcgctcaccgccacccgggcgccgcggcgcaaggccagccgcacggcgtcgcggccgctgcgaccgtaaccgacgacgagcacccggcgccctgtccaatccatcagatttcttcccccttgaggccgcggaccacgcgctccatgcgcatcccccggctgcctttgaccagaatgacatcgccgcggcggccgtcgcgccgcaactcggccacaatcgccgcatggtccggcgccgcgacaatggcggccggggacattttttcctcgcgcgctccttccgccaccaggccggcgtgctcgcccaggagaaacaaccggtccaggccgatcttggccgcatggcggcccaggcgccggtgagccgcctcggtttcggggcccagttcgaacatgtcgcccagcacggcgatcttccgcccttctccggccagttcgtccagcgccgagagggcggcatccatgctgcggggattggcgttgtaggtgtcgtcaatgacggtgatgccgaagatgctcagcacccggctgcgcatcgccgccggccggaaggtttccaagccttgtttgatcgccgccggcgacacgccgaaagcgcgggccgcggcggcggcggccagggcgttatacacgttgtggcgaccgaaggtggagagtgccacgtccaacggctcgcccagcacgctcagcgacaggtcgatgccttcaaagcccttggtccgcaccgccagggctttcacctgcgcgtcggcggcgggatcggccgagaaatacacacagcggaaaggcttgtcttgccccatgcgggcgactcgcggatcatcggcgttgagcaccgcaatgtgatcggcgccgaagccttcaagcagttcgcccttggcctcggcgaccgcgccgatggttttcagatgctccaagtgcaccgcactgacgttggtgatcacgccgatggtcggccgggcaatttgcgccagccggcggatttcaccgcgcatcgacatgcccatttccaacagcgccacccgatgcgcggccgtcaacctgaaaaccgtcaacggcaggccgatcaaattgttgaagttgccctcattgcgcagcacccgaccgggcagatgcgcctctaatatttgatagagcatctccttgctggtggttttacccgtcgagccggtgacggccagcacgggaatcccccgccggtccagcgtccagcgagccagatcgcccagggcttgcagcgtatcgtccacccggatcaccgccaagtctttcggcgccggggcggtgagcgttcgactgatcacgacgccggccgcgcccttggcgatcgcttgctcgagaaagttgtgaccatcgaaattgggtccggtcagggcgaaaaagcactcggccggcagcacctgccgggtatcggtgcaaattccggaaaacggctggtcggctcttccggcgatcaattcaccgccgatggcgcgactgactgtttccgccctatacagatcgtgcatcagctttctccgaagcggcgggccaatgccgccgccgccatttccgtgtcgtcaaaatgaatacgctgagatccgaaaatttgataatgttcatgtcccttccccgccagcagcactacgtcgcccgcctcggccagatcaatcgcccaggcgatggccttggcccgatcgggctcgatcgcgtaagccggaccttcctcccaccgcggcgactcaccggatttgaggaatcgccggccgaccttctccacgccggggacgatcatgtcgatgatcgcctgcggatcttccgaacgcggattatcgctggtgatcagggtcaggtccgcctgctgggcgaccgccttgcccatcaacggccgtttgccctgatcgcggtcgccgccgcagccgaaaacaaccaacaagcggccggccgccaggcggcgcaaggtggagatcacattttccagcgcatcgggcgtatgggcgtaatccaccagcgtcaggaaatcctgccgacccaccggttccaggcgacccgggatactgcggcaaccggctaatccctgttccacgacccggccgtccaccttcagaccgtaagccacggccgcggcggccagtacgttcatggcttgaaaatcgcccagcagcgggcagcggatgtccaacacttcctgcccgtactgcagagagccacgcaagccattgaaatcgcaggtcaattcacgccaataaatcgaggcgtttttcccgaaggtaatcgtcggcatcggggtggctttcatgattttttgcccggccggatcatctgcattgacgaccgcgaaagccttcggcttgcggctggccgaaaccggcagcaactcatcaaacagacggatcttggcgcccagataagcatccagcgcgccatggaaatccagatggtcgcgcgaaagattggtgaaaacgcctacatcgaaatggcaccccacggcccggcgcaactgcagggcgtggctggatacttccatgatcacgatttccacgccgaaattcttcatttccactagaatttcaaccagatctggagcctccggggtggtgtatcgcgattggatcgtatgaccgttgtaatgataatcgaccgttccgatgatccccactttgcgaccctgagccttaaaaatcgcctcgagttcataggccacggaggtcttgccgttggtgccggtgattccgatcaacgttaatccggccgtcggatcgccggccaggcgatgtgatatcagcgcgacaaagcggcgggcatcaggcactcgaacgagcggcacccccttggtatcgagatcatcctccgcggcaatcgccgccgccccggcttccagggcttgcgggacaaagcaggcgccgtcggtttgcaggccgcgcaccgcgacgaacaaatcaccgggccgcacctgacgggaatcgaccacggcgcgaatgacctcgacttgccggttgaccgaagcccaaggcaggtcatcgatcacctgattgagcagcatgtttcctccactactgtctgggggcgaaaaccaccgttatttgtctgttttcagccaacgtttgcccgggtgcgggttcctgcttgatcgccactcccgagccttcgaaggtcatatcgatggtcatccggtgcgccaggctccgggccgcccgaatgctaagacccctgaaatccggcgcttgatccgcgccgaacaatcgtttgtccatggtgacgccatgattctccggcgccgcgtaaacaatgtttttttccaattcactgaccaaagttgcctcatcttgccgctgttccgaatacacgccgagataatccagcgttttttcagcgatttccctgaacgccggcgcagccacggtaccgccgtacgtccggcccggaggttcgtccgcgaccaccaggatccccaggatgggctcgtcgccgggcaccaaacccacaaagctcacgacacgccgcgatggatcgggttggccggtgcgggggtggtaatggaacgcagttcctgtctttcctgcgatcggaaaaccggtcaccgccgcccgtgtccccgtcccgccgtcctcagtgacctcgaccatcattttaaggacttccttggcgattttagcgctgacggcgcggccggcgatcgtcggattgtttttcctgctgccaatcccgtcgggactgatttgttcgagaaccacaaacggcgtcatcattcgaccgccgttgcccaaggcggcggtggccatgagcatctgcagaccggtcacggcaatcccctgcccataagccttggtagccgcgtcgatgggataccaggttttgtagaacttaagggagccggccgcttcggcggccagatcgatcccggtgcgttgaccgaaaccgaaccggcgcaagctttcatagtattgttgataggtcatgcgaatcgccaatttggcgatgccgatgttcgaactgtatttgatgatttgcgccggcgtggcgttgccgagcttatgcgtgtcggaaatggttttaccgccgtaatgccattgaccgtattcacaatcgaccagctcatcgagcctcaccttgccgtccgctaaaaccatcgccatggtcagaggtttcatcgtgctgccgggttcatattgatcaagcaccgcccgattgcgccggtccagatcggcgctctcacccggacggctcggatcgaaggtcggacgggtggccatggccaggatttcgccggttcgtacgtccaccacaatggcccaggcatgtttcggtttgaattccctgaccattttatccagcgcctcttcgacgaaccattgaatatgaagatcaagggtcaagcgcagggtttgaccatccttgcggccgaccacctgattgtcgctgaacaggtattgggtgcctttagcgtccttgatggaaaccagatgtccggcttccccgaccagggattgttcataagtggcctccaacccttcacgccctttgatgtcgatgtcggtccagcccagcagattggcggccagcgctccgcgcgggtagatgcgcttggtttccttgcgcagtctgacgcccgccaacgactcgggggccaaggccgccagagcggctgattcctcattggtgatgaagcgcttgatccattcgaattgcgtatcactgcggcatttgcggtaaatgtccacctcgccgatctggagcacatcggccagcgccttggacgttcgcgcggggtccttgaccagggtcggatcaacccacaccgagtccaccgtcaccgtggtggcaagaacttcgccatggcggtccaggatgtcgccgcgcggccgcggcagtttgatttcaaggctgtgaattttttccgcctggttgaccagttcctgatgtttgatgatcgtcaaatagaaggcgcggcaaccgagggaaaaaaagccgatgataaacaacaccaatagcgtgccgacccgcacgcgacgggcctcatccaagttgaagggtttctccggttggatgtgcttggcctggaggcgtcgtccaggcaaaagtccccggtgcgaaccgtataactgtggttgtctagggttcctcatgcaaaacaatccgttggtttagccgcgattccttcagattgagttttctcgcctccgccgtcagacggtctttgcgtcccaactgttcatattcaaggcgtacatcattcacttctttttccagcgatcggatttcatcccccagcaccaaaacatcgtgacccagcgccaccacttccccccggatgtggcccagatacagcaaataggccgaaaccagcgccatcacgccgatcgtcaccagaatacccgtcaaatccagccatttccccagcgccacacgcaccgaacgccgccagcccccccgtttgacctttttttgtccgatcgttcgcgcccgaggcaaaatatattcagacatcatcatcctctttcatggattggcgactcgccgattttttccgccacacgcagcttggcgctgcgcgcgcgcggattcccccgcacttcctccgccgagggcgcaagcggtttgcgcgtcaggacccgcaaccgcggccgatgaccgcaaacgcaagtcggtatgttcggcggacaaaggcaccccttctcttcctcctgaaaccggcgtttaatccgccggtcctccaagctgtgatacgcgatcaccgccaggcggccccccgaccgcaacagcgagatcgacgcatccagcagttcatccagcgcgttcaactcgtcgttcactgcaatgcgcaacgcctgaaaaacctgggttgccgaatcgatgccgcgacgccggggcgtcccgaccgcccgatgaaccaactccgcgaaggcgcgaccggtgaacggccggtccgactgcctttccctcaccgtcaaccgggccaccgcccgccagcgcgcctcttcgccgtactcccgaaagatgcgccccagttcctcctcggaggcggcggccagcaaaacggccgccgtgcggggcgaccgccgatccagccgcatgtccaactcccgctcgctccggaaggaaaaaccccgctccggatcgtccagttggaaactggccagccccaaatcggcgcaaacggcatcgacttgttcaatttcgaaagaacgcagcacctgtcgcaattcgcgaaagttggcccggtgaaacttcacttgcggcaactcacgcaatcgccgccgggcgatttccagggaggcgtcgtcctgatccagggcgatcaccatgccggtcggtccgacctggcgggcaatcgcttcgctgaagcttccgcctcccgcagtgacgtccaggacgatctggcccggctgcaacgccaaacccgcgatcgtctccggcaacagcaccggttggtgctcgatcattaatcaaagagccccgacaaagcggccttgatttccggaatatgctccgccgtttccgtcagcgacttggaccacgattccgcatcccagatctgcagcgtcttgatggcgccgacgatgataacctggcgatccagaccggcccattcgcgatgcaattgcggaatcaaaatgcgtcccgccgaatcgaacgacaccttcttcgccggcatgacgtaatacttgatgtactcctcgagcacgggatctgccggatacttggaaaacagcttgtccatccgtttgacccattcgggccacggcaccaggtcgagatacgaatacgtcttgacctgttcgtgcttgctggaaccacggtccatcgccaggaccagttcggtgacgccttcggcatgaaacaactcgcgcaactctttggggacaatcgccctacccttttcatcgatcttgaccgggtaggagctgatgtacattgtttcgcttccttaagtccccacagcagtggagtttagcgccacattttcacaattttctacacgatactccccaaatccccaccgtgtcaagaaaaaaaatgaccgccccccacattcaaccatttgaaatgaaaagtaatttttacgaagtctatatctggctcgttttccgtaaaatacaccacagattgtgccaatccccaccggctagtgctttccggcgaaaaaatcctctaaaatttttcgatggtcgaaggccaacgacaaggctaatgcttcatttttcgtaaacttggcgaccgttttcgcatcgtcagcggcacgcggttccccggcggcggttgcctcgaaaaccaccgacagcgtatgaaaacgcgtatcgcgcgccgggtccgaataaacgtgaacctgacgcaccagccgcacatcgagacaggtttcctctctggcttcgcgaaccgcggcgctttcggccgattcgcccacatcgataaaaccgccggggatcgcccaaccgtaaggcgggttcttgcgttcgatcaaaacgatgcgctcgtcgggaagacggatgatgatatccaccgtggccaggggggttttcgggaggggtctcatggctgggccgctttaaattgttcaagtctggcttgccattcgccgcgttggtcgatttgcagcgcccacttcatgtggcgcacggcgtcccgataattcttgtcggcgtaagccgtttcggcttgttgcgccaaagcctgagcgatgagatcgaggcgctcccaggcatagtggttgtttttatcgtaccgcacggccatcccgtaaaaggacgtcgcgttgaacagcatcggttggcgatacatttcggcgtcgaaatacgcgtcgccccacgcggtcaaatatctgctggttgattgactgacgatgaagctggccgccagcgcgatgaacaacgcggccaccaccgcgagcccggcaatcaaaaccaaacgcggccattttctccggcgcggcacggtttccgtggggctgattttttcctcttcggcaatcggtgcggccgatgttttaccgagcgaggcaagaaacgaatcgtccgtcggatttcccggatcgcccgaaaccgtctgcggcggctgatgcgtggcggttcccgcctgcgtccgtaattcctccgcatccagccggagcgtgctttcctccctggcttcccggctcagcgccgcctggctggtggtgtgaatcgtccgatcggtgaattccagggcggcgcatagatccgccgcggtggcgtagcgatcgttcggatttttcgccaggcagcaatgcaccacctgcgccagcgcctcgggcacttgcggtcggacattgcgcaagggcgtgggcggtttgcgcagatgcgccaccatgatttccgaaatgctgtcgccggcgaacggcggcgagcccgccaacatttcatacatcaggatgcccagggcgtagatgtccgagcgcggatcgttcaagccttcccactgttccggagccatgtacggcgcggtgcccaacacctcgccgtcggcggtcaggttggcgccgccggcgatcttggcgatgccgaaatccatcaacgtggcgttgtcctgctcgtcgagcatgatgttcaccgatttgatgtcgcgatggatcgccccggcgcgatggatatagtccaccgcccgcgaaatttggatcatgatgaccgtgacctgctcgggcgagagggtgccgctgtggcggatgcggcccttgagcgtttcgccccgcaggtacttcatcacgtagtagacgatctccccctcttcgccgatcgtatagatcggcacgatgttggggtgctccaagcgggccaggatattgatttcttcccgaaaacgcttgaccagcttttcatcggccgccaggtggctgggcaggattttgatggcgacggagcgctcgacgtcgaaatcgagatcctgggctttgaagaccgcgcccatgccgcccatcccgatcttctccagcaccttgtatttcccggaaagtatggctcccggttcgatcatgcagccatcctgttttcgctcgaatcccgtcgccttcaccccggcggggcggcgttcattatcttttccacaccaagcgtatcgggcgcattaaaattatttttcttcgtgaatgcaagcgcattcgatccttcccttcagtcactccttgcctttttccctttgcccttccagcaaatccctgggcctgtacctggatttcaggatttacgcgggggttcgattagctcctggtctactcggggcggaaggcttttgttaccgccgcattatccctggcgtttttaccataatggaaagcatgtttgcatttatttagcgaaaaggtgaagggaaaaaggaactgtgccccttcatgacatgggtcgattatggtatagctaatcgtcatcaaaaattcgttggaagaccggagcggaatggaaaatagttttgcaggcgtatgcaggggatgtcaaaatcaatattcattaatcatgggggtcctacatgaactacaaccttctcgatgaaaaatggattccggttctctataatgatgggcgcacggatcgcgttggcattaaagcggctttcaaggaagcaggccacatccgccagattgccgccagcaatccgatggatcgttttgcaattttgcgatttctaatagcattgctatattggtgtaaagggaacccttcaaccgatgatttcaccgacttagataaaccgttccctgaaagctggtttaaaaaattagaagaccaaaaaagctgtttcgatctttttgccgaaaacaagcgattttgccaggcccttacacattctaaaccggtaccggatcggcttactgtaaattatctaatacaagaggttccgactaaaacaaattttaatcattttcgccatgcaattgataaaaaagacggtctttgtcccgcgtgttgtgcaattggcctcctacgaatacccatattttccacatcagggggaaaaggcaaatccccaggcattaattttaaaccgccaatttatctcatcttacttggccatacgctcgcaacaagtatcaggctttcttggttgcccgtaaaaagtattggcttcccattttgggagaaagccgatttttcacttcctgaaggtgaggaaatccccttactgactggtatgacttggctaccgcgacaagtatggcttgatgagccatcagaaaaagaaggcaaatgcattttatgcggcaggcaagaacgattggttgaacaaaccatttttgccgggctggggagcaccaaagacaaggatgaatcaaaagtgcgaatgtggattgatccacatgtcatttacgatacagcgaaagatgggaaacaaatttcgctacacagtaagaatacgattggactagccgatactggggctggccaatggttggatatattattcggccaactctatttggatagaatccattcaccggcggttaaggaagcaatccaaaaaacaaccgaatcaggaagccaaatcaaatcatgggcaattgggttttcaactattcaaaacgataagtacttggaagcaatagaatatttgcttcccatctcgaatcaaggagatgccccaacctcaggaatcgatcaagtaaagcagtggcaagatgagggtaaaacaattgataaaacaataaggaaaaggactgcatggggaaaagatgaatccttaaaaaagcgaaagaacagcgaattaaaacctgccatatccgccattcgcccgcatgtggagcaccaggtatcgtcagcggcgggaaagctgctgaccgatgaccgcgaaacgtgggagcgggcggcggaagaataccgaccgatgatggaagtcgtggcacaggcgctttcacccggttatacggccaaggccttgcgaaggcggcgacaaatagccaatgccattccgaacatgcgtcaaaccgaaccaaagaaaaagggcaagaacaaagagaaaggaggtgaggaatgaacgcgaccgaactcttcattgacgctttgaccagtctaaaagaaggtgaactcgggctattgcgaaagcatgcagggcaaggtttagatgaaacggtagaggggttcgatctgttcaccggtatctggtggccgctgcgatctcaaaaacatggaattccgcccaagagggaagttgcctggttggtggccaagctttacgcattccggcctttagcaccctcaccgggagacaccctttctaagcaattagcaaaaagcattccgagaaacgaacaagaacaaatccgctacgtggaacgattcgatcagatgctgtctttgcccatccggaaaatcgaggccgggttgttatgggcgctcgatgtcatcgctaaaaaggaaaacagactcgattgggtcagattggcggaagatctccgctcttggaataacgaatctacccggctgagatggtcggaagaattcacaaaaattgatgaaaggaaagaaccatgttgatcgaaattcatgccattcaaaaccacagcccggctaatttgaaccgagacgaccttggggcaccgaaaacctgttacttcggcggagtattgcggtcgcgcatttccagccaatgcttgaagcggagcatccgcaccagcgatgaatttaagacactttgcggaggaattcgtacccgtcagttggcgaaaaagatcgcggagcaaattccggacgtgaagaaggccagggaacgggcggaaaaaatactcgaacaatgcggttttaagtcaaagaagaaaaaaggagaagaagaacaagacgacaaaagcaagatgctgatatacacgacttatgccgccatcaaagaaatggccgaattgattaaaaacaatgaagggaaaccggaaggcaaactggcagaacaattcggcgccatcatcagcaagcacgtcagtgtgccggatatggctctatccgggcgcatgttggaaccggatgcgtctgctaaagagatttggaaaaacaacgaaacgaccgtggaagcagccttgcaagtggcgcatgccatttccacacatgccgcgcgcccggaagtggattactacgtggccaaggacgacgtgccgggtgaagacgcgggcgccggatttctggacgaggcgatgttcgcctccgcctgtttctacaagtatttttcgatccattgggagaagttggtcgaaaaccttaagggaaatcaggaactagcggcccatacaattggggcgtttctgcgcggcgtcgctaaaatcacccccacaggaaagcaaaacagctatgcagccaacaattatccggacgggctgctagttgagatcaaaaaaacaccggtcagttatgccaacgcatttgccaaaccggtggaagaaggacagcgtggcatcatcgagcaaagcatcgctcaacttgcccaatacgcccacgacctggatgtcggattcgggaatccggagcatcgattttggttttcgcccaaccttcgctatcccttgatgctggtcgaggatggaacagaaaaggcgatgaccgaaaacaacatcaaatcccttgatgagttgatcgccgtgatcgttcgcgcgctcggccatgattggcagtcggttcagaagacggtgaccagcatggagcccacattatgagcgaaaacacgttgtttcttcgcttggaggggccgttgcaagcctgggggaatcaggaatcaaaatttctgattcggcgcacttcagatgcaccgacaaaatcgggagtcatcggtatgctttgcgccgctttgggcatcccgcgagcactggccggcgaggaatggctgccgaagcttagtgccttgcgctttggggtacgaatcgaccggccgggaatccgctggtgggattaccataccgtgggcgccaagatggaaatgcggattgcggaaggagaagggaagtccaagccgggcgcgatgttaacccgacgcgaatacctttgcgacgcttcctttctggttgttttacaaggcgaatcgggactcatcgagttattggaaacaaaacttcgcgaaccggtatggacgctttacctcggccgaaaatcctgtccgccatcgcggccgatattgaatgccaaagactcatcgggagattaccccgaccttctttcagcgctttcatccgttccatggcaaagaaggtatcaaggggaaccggcgccaccaagtgtaaagtttctcatggattggaatcccaccccaagccagccaaatgcaccgccggatgcactgattctttatgatgtggcactgacgttcgatcctcccgctcatgagccgcgtttcgccattcagggcgaactcaatgtcggtccggatgccaatgtacacttcaaaacaacgccgtcccagaagataaccccagcaccgccaagaccaagggcagattacgcaaacgatcaataccggaaaatgcgaaagaaacgcctggcggcagatcatggcctttgtgttttgtgcaaatcgccggcgacaaccgttcagcatattacctatcgaagagcaggcggcaatgaagccctggaagacctccgatctctctgtcgtttgtgccacgatgcggtaaccatgctcgaatatgggttgaacatggacctggatcgaatcaacccggaagagtcccactggcgcgaggccattttagaaaagagaaaagagatcgaacaaaaccgctcccttgtcaaacgccaccgcagattatcagccgaggaggtggagtaaaatgtatcactcgacccttttagtaaacgtcggcgacaacccggatcaaccaagacccggccgactatggttacggaacgcctatcgagtccatcaacgcttgtgcatggcgtttcagacagaggctaagaaaaaggccgatcccgattttctcaacccatacaatccgaccaaagatctggatcaacagcaagtgcatgtgccgcggtatgatcccaaacggaatgttactgccgggtttctttatcgcattgatccgcatccgggtgggtcagtggcgattgtcgttcagtcaacccaacgtccggattggaactacgcttttcacaacgccccttctcttttagcggccgatccggaggtcaaaccgttcaatccggaattttccaaagaacaactgcttcgttttcgattacaagccaatccgacgaagaagatcgttgcaatgaccgagagaggtgaaataaaacgaaacggcaaacgcattccggtgaaatacgatgagctaaacgattggctgacccgccatgccaccgcaggaggcttttctcttgatgaggaatccatcggcgtacagacaggttatgtctatatcaatgactcgcacgagggaaaagggcgtcgtgtgttttcaacacggtatgagggcacactgaccgttaccgatccggaacgcttttaccaaacgataaccggcgggatcggtccatccaagtgcttcggcttcggtttgctgagcgtggcgccggtgcggtagcgagccatgaaggatttgcacgatctgcccaagctgcgggacggcctgagctttctgtacgtcgagcatgcgcgggtggaaaaggagcaacaggcgatcgcgctgtaccgggcggaagggtgcgtgtccgtgccggcggcggggctggcggcgctgctgttgggtccgggcacgaacatcacccacgacgccgtgcgcgccctggccgaaaacggctgcacccttctgtggtgcggcgagcaaggggttcgctgctatgcccagggcctcggcgaaacgcgtaaagccgcgcggctgctgcaccaggcgcggctgtgcgccgatccggccttgcacctggcggtggtgatgcggatgtatcgcaaacgctttgccgaagcgctgccgaaggacttgaccctggcgcaaatccgcggccgggagggcgtgcgggtgcgcgaggcctacgcgaacgccgcacagcgctacggcgtggtctggcagggccggcagtatcggcgcgaccggtgggaggcgacggacccggtcaaccgggcgctgtcggccgccaacagttgcctttacggcctctgccatgcggcgatcgtctccgcgggctactcgacggcgctgggcttcgtgcacaccggcaagcagttgtcgttcgtgtacgacatcgccgacctgtacaaaaccgaagtgacgatccccgtcgctttcaaaatcaccgccgagggaccgacgaacctggaaagcgccgtgcgccacgcctgccgcgatatcttccgcgaggtgcggctgttggatcggctggtaccggacctcgattgggtcttggatgcaacggggctggacgacgaggacggcgccggcgacccggacgccgacgaggccttgccgggcgggctgtggaacgggtcggagacaacggcaatgggagggcaaaactatggtggtgatgatcctggaaaacgtggccccggggctgcggggaaaactgagccgctggctgatcgagccgcgggcgggggtcttcgtggggaaggtgagcgcgatggtccgtgacaagctgtgggaaaaggtgctgaaacaaaaaggcgccggatcctgcgtgcaaatcttctcggcggcaaatgagcagggcttcgaggtccgcgccgccggcgaccgcagccgtgagctcatccgcatggagggacttatccttgttttaaagaaaaaagtcgtgtgataatcaagtatgatccccacgcgcgtggggatgaaccgagcggcctgggcctgctgtaaggaggcaacatatgatccccacgcgcgtggggatgaaccgctctcgcctgggttcggcaaatgaccgctctgatgatccccacgcgc

SEQ ID NO: 959 - DNA, 116720 bp, Artificial Sequence
  Synthetic Oligonucleotide
  misc_feature (1)..(36351): n is a, c, g, or t
nnnnnnnnnnnnnnnnnnnnnnnnnnnnnnnnnnnnnnnnnnnnnnnnnnnnnnnnnnnnnnnnnnnnnnnnnnnnnnnnnnnnnnnnnnnnnnnnnnnnnnnnnnnnnnnnnnnnnnnnnnnnnnnnnnnnnnnnnnnnnnnnnnnnnnnnnnnnnnnnnnnnnnnnnnnnnnnnnnnnnnnnnnnnnnnnnnnnnnnnnnnnnnnnnnnnnnnnnnnnnnnnnnnnnnnnnnnnnnnnnnnnnnnnnnnnnnnnnnnnnnnnnnnnnnnnnnnnnnnnnnnnnnnnnnnnnnnnnnnnnnnnnnnnnnnnnnnnnnnnnnnnnnnnnnnnnnnnnnnnnnnnnnnnnnnnnnnnnnnnnnnnnnnnnnnnnnnnnnnnnnnnnnnnnnnnnnnnnnnnnnnnnnnnnnnnnnnnnnnnnnnnnnnnnnnnnnnnnnnnnnnnnnnnnnnnnnnnnnnnnnnnnnnnnnnnnnnnnnnnnnnnnnnnnnnnnnnnnnnnnnnnnnnnnnnnnnnnnnnnnnnnnnnnnnnnnnnnnnnnnnnnnnnnnnnnnnnnnnnnnnnnnnnnnnnnnnnnnnnnnnnnnnnnnnnnnnnnnnnnnnnnnnnnnnnnnnnnnnnnnnnnnnnnnnnnnnnnnnnnnnnnnnnnnnnnnnnnnnnnnnnnnnnnnnnnnnnnnnnnnnnnnnnnnnnnnnnnnnnnnnnnnnnnnnnnnnnnnnnnnnnnnnnnnnnnnnnnnnnnnnnnnnnnnnnnnnnnnnnnnnnnnnnnnnnnnnnnnnnnnnnnnnnnnnnnnnnnnnnnnnnnnnnnnnnnnnnnnnnnnnnnnnnnnnnnnnnnnnnnnnnnnnnnnnnnnnnnnnnnnnnnnnnnnnnnnnnnnnnnnnnnnnnnnnnnnnnnnnnnnnnnnnnnnnnnnnnnnnnnnnnnnnnnnnnnnnnnnnnnnnnnnnnnnnnnnnnnnnnnnnnnnnnnnnnnnnnnnnnnnnnnnnnnnnnnnnnnnnnnnnnnnnnnnnnnnnnnnnnnnnnnnnnnnnnnnnnnnnnnnnnnnnnnnnnnnnnnnnnnnnnnnnnnnnnnnnnnnnnnnnnnnnnnnnnnnnnnnnnnnnnnnnnnnnnnnnnnnnnnnnnnnnnnnnnnnnnnnnnnnnnnnnnnnnnnnnnnnnnnnnnnnnnnnnnnnnnnnnnnnnnnnnnnnnnnnnnnnnnnnnnnnnnnnnnnnnnnnnnnnnnnnnnnnnnnnnnnnnnnnnnnnnnnnnnnnnnnnnnnnnnnnnnnnnnnnnnnnnnnnnnnnnnnnnnnnnnnnnnnnnnnnnnnnnnnnnnnnnnnnnnnnnnnnnnnnnnnnnnnnnnnnnnnnnnnnnnnnnnnnnnnnnnnnnnnnnnnnnnnnnnnnnnnnnnnnnnnnnnnnnnnnnnnnnnnnnnnnnnnnnnnnnnnnnnnnnnnnnnnnnnnnnnnnnnnnnnnnnnnnnnnnnnnnnnnnnnnnnnnnnnnnnnnnnnnnnnnnnnnnnnnnnnnnnnnnnnnnnnnnnnnnnnnnnnnnnnnnnnnnnnnnnnnnnnnnnnnnnnnnnnnnnnnnnnnnnnnnnnnnnnnnnnnnnnnnnnnnnnnnnnnnnnnnnnnnnnnnnnnnnnnnnnnnnnnnnnnnnnnnnnnnnnnnnnnnnnnnnnnnnnnnnnnnnnnnnnnnnnnnnnnnnnnnnnnnnnnnnnnnnnnnnnnnnnnnnnnnnnnnnnnnnnnnnnnnnnnnnnnnnnnnnnnnnnnnnnnnnnnnnnnnnnnnnnnnnnnnnnnnnnnnnnnnnnnnnnnnnnnnnnnnnnnnnnnnnnnnnnnnnnnnnnnnnnnnnnnnnnnnnnnnnnnnnnnnnnnnnnnnnnnnnnnnnnnnnnnnnnnnnnnnnnnnnnnnnnnnnnnnnnnnnnnnnnnnnnnnnnnnnnnnnnnnnnnnnnnnnnnnnnnnnnnnnnnnnnnnnnnnnnnnnnnnnnnnnnnnnnnnnnnnnnnnnnnnnnnnnnnnnnnnnnnnnnnnnnnnnnnnnnnnnnnnnnnnnnnnnnnnnnnnnnnnnnnnnnnnnnnnnnnnnnnnnnnnnnnnnnnnnnnnnnnnnnnnnnnnnnnnnnnnnnnnnnnnnnnnnnnnnnnnnnnnnnnnnnnnnnnnnnnnnnnnnnnnnnnnnnnnnnnnnnnnnnnnnnnnnnnnnnnnnnnnnnnnnnnnnnnnnnnnnnnnnnnnnnnnnnnnnnnnnnnnnnnnnnnnnnnnnnnnnnnnnnnnnnnnnnnnnnnnnnnnnnnnnnnnnnnnnnnnnnnnnnnnnnnnnnnnnnnnnnnnnnnnnnnnnnnnnnnnnnnnnnnnnnnnnnnnnnnnnnnnnnnnnnnnnnnnnnnnnnnnnnnnnnnnnnnnnnnnnnnnnnnnnnnnnnnnnnnnnnnnnnnnnnnnnnnnnnnnnnnnnnnnnnnnnnnnnnnnnnnnnnnnnnnnnnnnnnnnnnnnnnnnnnnnnnnnnnnnnnnnnnnnnnnnnnnnnnnnnnnnnnnnnnnnnnnnnnnnnnnnnnnnnnnnnnnnnnnnnnnnnnnnnnnnnnnnnnnnnnnnnnnnnnnnnnnnnnnnnnnnnnnnnnnnnnnnnnnnnnnnnnnnnnnnnnnnnnnnnnnnnnnnnnnnnnnnnnnnnnnnnnnnnnnnnnnnnnnnnnnnnnnnnnnnnnnnnnnnnnnnnnnnnnnnnnnnnnnnnnnnnnnnnnnnnnnnnnnnnnnnnnnnnnnnnnnnnnnnnnnnnnnnnnnnnnnnnnnnnnnnnnnnnnnnnnnnnnnnnnnnnnnnnnnnnnnnnnnnnnnnnnnnnnnnnnnnnnnnnnnnnnnnnnnnnnnnnnnnnnnnnnnnnnnnnnnnnnnnnnnnnnnnnnnnnnnnnnnnnnnnnnnnnnnnnnnnnnnnnnnnnnnnnnnnnnnnnnnnnnnnnnnnnnnnnnnnnnnnnnnnnnnnnnnnnnnnnnnnnnnnnnnnnnnnnnnnnnnnnnnnnnnnnnnnnnnnnnnnnnnnnnnnnnnnnnnnnnnnnnnnnnnnnnnnnnnnnnnnnnnnnnnnnnnnnnnnnnnnnnnnnnnnnnnnnnnnnnnnnnnnnnnnnnnnnnnnnnnnnnnnnnnnnnnnnnnnnnnnnnnnnnnnnnnnnnnnnnnnnnnnnnnnnnnnnnnnnnnnnnnnnnnnnnnnnnnnnnnnnnnnnnnnnnnnnnnnnnnnnnnnnnnnnnnnnnnnnnnnnnnnnnnnnnnnnnnnnnnnnnnnnnnnnnnnnnnnnnnnnnnnnnnnnnnnnnnnnnnnnnnnnnnnnnnnnnnnnnnnnnnnnnnnnnnnnnnnnnnnnnnnnnnnnnnnnnnnnnnnnnnnnnnnnnnnnnnnnnnnnnnnnnnnnnnnnnnnnnnnnnnnnnnnnnnnnnnnnnnnnnnnnnnnnnnnnnnnnnnnnnnnnnnnnnnnnnnnnnnnnnnnnnnnnnnnnnnnnnnnnnnnnnnnnnnnnnnnnnnnnnnnnnnnnnnnnnnnnnnnnnnnnnnnnnnnnnnnnnnnnnnnnnnnnnnnnnnnnnnnnnnnnnnnnnnnnnnnnnnnnnnnnnnnnnnnnnnnnnnnnnnnnnnnnnnnnnnnnnnnnnnnnnnnnnnnnnnnnnnnnnnnnnnnnnnnnnnnnnnnnnnnnnnnnnnnnnnnnnnnnnnnnnnnnnnnnnnnnnnnnnnnnnnnnnnnnnnnnnnnnnnnnnnnnnnnnnnnnnnnnnnnnnnnnnnnnnnnnnnnnnnnnnnnnnnnnnnnnnnnnnnnnnnnnnnnnnnnnnnnnnnnnnnnnnnnnnnnnnnnnnnnnnnnnnnnnnnnnnnnnnnnnnnnnnnnnnnnnnnnnnnnnnnnnnnnnnnnnnnnnnnnnnnnnnnnnnnnnnnnnnnnnnnnnnnnnnnnnnnnnnnnnnnnnnnnnnnnnnnnnnnnnnnnnnnnnnnnnnnnnnnnnnnnnnnnnnnnnnnnnnnnnnnnnnnnnnnnnnnnnnnnnnnnnnnnnnnnnnnnnnnnnnnnnnnnnnnnnnnnnnnnnnnnnnnnnnnnnnnnnnnnnnnnnnnnnnnnnnnnnnnnnnnnnnnnnnnnnnnnnnnnnnnnnnnnnnnnnnnnnnnnnnnnnnnnnnnnnnnnnnnnnnnnnnnnnnnnnnnnnnnnnnnnnnnnnnnnnnnnnnnnnnnnnnnnnnnnnnnnnnnnnnnnnnnnnnnnnnnnnnnnnnnnnnnnnnnnnnnnnnnnnnnnnnnnnnnnnnnnnnnnnnnnnnnnnnnnnnnnnnnnnnnnnnnnnnnnnnnnnnnnnnnnnnnnnnnnnnnnnnnnnnnnnnnnnnnnnnnnnnnnnnnnnnnnnnnnnnnnnnnnnnnnnnnnnnnnnnnnnnnnnnnnnnnnnnnnnnnnnnnnnnnnnnnnnnnnnnnnnnnnnnnnnnnnnnnnnnnnnnnnnnnnnnnnnnnnnnnnnnnnnnnnnnnnnnnnnnnnnnnnnnnnnnnnnnnnnnnnnnnnnnnnnnnnnnnnnnnnnnnnnnnnnnnnnnnnnnnnnnnnnnnnnnnnnnnnnnnnnnnnnnnnnnnnnnnnnnnnnnnnnnnnnnnnnnnnnnnnnnnnnnnnnnnnnnnnnnnnnnnnnnnnnnnnnnnnnnnnnnnnnnnnnnnnnnnnnnnnnnnnnnnnnnnnnnnnnnnnnnnnnnnnnnnnnnnnnnnnnnnnnnnnnnnnnnnnnnnnnnnnnnnnnnnnnnnnnnnnnnnnnnnnnnnnnnnnnnnnnnnnnnnnnnnnnnnnnnnnnnnnnnnnnnnnnnnnnnnnnnnnnnnnnnnnnnnnnnnnnnnnnnnnnnnnnnnnnnnnnnnnnnnnnnnnnnnnnnnnnnnnnnnnnnnnnnnnnnnnnnnnnnnnnnnnnnnnnnnnnnnnnnnnnnnnnnnnnnnnnnnnnnnnnnnnnnnnnnnnnnnnnnnnnnnnnnnnnnnnnnnnnnnnnnnnnnnnnnnnnnnnnnnnnnnnnnnnnnnnnnnnnnnnnnnnnnnnnnnnnnnnnnnnnnnnnnnnnnnnnnnnnnnnnnnnnnnnnnnnnnnnnnnnnnnnnnnnnnnnnnnnnnnnnnnnnnnnnnnnnnnnnnnnnnnnnnnnnnnnnnnnnnnnnnnnnnnnnnnnnnnnnnnnnnnnnnnnnnnnnnnnnnnnnnnnnnnnnnnnnnnnnnnnnnnnnnnnnnnnnnnnnnnnnnnnnnnnnnnnnnnnnnnnnnnnnnnnnnnnnnnnnnnnnnnnnnnnnnnnnnnnnnnnnnnnnnnnnnnnnnnnnnnnnnnnnnnnnnnnnnnnnnnnnnnnnnnnnnnnnnnnnnnnnnnnnnnnnnnnnnnnnnnnnnnnnnnnnnnnnnnnnnnnnnnnnnnnnnnnnnnnnnnnnnnnnnnnnnnnnnnnnnnnnnnnnnnnnnnnnnnnnnnnnnnnnnnnnnnnnnnnnnnnnnnnnnnnnnnnnnnnnnnnnnnnnnnnnnnnnnnnnnnnnnnnnnnnnnnnnnnnnnnnnnnnnnnnnnnnnnnnnnnnnnnnnnnnnnnnnnnnnnnnnnnnnnnnnnnnnnnnnnnnnnnnnnnnnnnnnnnnnnnnnnnnnnnnnnnnnnnnnnnnnnnnnnnnnnnnnnnnnnnnnnnnnnnnnnnnnnnnnnnnnnnnnnnnnnnnnnnnnnnnnnnnnnnnnnnnnnnnnnnnnnnnnnnnnnnnnnnnnnnnnnnnnnnnnnnnnnnnnnnnnnnnnnnnnnnnnnnnnnnnnnnnnnnnnnnnnnnnnnnnnnnnnnnnnnnnnnnnnnnnnnnnnnnnnnnnnnnnnnnnnnnnnnnnnnnnnnnnnnnnnnnnnnnnnnnnnnnnnnnnnnnnnnnnnnnnnnnnnnnnnnnnnnnnnnnnnnnnnnnnnnnnnnnnnnnnnnnnnnnnnnnnnnnnnnnnnnnnnnnnnnnnnnnnnnnnnnnnnnnnnnnnnnnnnnnnnnnnnnnnnnnnnnnnnnnnnnnnnnnnnnnnnnnnnnnnnnnnnnnnnnnnnnnnnnnnnnnnnnnnnnnnnnnnnnnnnnnnnnnnnnnnnnnnnnnnnnnnnnnnnnnnnnnnnnnnnnnnnnnnnnnnnnnnnnnnnnnnnnnnnnnnnnnnnnnnnnnnnnnnnnnnnnnnnnnnnnnnnnnnnnnnnnnnnnnnnnnnnnnnnnnnnnnnnnnnnnnnnnnnnnnnnnnnnnnnnnnnnnnnnnnnnnnnnnnnnnnnnnnnnnnnnnnnnnnnnnnnnnnnnnnnnnnnnnnnnnnnnnnnnnnnnnnnnnnnnnnnnnnnnnnnnnnnnnnnnnnnnnnnnnnnnnnnnnnnnnnnnnnnnnnnnnnnnnnnnnnnnnnnnnnnnnnnnnnnnnnnnnnnnnnnnnnnnnnnnnnnnnnnnnnnnnnnnnnnnnnnnnnnnnnnnnnnnnnnnnnnnnnnnnnnnnnnnnnnnnnnnnnnnnnnnnnnnnnnnnnnnnnnnnnnnnnnnnnnnnnnnnnnnnnnnnnnnnnnnnnnnnnnnnnnnnnnnnnnnnnnnnnnnnnnnnnnnnnnnnnnnnnnnnnnnnnnnnnnnnnnnnnnnnnnnnnnnnnnnnnnnnnnnnnnnnnnnnnnnnnnnnnnnnnnnnnnnnnnnnnnnnnnnnnnnnnnnnnnnnnnnnnnnnnnnnnnnnnnnnnnnnnnnnnnnnnnnnnnnnnnnnnnnnnnnnnnnnnnnnnnnnnnnnnnnnnnnnnnnnnnnnnnnnnnnnnnnnnnnnnnnnnnnnnnnnnnnnnnnnnnnnnnnnnnnnnnnnnnnnnnnnnnnnnnnnnnnnnnnnnnnnnnnnnnnnnnnnnnnnnnnnnnnnnnnnnnnnnnnnnnnnnnnnnnnnnnnnnnnnnnnnnnnnnnnnnnnnnnnnnnnnnnnnnnnnnnnnnnnnnnnnnnnnnnnnnnnnnnnnnnnnnnnnnnnnnnnnnnnnnnnnnnnnnnnnnnnnnnnnnnnnnnnnnnnnnnnnnnnnnnnnnnnnnnnnnnnnnnnnnnnnnnnnnnnnnnnnnnnnnnnnnnnnnnnnnnnnnnnnnnnnnnnnnnnnnnnnnnnnnnnnnnnnnnnnnnnnnnnnnnnnnnnnnnnnnnnnnnnnnnnnnnnnnnnnnnnnnnnnnnnnnnnnnnnnnnnnnnnnnnnnnnnnnnnnnnnnnnnnnnnnnnnnnnnnnnnnnnnnnnnnnnnnnnnnnnnnnnnnnnnnnnnnnnnnnnnnnnnnnnnnnnnnnnnnnnnnnnnnnnnnnnnnnnnnnnnnnnnnnnnnnnnnnnnnnnnnnnnnnnnnnnnnnnnnnnnnnnnnnnnnnnnnnnnnnnnnnnnnnnnnnnnnnnnnnnnnnnnnnnnnnnnnnnnnnnnnnnnnnnnnnnnnnnnnnnnnnnnnnnnnnnnnnnnnnnnnnnnnnnnnnnnnnnnnnnnnnnnnnnnnnnnnnnnnnnnnnnnnnnnnnnnnnnnnnnnnnnnnnnnnnnnnnnnnnnnnnnnnnnnnnnnnnnnnnnnnnnnnnnnnnnnnnnnnnnnnnnnnnnnnnnnnnnnnnnnnnnnnnnnnnnnnnnnnnnnnnnnnnnnnnnnnnnnnnnnnnnnnnnnnnnnnnnnnnnnnnnnnnnnnnnnnnnnnnnnnnnnnnnnnnnnnnnnnnnnnnnnnnnnnnnnnnnnnnnnnnnnnnnnnnnnnnnnnnnnnnnnnnnnnnnnnnnnnnnnnnnnnnnnnnnnnnnnnnnnnnnnnnnnnnnnnnnnnnnnnnnnnnnnnnnnnnnnnnnnnnnnnnnnnnnnnnnnnnnnnnnnnnnnnnnnnnnnnnnnnnnnnnnnnnnnnnnnnnnnnnnnnnnnnnnnnnnnnnnnnnnnnnnnnnnnnnnnnnnnnnnnnnnnnnnnnnnnnnnnnnnnnnnnnnnnnnnnnnnnnnnnnnnnnnnnnnnnnnnnnnnnnnnnnnnnnnnnnnnnnnnnnnnnnnnnnnnnnnnnnnnnnnnnnnnnnnnnnnnnnnnnnnnnnnnnnnnnnnnnnnnnnnnnnnnnnnnnnnnnnnnnnnnnnnnnnnnnnnnnnnnnnnnnnnnnnnnnnnnnnnnnnnnnnnnnnnnnnnnnnnnnnnnnnnnnnnnnnnnnnnnnnnnnnnnnnnnnnnnnnnnnnnnnnnnnnnnnnnnnnnnnnnnnnnnnnnnnnnnnnnnnnnnnnnnnnnnnnnnnnnnnnnnnnnnnnnnnnnnnnnnnnnnnnnnnnnnnnnnnnnnnnnnnnnnnnnnnnnnnnnnnnnnnnnnnnnnnnnnnnnnnnnnnnnnnnnnnnnnnnnnnnnnnnnnnnnnnnnnnnnnnnnnnnnnnnnnnnnnnnnnnnnnnnnnnnnnnnnnnnnnnnnnnnnnnnnnnnnnnnnnnnnnnnnnnnnnnnnnnnnnnnnnnnnnnnnnnnnnnnnnnnnnnnnnnnnnnnnnnnnnnnnnnnnnnnnnnnnnnnnnnnnnnnnnnnnnnnnnnnnnnnnnnnnnnnnnnnnnnnnnnnnnnnnnnnnnnnnnnnnnnnnnnnnnnnnnnnnnnnnnnnnnnnnnnnnnnnnnnnnnnnnnnnnnnnnnnnnnnnnnnnnnnnnnnnnnnnnnnnnnnnnnnnnnnnnnnnnnnnnnnnnnnnnnnnnnnnnnnnnnnnnnnnnnnnnnnnnnnnnnnnnnnnnnnnnnnnnnnnnnnnnnnnnnnnnnnnnnnnnnnnnnnnnnnnnnnnnnnnnnnnnnnnnnnnnnnnnnnnnnnnnnnnnnnnnnnnnnnnnnnnnnnnnnnnnnnnnnnnnnnnnnnnnnnnnnnnnnnnnnnnnnnnnnnnnnnnnnnnnnnnnnnnnnnnnnnnnnnnnnnnnnnnnnnnnnnnnnnnnnnnnnnnnnnnnnnnnnnnnnnnnnnnnnnnnnnnnnnnnnnnnnnnnnnnnnnnnnnnnnnnnnnnnnnnnnnnnnnnnnnnnnnnnnnnnnnnnnnnnnnnnnnnnnnnnnnnnnnnnnnnnnnnnnnnnnnnnnnnnnnnnnnnnnnnnnnnnnnnnnnnnnnnnnnnnnnnnnnnnnnnnnnnnnnnnnnnnnnnnnnnnnnnnnnnnnnnnnnnnnnnnnnnnnnnnnnnnnnnnnnnnnnnnnnnnnnnnnnnnnnnnnnnnnnnnnnnnnnnnnnnnnnnnnnnnnnnnnnnnnnnnnnnnnnnnnnnnnnnnnnnnnnnnnnnnnnnnnnnnnnnnnnnnnnnnnnnnnnnnnnnnnnnnnnnnnnnnnnnnnnnnnnnnnnnnnnnnnnnnnnnnnnnnnnnnnnnnnnnnnnnnnnnnnnnnnnnnnnnnnnnnnnnnnnnnnnnnnnnnnnnnnnnnnnnnnnnnnnnnnnnnnnnnnnnnnnnnnnnnnnnnnnnnnnnnnnnnnnnnnnnnnnnnnnnnnnnnnnnnnnnnnnnnnnnnnnnnnnnnnnnnnnnnnnnnnnnnnnnnnnnnnnnnnnnnnnnnnnnnnnnnnnnnnnnnnnnnnnnnnnnnnnnnnnnnnnnnnnnnnnnnnnnnnnnnnnnnnnnnnnnnnnnnnnnnnnnnnnnnnnnnnnnnnnnnnnnnnnnnnnnnnnnnnnnnnnnnnnnnnnnnnnnnnnnnnnnnnnnnnnnnnnnnnnnnnnnnnnnnnnnnnnnnnnnnnnnnnnnnnnnnnnnnnnnnnnnnnnnnnnnnnnnnnnnnnnnnnnnnnnnnnnnnnnnnnnnnnnnnnnnnnnnnnnnnnnnnnnnnnnnnnnnnnnnnnnnnnnnnnnnnnnnnnnnnnnnnnnnnnnnnnnnnnnnnnnnnnnnnnnnnnnnnnnnnnnnnnnnnnnnnnnnnnnnnnnnnnnnnnnnnnnnnnnnnnnnnnnnnnnnnnnnnnnnnnnnnnnnnnnnnnnnnnnnnnnnnnnnnnnnnnnnnnnnnnnnnnnnnnnnnnnnnnnnnnnnnnnnnnnnnnnnnnnnnnnnnnnnnnnnnnnnnnnnnnnnnnnnnnnnnnnnnnnnnnnnnnnnnnnnnnnnnnnnnnnnnnnnnnnnnnnnnnnnnnnnnnnnnnnnnnnnnnnnnnnnnnnnnnnnnnnnnnnnnnnnnnnnnnnnnnnnnnnnnnnnnnnnnnnnnnnnnnnnnnnnnnnnnnnnnnnnnnnnnnnnnnnnnnnnnnnnnnnnnnnnnnnnnnnnnnnnnnnnnnnnnnnnnnnnnnnnnnnnnnnnnnnnnnnnnnnnnnnnnnnnnnnnnnnnnnnnnnnnnnnnnnnnnnnnnnnnnnnnnnnnnnnnnnnnnnnnnnnnnnnnnnnnnnnnnnnnnnnnnnnnnnnnnnnnnnnnnnnnnnnnnnnnnnnnnnnnnnnnnnnnnnnnnnnnnnnnnnnnnnnnnnnnnnnnnnnnnnnnnnnnnnnnnnnnnnnnnnnnnnnnnnnnnnnnnnnnnnnnnnnnnnnnnnnnnnnnnnnnnnnnnnnnnnnnnnnnnnnnnnnnnnnnnnnnnnnnnnnnnnnnnnnnnnnnnnnnnnnnnnnnnnnnnnnnnnnnnnnnnnnnnnnnnnnnnnnnnnnnnnnnnnnnnnnnnnnnnnnnnnnnnnnnnnnnnnnnnnnnnnnnnnnnnnnnnnnnnnnnnnnnnnnnnnnnnnnnnnnnnnnnnnnnnnnnnnnnnnnnnnnnnnnnnnnnnnnnnnnnnnnnnnnnnnnnnnnnnnnnnnnnnnnnnnnnnnnnnnnnnnnnnnnnnnnnnnnnnnnnnnnnnnnnnnnnnnnnnnnnnnnnnnnnnnnnnnnnnnnnnnnnnnnnnnnnnnnnnnnnnnnnnnnnnnnnnnnnnnnnnnnnnnnnnnnnnnnnnnnnnnnnnnnnnnnnnnnnnnnnnnnnnnnnnnnnnnnnnnnnnnnnnnnnnnnnnnnnnnnnnnnnnnnnnnnnnnnnnnnnnnnnnnnnnnnnnnnnnnnnnnnnnnnnnnnnnnnnnnnnnnnnnnnnnnnnnnnnnnnnnnnnnnnnnnnnnnnnnnnnnnnnnnnnnnnnnnnnnnnnnnnnnnnnnnnnnnnnnnnnnnnnnnnnnnnnnnnnnnnnnnnnnnnnnnnnnnnnnnnnnnnnnnnnnnnnnnnnnnnnnnnnnnnnnnnnnnnnnnnnnnnnnnnnnnnnnnnnnnnnnnnnnnnnnnnnnnnnnnnnnnnnnnnnnnnnnnnnnnnnnnnnnnnnnnnnnnnnnnnnnnnnnnnnnnnnnnnnnnnnnnnnnnnnnnnnnnnnnnnnnnnnnnnnnnnnnnnnnnnnnnnnnnnnnnnnnnnnnnnnnnnnnnnnnnnnnnnnnnnnnnnnnnnnnnnnnnnnnnnnnnnnnnnnnnnnnnnnnnnnnnnnnnnnnnnnnnnnnnnnnnnnnnnnnnnnnnnnnnnnnnnnnnnnnnnnnnnnnnnnnnnnnnnnnnnnnnnnnnnnnnnnnnnnnnnnnnnnnnnnnnnnnnnnnnnnnnnnnnnnnnnnnnnnnnnnnnnnnnnnnnnnnnnnnnnnnnnnnnnnnnnnnnnnnnnnnnnnnnnnnnnnnnnnnnnnnnnnnnnnnnnnnnnnnnnnnnnnnnnnnnnnnnnnnnnnnnnnnnnnnnnnnnnnnnnnnnnnnnnnnnnnnnnnnnnnnnnnnnnnnnnnnnnnnnnnnnnnnnnnnnnnnnnnnnnnnnnnnnnnnnnnnnnnnnnnnnnnnnnnnnnnnnnnnnnnnnnnnnnnnnnnnnnnnnnnnnnnnnnnnnnnnnnnnnnnnnnnnnnnnnnnnnnnnnnnnnnnnnnnnnnnnnnnnnnnnnnnnnnnnnnnnnnnnnnnnnnnnnnnnnnnnnnnnnnnnnnnnnnnnnnnnnnnnnnnnnnnnnnnnnnnnnnnnnnnnnnnnnnnnnnnnnnnnnnnnnnnnnnnnnnnnnnnnnnnnnnnnnnnnnnnnnnnnnnnnnnnnnnnnnnnnnnnnnnnnnnnnnnnnnnnnnnnnnnnnnnnnnnnnnnnnnnnnnnnnnnnnnnnnnnnnnnnnnnnnnnnnnnnnnnnnnnnnnnnnnnnnnnnnnnnnnnnnnnnnnnnnnnnnnnnnnnnnnnnnnnnnnnnnnnnnnnnnnnnnnnnnnnnnnnnnnnnnnnnnnnnnnnnnnnnnnnnnnnnnnnnnnnnnnnnnnnnnnnnnnnnnnnnnnnnnnnnnnnnnnnnnnnnnnnnnnnnnnnnnnnnnnnnnnnnnnnnnnnnnnnnnnnnnnnnnnnnnnnnnnnnnnnnnnnnnnnnnnnnnnnnnnnnnnnnnnnnnnnnnnnnnnnnnnnnnnnnnnnnnnnnnnnnnnnnnnnnnnnnnnnnnnnnnnnnnnnnnnnnnnnnnnnnnnnnnnnnnnnnnnnnnnnnnnnnnnnnnnnnnnnnnnnnnnnnnnnnnnnnnnnnnnnnnnnnnnnnnnnnnnnnnnnnnnnnnnnnnnnnnnnnnnnnnnnnnnnnnnnnnnnnnnnnnnnnnnnnnnnnnnnnnnnnnnnnnnnnnnnnnnnnnnnnnnnnnnnnnnnnnnnnnnnnnnnnnnnnnnnnnnnnnnnnnnnnnnnnnnnnnnnnnnnnnnnnnnnnnnnnnnnnnnnnnnnnnnnnnnnnnnnnnnnnnnnnnnnnnnnnnnnnnnnnnnnnnnnnnnnnnnnnnnnnnnnnnnnnnnnnnnnnnnnnnnnnnnnnnnnnnnnnnnnnnnnnnnnnnnnnnnnnnnnnnnnnnnnnnnnnnnnnnnnnnnnnnnnnnnnnnnnnnnnnnnnnnnnnnnnnnnnnnnnnnnnnnnnnnnnnnnnnnnnnnnnnnnnnnnnnnnnnnnnnnnnnnnnnnnnnnnnnnnnnnnnnnnnnnnnnnnnnnnnnnnnnnnnnnnnnnnnnnnnnnnnnnnnnnnnnnnnnnnnnnnnnnnnnnnnnnnnnnnnnnnnnnnnnnnnnnnnnnnnnnnnnnnnnnnnnnnnnnnnnnnnnnnnnnnnnnnnnnnnnnnnnnnnnnnnnnnnnnnnnnnnnnnnnnnnnnnnnnnnnnnnnnnnnnnnnnnnnnnnnnnnnnnnnnnnnnnnnnnnnnnnnnnnnnnnnnnnnnnnnnnnnnnnnnnnnnnnnnnnnnnnnnnnnnnnnnnnnnnnnnnnnnnnnnnnnnnnnnnnnnnnnnnnnnnnnnnnnnnnnnnnnnnnnnnnnnnnnnnnnnnnnnnnnnnnnnnnnnnnnnnnnnnnnnnnnnnnnnnnnnnnnnnnnnnnnnnnnnnnnnnnnnnnnnnnnnnnnnnnnnnnnnnnnnnnnnnnnnnnnnnnnnnnnnnnnnnnnnnnnnnnnnnnnnnnnnnnnnnnnnnnnnnnnnnnnnnnnnnnnnnnnnnnnnnnnnnnnnnnnnnnnnnnnnnnnnnnnnnnnnnnnnnnnnnnnnnnnnnnnnnnnnnnnnnnnnnnnnnnnnnnnnnnnnnnnnnnnnnnnnnnnnnnnnnnnnnnnnnnnnnnnnnnnnnnnnnnnnnnnnnnnnnnnnnnnnnnnnnnnnnnnnnnnnnnnnnnnnnnnnnnnnnnnnnnnnnnnnnnnnnnnnnnnnnnnnnnnnnnnnnnnnnnnnnnnnnnnnnnnnnnnnnnnnnnnnnnnnnnnnnnnnnnnnnnnnnnnnnnnnnnnnnnnnnnnnnnnnnnnnnnnnnnnnnnnnnnnnnnnnnnnnnnnnnnnnnnnnnnnnnnnnnnnnnnnnnnnnnnnnnnnnnnnnnnnnnnnnnnnnnnnnnnnnnnnnnnnnnnnnnnnnnnnnnnnnnnnnnnnnnnnnnnnnnnnnnnnnnnnnnnnnnnnnnnnnnnnnnnnnnnnnnnnnnnnnnnnnnnnnnnnnnnnnnnnnnnnnnnnnnnnnnnnnnnnnnnnnnnnnnnnnnnnnnnnnnnnnnnnnnnnnnnnnnnnnnnnnnnnnnnnnnnnnnnnnnnnnnnnnnnnnnnnnnnnnnnnnnnnnnnnnnnnnnnnnnnnnnnnnnnnnnnnnnnnnnnnnnnnnnnnnnnnnnnnnnnnnnnnnnnnnnnnnnnnnnnnnnnnnnnnnnnnnnnnnnnnnnnnnnnnnnnnnnnnnnnnnnnnnnnnnnnnnnnnnnnnnnnnnnnnnnnnnnnnnnnnnnnnnnnnnnnnnnnnnnnnnnnnnnnnnnnnnnnnnnnnnnnnnnnnnnnnnnnnnnnnnnnnnnnnnnnnnnnnnnnnnnnnnnnnnnnnnnnnnnnnnnnnnnnnnnnnnnnnnnnnnnnnnnnnnnnnnnnnnnnnnnnnnnnnnnnnnnnnnnnnnnnnnnnnnnnnnnnnnnnnnnnnnnnnnnnnnnnnnnnnnnnnnnnnnnnnnnnnnnnnnnnnnnnnnnnnnnnnnnnnnnnnnnnnnnnnnnnnnnnnnnnnnnnnnnnnnnnnnnnnnnnnnnnnnnnnnnnnnnnnnnnnnnnnnnnnnnnnnnnnnnnnnnnnnnnnnnnnnnnnnnnnnnnnnnnnnnnnnnnnnnnnnnnnnnnnnnnnnnnnnnnnnnnnnnnnnnnnnnnnnnnnnnnnnnnnnnnnnnnnnnnnnnnnnnnnnnnnnnnnnnnnnnnnnnnnnnnnnnnnnnnnnnnnnnnnnnnnnnnnnnnnnnnnnnnnnnnnnnnnnnnnnnnnnnnnnnnnnnnnnnnnnnnnnnnnnnnnnnnnnnnnnnnnnnnnnnnnnnnnnnnnnnnnnnnnnnnnnnnnnnnnnnnnnnnnnnnnnnnnnnnnnnnnnnnnnnnnnnnnnnnnnnnnnnnnnnnnnnnnnnnnnnnnnnnnnnnnnnnnnnnnnnnnnnnnnnnnnnnnnnnnnnnnnnnnnnnnnnnnnnnnnnnnnnnnnnnnnnnnnnnnnnnnnnnnnnnnnnnnnnnnnnnnnnnnnnnnnnnnnnnnnnnnnnnnnnnnnnnnnnnnnnnnnnnnnnnnnnnnnnnnnnnnnnnnnnnnnnnnnnnnnnnnnnnnnnnnnnnnnnnnnnnnnnnnnnnnnnnnnnnnnnnnnnnnnnnnnnnnnnnnnnnnnnnnnnnnnnnnnnnnnnnnnnnnnnnnnnnnnnnnnnnnnnnnnnnnnnnnnnnnnnnnnnnnnnnnnnnnnnnnnnnnnnnnnnnnnnnnnnnnnnnnnnnnnnnnnnnnnnnnnnnnnnnnnnnnnnnnnnnnnnnnnnnnnnnnnnnnnnnnnnnnnnnnnnnnnnnnnnnnnnnnnnnnnnnnnnnnnnnnnnnnnnnnnnnnnnnnnnnnnnnnnnnnnnnnnnnnnnnnnnnnnnnnnnnnnnnnnnnnnnnnnnnnnnnnnnnnnnnnnnnnnnnnnnnnnnnnnnnnnnnnnnnnnnnnnnnnnnnnnnnnnnnnnnnnnnnnnnnnnnnnnnnnnnnnnnnnnnnnnnnnnnnnnnnnnnnnnnnnnnnnnnnnnnnnnnnnnnnnnnnnnnnnnnnnnnnnnnnnnnnnnnnnnnnnnnnnnnnnnnnnnnnnnnnnnnnnnnnnnnnnnnnnnnnnnnnnnnnnnnnnnnnnnnnnnnnnnnnnnnnnnnnnnnnnnnnnnnnnnnnnnnnnnnnnnnnnnnnnnnnnnnnnnnnnnnnnnnnnnnnnnnnnnnnnnnnnnnnnnnnnnnnnnnnnnnnnnnnnnnnnnnnnnnnnnnnnnnnnnnnnnnnnnnnnnnnnnnnnnnnnnnnnnnnnnnnnnnnnnnnnnnnnnnnnnnnnnnnnnnnnnnnnnnnnnnnnnnnnnnnnnnnnnnnnnnnnnnnnnnnnnnnnnnnnnnnnnnnnnnnnnnnnnnnnnnnnnnnnnnnnnnnnnnnnnnnnnnnnnnnnnnnnnnnnnnnnnnnnnnnnnnnnnnnnnnnnnnnnnnnnnnnnnnnnnnnnnnnnnnnnnnnnnnnnnnnnnnnnnnnnnnnnnnnnnnnnnnnnnnnnnnnnnnnnnnnnnnnnnnnnnnnnnnnnnnnnnnnnnnnnnnnnnnnnnnnnnnnnnnnnnnnnnnnnnnnnnnnnnnnnnnnnnnnnnnnnnnnnnnnnnnnnnnnnnnnnnnnnnnnnnnnnnnnnnnnnnnnnnnnnnnnnnnnnnnnnnnnnnnnnnnnnnnnnnnnnnnnnnnnnnnnnnnnnnnnnnnnnnnnnnnnnnnnnnnnnnnnnnnnnnnnnnnnnnnnnnnnnnnnnnnnnnnnnnnnnnnnnnnnnnnnnnnnnnnnnnnnnnnnnnnnnnnnnnnnnnnnnnnnnnnnnnnnnnnnnnnnnnnnnnnnnnnnnnnnnnnnnnnnnnnnnnnnnnnnnnnnnnnnnnnnnnnnnnnnnnnnnnnnnnnnnnnnnnnnnnnnnnnnnnnnnnnnnnnnnnnnnnnnnnnnnnnnnnnnnnnnnnnnnnnnnnnnnnnnnnnnnnnnnnnnnnnnnnnnnnnnnnnnnnnnnnnnnnnnnnnnnnnnnnnnnnnnnnnnnnnnnnnnnnnnnnnnnnnnnnnnnnnnnnnnnnnnnnnnnnnnnnnnnnnnnnnnnnnnnnnnnnnnnnnnnnnnnnnnnnnnnnnnnnnnnnnnnnnnnnnnnnnnnnnnnnnnnnnnnnnnnnnnnnnnnnnnnnnnnnnnnnnnnnnnnnnnnnnnnnnnnnnnnnnnnnnnnnnnnnnnnnnnnnnnnnnnnnnnnnnnnnnnnnnnnnnnnnnnnnnnnnnnnnnnnnnnnnnnnnnnnnnnnnnnnnnnnnnnnnnnnnnnnnnnnnnnnnnnnnnnnnnnnnnnnnnnnnnnnnnnnnnnnnnnnnnnnnnnnnnnnnnnnnnnnnnnnnnnnnnnnnnnnnnnnnnnnnnnnnnnnnnnnnnnnnnnnnnnnnnnnnnnnnnnnnnnnnnnnnnnnnnnnnnnnnnnnnnnnnnnnnnnnnnnnnnnnnnnnnnnnnnnnnnnnnnnnnnnnnnnnnnnnnnnnnnnnnnnnnnnnnnnnnnnnnnnnnnnnnnnnnnnnnnnnnnnnnnnnnnnnnnnnnnnnnnnnnnnnnnnnnnnnnnnnnnnnnnnnnnnnnnnnnnnnnnnnnnnnnnnnnnnnnnnnnnnnnnnnnnnnnnnnnnnnnnnnnnnnnnnnnnnnnnnnnnnnnnnnnnnnnnnnnnnnnnnnnnnnnnnnnnnnnnnnnnnnnnnnnnnnnnnnnnnnnnnnnnnnnnnnnnnnnnnnnnnnnnnnnnnnnnnnnnnnnnnnnnnnnnnnnnnnnnnnnnnnnnnnnnnnnnnnnnnnnnnnnnnnnnnnnnnnnnnnnnnnnnnnnnnnnnnnnnnnnnnnnnnnnnnnnnnnnnnnnnnnnnnnnnnnnnnnnnnnnnnnnnnnnnnnnnnnnnnnnnnnnnnnnnnnnnnnnnnnnnnnnnnnnnnnnnnnnnnnnnnnnnnnnnnnnnnnnnnnnnnnnnnnnnnnnnnnnnnnnnnnnnnnnnnnnnnnnnnnnnnnnnnnnnnnnnnnnnnnnnnnnnnnnnnnnnnnnnnnnnnnnnnnnnnnnnnnnnnnnnnnnnnnnnnnnnnnnnnnnnnnnnnnnnnnnnnnnnnnnnnnnnnnnnnnnnnnnnnnnnnnnnnnnnnnnnnnnnnnnnnnnnnnnnnnnnnnnnnnnnnnnnnnnnnnnnnnnnnnnnnnnnnnnnnnnnnnnnnnnnnnnnnnnnnnnnnnnnnnnnnnnnnnnnnnnnnnnnnnnnnnnnnnnnnnnnnnnnnnnnnnnnnnnnnnnnnnnnnnnnnnnnnnnnnnnnnnnnnnnnnnnnnnnnnnnnnnnnnnnnnnnnnnnnnnnnnnnnnnnnnnnnnnnnnnnnnnnnnnnnnnnnnnnnnnnnnnnnnnnnnnnnnnnnnnnnnnnnnnnnnnnnnnnnnnnnnnnnnnnnnnnnnnnnnnnnnnnnnnnnnnnnnnnnnnnnnnnnnnnnnnnnnnnnnnnnnnnnnnnnnnnnnnnnnnnnnnnnnnnnnnnnnnnnnnnnnnnnnnnnnnnnnnnnnnnnnnnnnnnnnnnnnnnnnnnnnnnnnnnnnnnnnnnnnnnnnnnnnnnnnnnnnnnnnnnnnnnnnnnnnnnnnnnnnnnnnnnnnnnnnnnnnnnnnnnnnnnnnnnnnnnnnnnnnnnnnnnnnnnnnnnnnnnnnnnnnnnnnnnnnnnnnnnnnnnnnnnnnnnnnnnnnnnnnnnnnnnnnnnnnnnnnnnnnnnnnnnnnnnnnnnnnnnnnnnnnnnnnnnnnnnnnnnnnnnnnnnnnnnnnnnnnnnnnnnnnnnnnnnnnnnnnnnnnnnnnnnnnnnnnnnnnnnnnnnnnnnnnnnnnnnnnnnnnnnnnnnnnnnnnnnnnnnnnnnnnnnnnnnnnnnnnnnnnnnnnnnnnnnnnnnnnnnnnnnnnnnnnnnnnnnnnnnnnnnnnnnnnnnnnnnnnnnnnnnnnnnnnnnnnnnnnnnnnnnnnnnnnnnnnnnnnnnnnnnnnnnnnnnnnnnnnnnnnnnnnnnnnnnnnnnnnnnnnnnnnnnnnnnnnnnnnnnnnnnnnnnnnnnnnnnnnnnnnnnnnnnnnnnnnnnnnnnnnnnnnnnnnnnnnnnnnnnnnnnnnnnnnnnnnnnnnnnnnnnnnnnnnnnnnnnnnnnnnnnnnnnnnnnnnnnnnnnnnnnnnnnnnnnnnnnnnnnnnnnnnnnnnnnnnnnnnnnnnnnnnnnnnnnnnnnnnnnnnnnnnnnnnnnnnnnnnnnnnnnnnnnnnnnnnnnnnnnnnnnnnnnnnnnnnnnnnnnnnnnnnnnnnnnnnnnnnnnnnnnnnnnnnnnnnnnnnnnnnnnnnnnnnnnnnnnnnnnnnnnnnnnnnnnnnnnnnnnnnnnnnnnnnnnnnnnnnnnnnnnnnnnnnnnnnnnnnnnnnnnnnnnnnnnnnnnnnnnnnnnnnnnnnnnnnnnnnnnnnnnnnnnnnnnnnnnnnnnnnnnnnnnnnnnnnnnnnnnnnnnnnnnnnnnnnnnnnnnnnnnnnnnnnnnnnnnnnnnnnnnnnnnnnnnnnnnnnnnnnnnnnnnnnnnnnnnnnnnnnnnnnnnnnnnnnnnnnnnnnnnnnnnnnnnnnnnnnnnnnnnnnnnnnnnnnnnnnnnnnnnnnnnnnnnnnnnnnnnnnnnnnnnnnnnnnnnnnnnnnnnnnnnnnnnnnnnnnnnnnnnnnnnnnnnnnnnnnnnnnnnnnnnnnnnnnnnnnnnnnnnnnnnnnnnnnnnnnnnnnnnnnnnnnnnnnnnnnnnnnnnnnnnnnnnnnnnnnnnnnnnnnnnnnnnnnnnnnnnnnnnnnnnnnnnnnnnnnnnnnnnnnnnnnnnnnnnnnnnnnnnnnnnnnnnnnnnnnnnnnnnnnnnnnnnnnnnnnnnnnnnnnnnnnnnnnnnnnnnnnnnnnnnnnnnnnnnnnnnnnnnnnnnnnnnnnnnnnnnnnnnnnnnnnnnnnnnnnnnnnnnnnnnnnnnnnnnnnnnnnnnnnnnnnnnnnnnnnnnnnnnnnnnnnnnnnnnnnnnnnnnnnnnnnnnnnnnnnnnnnnnnnnnnnnnnnnnnnnnnnnnnnnnnnnnnnnnnnnnnnnnnnnnnnnnnnnnnnnnnnnnnnnnnnnnnnnnnnnnnnnnnnnnnnnnnnnnnnnnnnnnnnnnnnnnnnnnnnnnnnnnnnnnnnnnnnnnnnnnnnnnnnnnnnnnnnnnnnnnnnnnnnnnnnnnnnnnnnnnnnnnnnnnnnnnnnnnnnnnnnnnnnnnnnnnnnnnnnnnnnnnnnnnnnnnnnnnnnnnnnnnnnnnnnnnnnnnnnnnnnnnnnnnnnnnnnnnnnnnnnnnnnnnnnnnnnnnnnnnnnnnnnnnnnnnnnnnnnnnnnnnnnnnnnnnnnnnnnnnnnnnnnnnnnnnnnnnnnnnnnnnnnnnnnnnnnnnnnnnnnnnnnnnnnnnnnnnnnnnnnnnnnnnnnnnnnnnnnnnnnnnnnnnnnnnnnnnnnnnnnnnnnnnnnnnnnnnnnnnnnnnnnnnnnnnnnnnnnnnnnnnnnnnnnnnnnnnnnnnnnnnnnnnnnnnnnnnnnnnnnnnnnnnnnnnnnnnnnnnnnnnnnnnnnnnnnnnnnnnnnnnnnnnnnnnnnnnnnnnnnnnnnnnnnnnnnnnnnnnnnnnnnnnnnnnnnnnnnnnnnnnnnnnnnnnnnnnnnnnnnnnnnnnnnnnnnnnnnnnnnnnnnnnnnnnnnnnnnnnnnnnnnnnnnnnnnnnnnnnnnnnnnnnnnnnnnnnnnnnnnnnnnnnnnnnnnnnnnnnnnnnnnnnnnnnnnnnnnnnnnnnnnnnnnnnnnnnnnnnnnnnnnnnnnnnnnnnnnnnnnnnnnnnnnnnnnnnnnnnnnnnnnnnnnnnnnnnnnnnnnnnnnnnnnnnnnnnnnnnnnnnnnnnnnnnnnnnnnnnnnnnnnnnnnnnnnnnnnnnnnnnnnnnnnnnnnnnnnnnnnnnnnnnnnnnnnnnnnnnnnnnnnnnnnnnnnnnnnnnnnnnnnnnnnnnnnnnnnnnnnnnnnnnnnnnnnnnnnnnnnnnnnnnnnnnnnnnnnnnnnnnnnnnnnnnnnnnnnnnnnnnnnnnnnnnnnnnnnnnnnnnnnnnnnnnnnnnnnnnnnnnnnnnnnnnnnnnnnnnnnnnnnnnnnnnnnnnnnnnnnnnnnnnnnnnnnnnnnnnnnnnnnnnnnnnnnnnnnnnnnnnnnnnnnnnnnnnnnnnnnnnnnnnnnnnnnnnnnnnnnnnnnnnnnnnnnnnnnnnnnnnnnnnnnnnnnnnnnnnnnnnnnnnnnnnnnnnnnnnnnnnnnnnnnnnnnnnnnnnnnnnnnnnnnnnnnnnnnnnnnnnnnnnnnnnnnnnnnnnnnnnnnnnnnnnnnnnnnnnnnnnnnnnnnnnnnnnnnnnnnnnnnnnnnnnnnnnnnnnnnnnnnnnnnnnnnnnnnnnnnnnnnnnnnnnnnnnnnnnnnnnnnnnnnnnnnnnnnnnnnnnnnnnnnnnnnnnnnnnnnnnnnnnnnnnnnnnnnnnnnnnnnnnnnnnnnnnnnnnnnnnnnnnnnnnnnnnnnnnnnnnnnnnnnnnnnnnnnnnnnnnnnnnnnnnnnnnnnnnnnnnnnnnnnnnnnnnnnnnnnnnnnnnnnnnnnnnnnnnnnnnnnnnnnnnnnnnnnnnnnnnnnnnnnnnnnnnnnnnnnnnnnnnnnnnnnnnnnnnnnnnnnnnnnnnnnnnnnnnnnnnnnnnnnnnnnnnnnnnnnnnnnnnnnnnnnnnnnnnnnnnnnnnnnnnnnnnnnnnnnnnnnnnnnnnnnnnnnnnnnnnnnnnnnnnnnnnnnnnnnnnnnnnnnnnnnnnnnnnnnnnnnnnnnnnnnnnnnnnnnnnnnnnnnnnnnnnnnnnnnnnnnnnnnnnnnnnnnnnnnnnnnnnnnnnnnnnnnnnnnnnnnnnnnnnnnnnnnnnnnnnnnnnnnnnnnnnnnnnnnnnnnnnnnnnnnnnnnnnnnnnnnnnnnnnnnnnnnnnnnnnnnnnnnnnnnnnnnnnnnnnnnnnnnnnnnnnnnnnnnnnnnnnnnnnnnnnnnnnnnnnnnnnnnnnnnnnnnnnnnnnnnnnnnnnnnnnnnnnnnnnnnnnnnnnnnnnnnnnnnnnnnnnnnnnnnnnnnnnnnnnnnnnnnnnnnnnnnnnnnnnnnnnnnnnnnnnnnnnnnnnnnnnnnnnnnnnnnnnnnnnnnnnnnnnnnnnnnnnnnnnnnnnnnnnnnnnnnnnnnnnnnnnnnnnnnnnnnnnnnnnnnnnnnnnnnnnnnnnnnnnnnnnnnnnnnnnnnnnnnnnnnnnnnnnnnnnnnnnnnnnnnnnnnnnnnnnnnnnnnnnnnnnnnnnnnnnnnnnnnnnnnnnnnnnnnnnnnnnnnnnnnnnnnnnnnnnnnnnnnnnnnnnnnnnnnnnnnnnnnnnnnnnnnnnnnnnnnnnnnnnnnnnnnnnnnnnnnnnnnnnnnnnnnnnnnnnnnnnnnnnnnnnnnnnnnnnnnnnnnnnnnnnnnnnnnnnnnnnnnnnnnnnnnnnnnnnnnnnnnnnnnnnnnnnnnnnnnnnnnnnnnnnnnnnnnnnnnnnnnnnnnnnnnnnnnnnnnnnnnnnnnnnnnnnnnnnnnnnnnnnnnnnnnnnnnnnnnnnnnnnnnnnnnnnnnnnnnnnnnnnnnnnnnnnnnnnnnnnnnnnnnnnnnnnnnnnnnnnnnnnnnnnnnnnnnnnnnnnnnnnnnnnnnnnnnnnnnnnnnnnnnnnnnnnnnnnnnnnnnnnnnnnnnnnnnnnnnnnnnnnnnnnnnnnnnnnnnnnnnnnnnnnnnnnnnnnnnnnnnnnnnnnnnnnnnnnnnnnnnnnnnnnnnnnnnnnnnnnnnnnnnnnnnnnnnnnnnnnnnnnnnnnnnnnnnnnnnnnnnnnnnnnnnnnnnnnnnnnnnnnnnnnnnnnnnnnnnnnnnnnnnnnnnnnnnnnnnnnnnnnnnnnnnnnnnnnnnnnnnnnnnnnnnnnnnnnnnnnnnnnnnnnnnnnnnnnnnnnnnnnnnnnnnnnnnnnnnnnnnnnnnnnnnnnnnnnnnnnnnnnnnnnnnnnnnnnnnnnnnnnnnnnnnnnnnnnnnnnnnnnnnnnnnnnnnnnnnnnnnnnnnnnnnnnnnnnnnnnnnnnnnnnnnnnnnnnnnnnnnnnnnnnnnnnnnnnnnnnnnnnnnnnnnnnnnnnnnnnnnnnnnnnnnnnnnnnnnnnnnnnnnnnnnnnnnnnnnnnnnnnnnnnnnnnnnnnnnnnnnnnnnnnnnnnnnnnnnnnnnnnnnnnnnnnnnnnnnnnnnnnnnnnnnnnnnnnnnnnnnnnnnnnnnnnnnnnnnnnnnnnnnnnnnnnnnnnnnnnnnnnnnnnnnnnnnnnnnnnnnnnnnnnnnnnnnnnnnnnnnnnnnnnnnnnnnnnnnnnnnnnnnnnnnnnnnnnnnnnnnnnnnnnnnnnnnnnnnnnnnnnnnnnnnnnnnnnnnnnnnnnnnnnnnnnnnnnnnnnnnnnnnnnnnnnnnnnnnnnnnnnnnnnnnnnnnnnnnnnnnnnnnnnnnnnnnnnnnnnnnnnnnnnnnnnnnnnnnnnnnnnnnnnnnnnnnnnnnnnnnnnnnnnnnnnnnnnnnnnnnnnnnnnnnnnnnnnnnnnnnnnnnnnnnnnnnnnnnnnnnnnnnnnnnnnnnnnnnnnnnnnnnnnnnnnnnnnnnnnnnnnnnnnnnnnnnnnnnnnnnnnnnnnnnnnnnnnnnnnnnnnnnnnnnnnnnnnnnnnnnnnnnnnnnnnnnnnnnnnnnnnnnnnnnnnnnnnnnnnnnnnnnnnnnnnnnnnnnnnnnnnnnnnnnnnnnnnnnnnnnnnnnnnnnnnnnnnnnnnnnnnnnnnnnnnnnnnnnnnnnnnnnnnnnnnnnnnnnnnnnnnnnnnnnnnnnnnnnnnnnnnnnnnnnnnnnnnnnnnnnnnnnnnnnnnnnnnnnnnnnnnnnnnnnnnnnnnnnnnnnnnnnnnnnnnnnnnnnnnnnnnnnnnnnnnnnnnnnnnnnnnnnnnnnnnnnnnnnnnnnnnnnnnnnnnnnnnnnnnnnnnnnnnnnnnnnnnnnnnnnnnnnnnnnnnnnnnnnnnnnnnnnnnnnnnnnnnnnnnnnnnnnnnnnnnnnnnnnnnnnnnnnnnnnnnnnnnnnnnnnnnnnnnnnnnnnnnnnnnnnnnnnnnnnnnnnnnnnnnnnnnnnnnnnnnnnnnnnnnnnnnnnnnnnnnnnnnnnnnnnnnnnnnnnnnnnnnnnnnnnnnnnnnnnnnnnnnnnnnnnnnnnnnnnnnnnnnnnnnnnnnnnnnnnnnnnnnnnnnnnnnnnnnnnnnnnnnnnnnnnnnnnnnnnnnnnnnnnnnnnnnnnnnnnnnnnnnnnnnnnnnnnnnnnnnnnnnnnnnnnnnnnnnnnnnnnnnnnnnnnnnnnnnnnnnnnnnnnnnnnnnnnnnnnnnnnnnnnnnnnnnnnnnnnnnnnnnnnnnnnnnnnnnnnnnnnnnnnnnnnnnnnnnnnnnnnnnnnnnnnnnnnnnnnnnnnnnnnnnnnnnnnnnnnnnnnnnnnnnnnnnnnnnnnnnnnnnnnnnnnnnnnnnnnnnnnnnnnnnnnnnnnnnnnnnnnnnnnnnnnnnnnnnnnnnnnnnnnnnnnnnnnnnnnnnnnnnnnnnnnnnnnnnnnnnnnnnnnnnnnnnnnnnnnnnnnnnnnnnnnnnnnnnnnnnnnnnnnnnnnnnnnnnnnnnnnnnnnnnnnnnnnnnnnnnnnnnnnnnnnnnnnnnnnnnnnnnnnnnnnnnnnnnnnnnnnnnnnnnnnnnnnnnnnnnnnnnnnnnnnnnnnnnnnnnnnnnnnnnnnnnnnnnnnnnnnnnnnnnnnnnnnnnnnnnnnnnnnnnnnnnnnnnnnnnnnnnnnnnnnnnnnnnnnnnnnnnnnnnnnnnnnnnnnnnnnnnnnnnnnnnnnnnnnnnnnnnnnnnnnnnnnnnnnnnnnnnnnnnnnnnnnnnnnnnnnnnnnnnnnnnnnnnnnnnnnnnnnnnnnnnnnnnnnnnnnnnnnnnnnnnnnnnnnnnnnnnnnnnnnnnnnnnnnnnnnnnnnnnnnnnnnnnnnnnnnnnnnnnnnnnnnnnnnnnnnnnnnnnnnnnnnnnnnnnnnnnnnnnnnnnnnnnnnnnnnnnnnnnnnnnnnnnnnnnnnnnnnnnnnnnnnnnnnnnnnnnnnnnnnnnnnnnnnnnnnnnnnnnnnnnnnnnnnnnnnnnnnnnnnnnnnnnnnnnnnnnnnnnnnnnnnnnnnnnnnnnnnnnnnnnnnnnnnnnnnnnnnnnnnnnnnnnnnnnnnnnnnnnnnnnnnnnnnnnnnnnnnnnnnnnnnnnnnnnnnnnnnnnnnnnnnnnnnnnnnnnnnnnnnnnnnnnnnnnnnnnnnnnnnnnnnnnnnnnnnnnnnnnnnnnnnnnnnnnnnnnnnnnnnnnnnnnnnnnnnnnnnnnnnnnnnnnnnnnnnnnnnnnnnnnnnnnnnnnnnnnnnnnnnnnnnnnnnnnnnnnnnnnnnnnnnnnnnnnnnnnnnnnnnnnnnnnnnnnnnnnnnnnnnnnnnnnnnnnnnnnnnnnnnnnnnnnnnnnnnnnnnnnnnnnnnnnnnnnnnnnnnnnnnnnnnnnnnnnnnnnnnnnnnnnnnnnnnnnnnnnnnnnnnnnnnnnnnnnnnnnnnnnnnnnnnnnnnnnnnnnnnnnnnnnnnnnnnnnnnnnnnnnnnnnnnnnnnnnnnnnnnnnnnnnnnnnnnnnnnnnnnnnnnnnnnnnnnnnnnnnnnnnnnnnnnnnnnnnnnnnnnnnnnnnnnnnnnnnnnnnnnnnnnnnnnnnnnnnnnnnnnnnnnnnnnnnnnnnnnnnnnnnnnnnnnnnnnnnnnnnnnnnnnnnnnnnnnnnnnnnnnnnnnnnnnnnnnnnnnnnnnnnnnnnnnnnnnnnnnnnnnnnnnnnnnnnnnnnnnnnnnnnnnnnnnnnnnnnnnnnnnnnnnnnnnnnnnnnnnnnnnnnnnnnnnnnnnnnnnnnnnnnnnnnnnnnnnnnnnnnnnnnnnnnnnnnnnnnnnnnnnnnnnnnnnnnnnnnnnnnnnnnnnnnnnnnnnnnnnnnnnnnnnnnnnnnnnnnnnnnnnnnnnnnnnnnnnnnnnnnnnnnnnnnnnnnnnnnnnnnnnnnnnnnnnnnnnnnnnnnnnnnnnnnnnnnnnnnnnnnnnnnnnnnnnnnnnnnnnnnnnnnnnnnnnnnnnnnnnnnnnnnnnnnnnnnnnnnnnnnnnnnnnnnnnnnnnnnnnnnnnnnnnnnnnnnnnnnnnnnnnnnnnnnnnnnnnnnnnnnnnnnnnnnnnnnnnnnnnnnnnnnnnnnnnnnnnnnnnnnnnnnnnnnnnnnnnnnnnnnnnnnnnnnnnnnnnnnnnnnnnnnnnnnnnnnnnnnnnnnnnnnnnnnnnnnnnnnnnnnnnnnnnnnnnnnnnnnnnnnnnnnnnnnnnnnnnnnnnnnnnnnnnnnnnnnnnnnnnnnnnnnnnnnnnnnnnnnnnnnnnnnnnnnnnnnnnnnnnnnnnnnnnnnnnnnnnnnnnnnnnnnnnnnnnnnnnnnnnnnnnnnnnnnnnnnnnnnnnnnnnnnnnnnnnnnnnnnnnnnnnnnnnnnnnnnnnnnnnnnnnnnnnnnnnnnnnnnnnnnnnnnnnnnnnnnnnnnnnnnnnnnnnnnnnnnnnnnnnnnnnnnnnnnnnnnnnnnnnnnnnnnnnnnnnnnnnnnnnnnnnnnnnnnnnnnnnnnnnnnnnnnnnnnnnnnnnnnnnnnnnnnnnnnnnnnnnnnnnnnnnnnnnnnnnnnnnnnnnnnnnnnnnnnnnnnnnnnnnnnnnnnnnnnnnnnnnnnnnnnnnnnnnnnnnnnnnnnnnnnnnnnnnnnnnnnnnnnnnnnnnnnnnnnnnnnnnnnnnnnnnnnnnnnnnnnnnnnnnnnnnnnnnnnnnnnnnnnnnnnnnnnnnnnnnnnnnnnnnnnnnnnnnnnnnnnnnnnnnnnnnnnnnnnnnnnnnnnnnnnnnnnnnnnnnnnnnnnnnnnnnnnnnnnnnnnnnnnnnnnnnnnnnnnnnnnnnnnnnnnnnnnnnnnnnnnnnnnnnnnnnnnnnnnnnnnnnnnnnnnnnnnnnnnnnnnnnnnnnnnnnnnnnnnnnnnnnnnnnnnnnnnnnnnnnnnnnnnnnnnnnnnnnnnnnnnnnnnnnnnnnnnnnnnnnnnnnnnnnnnnnnnnnnnnnnnnnnnnnnnnnnnnnnnnnnnnnnnnnnnnnnnnnnnnnnnnnnnnnnnnnnnnnnnnnnnnnnnnnnnnnnnnnnnnnnnnnnnnnnnnnnnnnnnnnnnnnnnnnnnnnnnnnnnnnnnnnnnnnnnnnnnnnnnnnnnnnnnnnnnnnnnnnnnnnnnnnnnnnnnnnnnnnnnnnnnnnnnnnnnnnnnnnnnnnnnnnnnnnnnnnnnnnnnnnnnnnnnnnnnnnnnnnnnnnnnnnnnnnnnnnnnnnnnnnnnnnnnnnnnnnnnnnnnnnnnnnnnnnnnnnnnnnnnnnnnnnnnnnnnnnnnnnnnnnnnnnnnnnnnnnnnnnnnnnnnnnnnnnnnnnnnnnnnnnnnnnnnnnnnnnnnnnnnnnnnnnnnnnnnnnnnnnnnnnnnnnnnnnnnnnnnnnnnnnnnnnnnnnnnnnnnnnnnnnnnnnnnnnnnnnnnnnnnnnnnnnnnnnnnnnnnnnnnnnnnnnnnnnnnnnnnnnnnnnnnnnnnnnnnnnnnnnnnnnnnnnnnnnnnnnnnnnnnnnnnnnnnnnnnnnnnnnnnnnnnnnnnnnnnnnnnnnnnnnnnnnnnnnnnnnnnnnnnnnnnnnnnnnnnnnnnnnnnnnnnnnnnnnnnnnnnnnnnnnnnnnnnnnnnnnnnnnnnnnnnnnnnnnnnnnnnnnnnnnnnnnnnnnnnnnnnnnnnnnnnnnnnnnnnnnnnnnnnnnnnnnnnnnnnnnnnnnnnnnnnnnnnnnnnnnnnnnnnnnnnnnnnnnnnnnnnnnnnnnnnnnnnnnnnnnnnnnnnnnnnnnnnnnnnnnnnnnnnnnnnnnnnnnnnnnnnnnnnnnnnnnnnnnnnnnnnnnnnnnnnnnnnnnnnnnnnnnnnnnnnnnnnnnnnnnnnnnnnnnnnnnnnnnnnnnnnnnnnnnnnnnnnnnnnnnnnnnnnnnnnnnnnnnnnnnnnnnnnnnnnnnnnnnnnnnnnnnnnnnnnnnnnnnnnnnnnnnnnnnnnnnnnnnnnnnnnnnnnnnnnnnnnnnnnnnnnnnnnnnnnnnnnnnnnnnnnnnnnnnnnnnnnnnnnnnnnnnnnnnnnnnnnnnnnnnnnnnnnnnnnnnnnnnnnnnnnnnnnnnnnnnnnnnnnnnnnnnnnnnnnnnnnnnnnnnnnnnnnnnnnnnnnnnnnnnnnnnnnnnnnnnnnnnnnnnnnnnnnnnnnnnnnnnnnnnnnnnnnnnnnnnnnnnnnnnnnnnnnnnnnnnnnnnnnnnnnnnnnnnnnnnnnnnnnnnnnnnnnnnnnnnnnnnnnnnnnnnnnnnnnnnnnnnnnnnnnnnnnnnnnnnnnnnnnnnnnnnnnnnnnnnnnnnnnnnnnnnnnnnnnnnnnnnnnnnnnnnnnnnnnnnnnnnnnnnnnnnnnnnnnnnnnnnnnnnnnnnnnnnnnnnnnnnnnnnnnnnnnnnnnnnnnnnnnnnnnnnnnnnnnnnnnnnnnnnnnnnnnnnnnnnnnnnnnnnnnnnnnnnnnnnnnnnnnnnnnnnnnnnnnnnnnnnnnnnnnnnnnnnnnnnnnnnnnnnnnnnnnnnnnnnnnnnnnnnnnnnnnnnnnnnnnnnnnnnnnnnnnnnnnnnnnnnnnnnnnnnnnnnnnnnnnnnnnnnnnnnnnnnnnnnnnnnnnnnnnnnnnnnnnnnnnnnnnnnnnnnnnnnnnnnnnnnnnnnnnnnnnnnnnnnnnnnnnnnnnnnnnnnnnnnnnnnnnnnnnnnnnnnnnnnnnnnnnnnnnnnnnnnnnnnnnnnnnnnnnnnnnnnnnnnnnnnnnnnnnnnnnnnnnnnnnnnnnnnnnnnnnnnnnnnnnnnnnnnnnnnnnnnnnnnnnnnnnnnnnnnnnnnnnnnnnnnnnnnnnnnnnnnnnnnnnnnnnnnnnnnnnnnnnnnnnnnnnnnnnnnnnnnnnnnnnnnnnnnnnnnnnnnnnnnnnnnnnnnnnnnnnnnnnnnnnnnnnnnnnnnnnnnnnnnnnnnnnnnnnnnnnnnnnnnnnnnnnnnnnnnnnnnnnnnnnnnnnnnnnnnnnnnnnnnnnnnnnnnnnnnnnnnnnnnnnnnnnnnnnnnnnnnnnnnnnnnnnnnnnnnnnnnnnnnnnnnnnnnnnnnnnnnnnnnnnnnnnnnnnnnnnnnnnnnnnnnnnnnnnnnnnnnnnnnnnnnnnnnnnnnnnnnnnnnnnnnnnnnnnnnnnnnnnnnnnnnnnnnnnnnnnnnnnnnnnnnnnnnnnnnnnnnnnnnnnnnnnnnnnnnnnnnnnnnnnnnnnnnnnnnnnnnnnnnnnnnnnnnnnnnnnnnnnnnnnnnnnnnnnnnnnnnnnnnnnnnnnnnnnnnnnnnnnnnnnnnnnnnnnnnnnnnnnnnnnnnnnnnnnnnnnnnnnnnnnnnnnnnnnnnnnnnnnnnnnnnnnnnnnnnnnnnnnnnnnnnnnnnnnnnnnnnnnnnnnnnnnnnnnnnnnnnnnnnnnnnnnnnnnnnnnnnnnnnnnnnnnnnnnnnnnnnnnnnnnnnnnnnnnnnnnnnnnnnnnnnnnnnnnnnnnnnnnnnnnnnnnnnnnnnnnnnnnnnnnnnnnnnnnnnnnnnnnnnnnnnnnnnnnnnnnnnnnnnnnnnnnnnnnnnnnnnnnnnnnnnnnnnnnnnnnnnnnnnnnnnnnnnnnnnnnnnnnnnnnnnnnnnnnnnnnnnnnnnnnnnnnnnnnnnnnnnnnnnnnnnnnnnnnnnnnnnnnnnnnnnnnnnnnnnnnnnnnnnnnnnnnnnnnnnnnnnnnnnnnnnnnnnnnnnnnnnnnnnnnnnnnnnnnnnnnnnnnnnnnnnnnnnnnnnnnnnnnnnnnnnnnnnnnnnnnnnnnnnnnnnnnnnnnnnnnnnnnnnnnnnnnnnnnnnnnnnnnnnnnnnnnnnnnnnnnnnnnnnnnnnnnnnnnnnnnnnnnnnnnnnnnnnnnnnnnnnnnnnnnnnnnnnnnnnnnnnnnnnnnnnnnnnnnnnnnnnnnnnnnnnnnnnnnnnnnnnnnnnnnnnnnnnnnnnnnnnnnnnnnnnnnnnnnnnnnnnnnnnnnnnnnnnnnnnnnnnnnnnnnnnnnnnnnnnnnnnnnnnnnnnnnnnnnnnnnnnnnnnnnnnnnnnnnnnnnnnnnnnnnnnnnnnnnnnnnnnnnnnnnnnnnnnnnnnnnnnnnnnnnnnnnnnnnnnnnnnnnnnnnnnnnnnnnnnnnnnnnnnnnnnnnnnnnnnnnnnnnnnnnnnnnnnnnnnnnnnnnnnnnnnnnnnnnnnnnnnnnnnnnnnnnnnnnnnnnnnnnnnnnnnnnnnnnnnnnnnnnnnnnnnnnnnnnnnnnnnnnnnnnnnnnnnnnnnnnnnnnnnnnnnnnnnnnnnnnnnnnnnnnnnnnnnnnnnnnnnnnnnnnnnnnnnnnnnnnnnnnnnnnnnnnnnnnnnnnnnnnnnnnnnnnnnnnnnnnnnnnnnnnnnnnnnnnnnnnnnnnnnnnnnnnnnnnnnnnnnnnnnnnnnnnnnnnnnnnnnnnnnnnnnnnnnnnnnnnnnnnnnnnnnnnnnnnnnnnnnnnnnnnnnnnnnnnnnnnnnnnnnnnnnnnnnnnnnnnnnnnnnnnnnnnnnnnnnnnnnnnnnnnnnnnnnnnnnnnnnnnnnnnnnnnnnnnnnnnnnnnnnnnnnnnnnnnnnnnnnnnnnnnnnnnnnnnnnnnnnnnnnnnnnnnnnnnnnnnnnnnnnnnnnnnnnnnnnnnnnnnnnnnnnnnnnnnnnnnnnnnnnnnnnnnnnnnnnnnnnnnnnnnnnnnnnnnnnnnnnnnnnnnnnnnnnnnnnnnnnnnnnnnnnnnnnnnnnnnnnnnnnnnnnnnnnnnnnnnnnnnnnnnnnnnnnnnnnnnnnnnnnnnnnnnnnnnnnnnnnnnnnnnnnnnnnnnnnnnnnnnnnnnnnnnnnnnnnnnnnnnnnnnnnnnnnnnnnnnnnnnnnnnnnnnnnnnnnnnnnnnnnnnnnnnnnnnnnnnnnnnnnnnnnnnnnnnnnnnnnnnnnnnnnnnnnnnnnnnnnnnnnnnnnnnnnnnnnnnnnnnnnnnnnnnnnnnnnnnnnnnnnnnnnnnnnnnnnnnnnnnnnnnnnnnnnnnnnnnnnnnnnnnnnnnnnnnnnnnnnnnnnnnnnnnnnnnnnnnnnnnnnnnnnnnnnnnnnnnnnnnnnnnnnnnnnnnnnnnnnnnnnnnnnnnnnnnnnnnnnnnnnnnnnnnnnnnnnnnnnnnnnnnnnnnnnnnnnnnnnnnnnnnnnnnnnnnnnnnnnnnnnnnnnnnnnnnnnnnnnnnnnnnnnnnnnnnnnnnnnnnnnnnnnnnnnnnnnnnnnnnnnnnnnnnnnnnnnnnnnnnnnnnnnnnnnnnnnnnnnnnnnnnnnnnnnnnnnnnnnnnnnnnnnnnnnnnnnnnnnnnnnnnnnnnnnnnnnnnnnnnnnnnnnnnnnnnnnnnnnnnnnnnnnnnnnnnnnnnnnnnnnnnnnnnnnnnnnnnnnnnnnnnnnnnnnnnnnnnnnnnnnnnnnnnnnnnnnnnnnnnnnnnnnnnnnnnnnnnnnnnnnnnnnnnnnnnnnnnnnnnnnnnnnnnnnnnnnnnnnnnnnnnnnnnnnnnnnnnnnnnnnnnnnnnnnnnnnnnnnnnnnnnnnnnnnnnnnnnnnnnnnnnnnnnnnnnnnnnnnnnnnnnnnnnnnnnnnnnnnnnnnnnnnnnnnnnnnnnnnnnnnnnnnnnnnnnnnnnnnnnnnnnnnnnnnnnnnnnnnnnnnnnnnnnnnnnnnnnnnnnnnnnnnnnnnnnnnnnnnnnnnnnnnnnnnnnnnnnnnnnnnnnnnnnnnnnnnnnnnnnnnnnnnnnnnnnnnnnnnnnnnnnnnnnnnnnnnnnnnnnnnnnnnnnnnnnnnnnnnnnnnnnnnnnnnnnnnnnnnnnnnnnnnnnnnnnnnnnnnnnnnnnnnnnnnnnnnnnnnnnnnnnnnnnnnnnnnnnnnnnnnnnnnnnnnnnnnnnnnnnnnnnnnnnnnnnnnnnnnnnnnnnnnnnnnnnnnnnnnnnnnnnnnnnnnnnnnnnnnnnnnnnnnnnnnnnnnnnnnnnnnnnnnnnnnnnnnnnnnnnnnnnnnnnnnnnnnnnnnnnnnnnnnnnnnnnnnnnnnnnnnnnnnnnnnnnnnnnnnnnnnnnnnnnnnnnnnnnnnnnnnnnnnnnnnnnnnnnnnnnnnnnnnnnnnnnnnnnnnnnnnnnnnnnnnnnnnnnnnnnnnnnnnnnnnnnnnnnnnnnnnnnnnnnnnnnnnnnnnnnnnnnnnnnnnnnnnnnnnnnnnnnnnnnnnnnnnnnnnnnnnnnnnnnnnnnnnnnnnnnnnnnnnnnnnnnnnnnnnnnnnnnnnnnnnnnnnnnnnnnnnnnnnnnnnnnnnnnnnnnnnnnnnnnnnnnnnnnnnnnnnnnnnnnnnnnnnnnnnnnnnnnnnnnnnnnnnnnnnnnnnnnnnnnnnnnnnnnnnnnnnnnnnnnnnnnnnnnnnnnnnnnnnnnnnnnnnnnnnnnnnnnnnnnnnnnnnnnnnnnnnnnnnnnnnnnnnnnnnnnnnnnnnnnnnnnnnnnnnnnnnnnnnnnnnnnnnnnnnnnnnnnnnnnnnnnnnnnnnnnnnnnnnnnnnnnnnnnnnnnnnnnnnnnnnnnnnnnnnnnnnnnnnnnnnnnnnnnnnnnnnnnnnnnnnnnnnnnnnnnnnnnnnnnnnnnnnnnnnnnnnnnnnnnnnnnnnnnnnnnnnnnnnnnnnnnnnnnnnnnnnnnnnnnnnnnnnnnnnnnnnnnnnnnnnnnnnnnnnnnnnnnnnnnnnnnnnnnnnnnnnnnnnnnnnnnnnnnnnnnnnnnnnnnnnnnnnnnnnnnnnnnnnnnnnnnnnnnnnnnnnnnnnnnnnnnnnnnnnnnnnnnnnnnnnnnnnnnnnnnnnnnnnnnnnnnnnnnnnnnnnnnnnnnnnnnnnnnnnnnnnnnnnnnnnnnnnnnnnnnnnnnnnnnnnnnnnnnnnnnnnnnnnnnnnnnnnnnnnnnnnnnnnnnnnnnnnnnnnnnnnnnnnnnnnnnnnnnnnnnnnnnnnnnnnnnnnnnnnnnnnnnnnnnnnnnnnnnnnnnnnnnnnnnnnnnnnnnnnnnnnnnnnnnnnnnnnnnnnnnnnnnnnnnnnnnnnnnnnnnnnnnnnnnnnnnnnnnnnnnnnnnnnnnnnnnnnnnnnnnnnnnnnnnnnnnnnnnnnnnnnnnnnnnnnnnnnnnnnnnnnnnnnnnnnnnnnnnnnnnnnnnnnnnnnnnnnnnnnnnnnnnnnnnnnnnnnnnnnnnnnnnnnnnnnnnnnnnnnnnnnnnnnnnnnnnnnnnnnnnnnnnnnnnnnnnnnnnnnnnnnnnnnnnnnnnnnnnnnnnnnnnnnnnnnnnnnnnnnnnnnnnnnnnnnnnnnnnnnnnnnnnnnnnnnnnnnnnnnnnnnnnnnnnnnnnnnnnnnnnnnnnnnnnnnnnnnnnnnnnnnnnnnnnnnnnnnnnnnnnnnnnnnnnnnnnnnnnnnnnnnnnnnnnnnnnnnnnnnnnnnnnnnnnnnnnnnnnnnnnnnnnnnnnnnnnnnnnnnnnnnnnnnnnnnnnnnnnnnnnnnnnnnnnnnnnnnnnnnnnnnnnnnnnnnnnnnnnnnnnnnnnnnnnnnnnnnnnnnnnnnnnnnnnnnnnnnnnnnnnnnnnnnnnnnnnnnnnnnnnnnnnnnnnnnnnnnnnnnnnnnnnnnnnnnnnnnnnnnnnnnnnnnnnnnnnnnnnnnnnnnnnnnnnnnnnnnnnnnnnnnnnnnnnnnnnnnnnnnnnnnnnnnnnnnnnnnnnnnnnnnnnnnnnnnnnnnnnnnnnnnnnnnnnnnnnnnnnnnnnnnnnnnnnnnnnnnnnnnnnnnnnnnnnnnnnnnnnnnnnnnnnnnnnnnnnnnnnnnnnnnnnnnnnnnnnnnnnnnnnnnnnnnnnnnnnnnnnnnnnnnnnnnnnnnnnnnnnnnnnnnnnnnnnnnnnnnnnnnnnnnnnnnnnnnnnnnnnnnnnnnnnnnnnnnnnnnnnnnnnnnnnnnnnnnnnnnnnnnnnnnnnnnnnnnnnnnnnnnnnnnnnnnnnnnnnnnnnnnnnnnnnnnnnnnnnnnnnnnnnnnnnnnnnnnnnnnnnnnnnnnnnnnnnnnnnnnnnnnnnnnnnnnnnnnnnnnnnnnnnnnnnnnnnnnnnnnnnnnnnnnnnnnnnnnnnnnnnnnnnnnnnnnnnnnnnnnnnnnnnnnnnnnnnnnnnnnnnnnnnnnnnnnnnnnnnnnnnnnnnnnnnnnnnnnnnnnnnnnnnnnnnnnnnnnnnnnnnnnnnnnnnnnnnnnnnnnnnnnnnnnnnnnnnnnnnnnnnnnnnnnnnnnnnnnnnnnnnnnnnnnnnnnnnnnnnnnnnnnnnnnnnnnnnnnnnnnnnnnnnnnnnnnnnnnnnnnnnnnnnnnnnnnnnnnnnnnnnnnnnnnnnnnnnnnnnnnnnnnnnnnnnnnnnnnnnnnnnnnnnnnnnnnnnnnnnnnnnnnnnnnnnnnnnnnnnnnnnnnnnnnnnnnnnnnnnnnnnnnnnnnnnnnnnnnnnnnnnnnnnnnnnnnnnnnnnnnnnnnnnnnnnnnnnnnnnnnnnnnnnnnnnnnnnnnnnnnnnnnnnnnnnnnnnnnnnnnnnnnnnnnnnnnnnnnnnnnnnnnnnnnnnnnnnnnnnnnnnnnnnnnnnnnnnnnnnnnnnnnnnnnnnnnnnnnnnnnnnnnnnnnnnnnnnnnnnnnnnnnnnnnnnnnnnnnnnnnnnnnnnnnnnnnnnnnnnnnnnnnnnnnnnnnnnnnnnnnnnnnnnnnnnnnnnnnnnnnnnnnnnnnnnnnnnnnnnnnnnnnnnnnnnnnnnnnnnnnnnnnnnnnnnnnnnnnnnnnnnnnnnnnnnnnnnnnnnnnnnnnnnnnnnnnnnnnnnnnnnnnnnnnnnnnnnnnnnnnnnnnnnnnnnnnnnnnnnnnnnnnnnnnnnnnnnnnnnnnnnnnnnnnnnnnnnnnnnnnnnnnnnnnnnnnnnnnnnnnnnnnnnnnnnnnnnnnnnnnnnnnnnnnnnnnnnnnnnnnnnnnnnnnnnnnnnnnnnnnnnnnnnnnnnnnnnnnnnnnnnnnnnnnnnnnnnnnnnnnnnnnnnnnnnnnnnnnnnnnnnnnnnnnnnnnnnnnnnnnnnnnnnnnnnnnnnnnnnnnnnnnnnnnnnnnnnnnnnnnnnnnnnnnnnnnnnnnnnnnnnnnnnnnnnnnnnnnnnnnnnnnnnnnnnnnnnnnnnnnnnnnnnnnnnnnnnnnnnnnnnnnnnnnnnnnnnnnnnnnnnnnnnnnnnnnnnnnnnnnnnnnnnnnnnnnnnnnnnnnnnnnnnnnnnnnnnnnnnnnnnnnnnnnnnnnnnnnnnnnnnnnnnnnnnnnnnnnnnnnnnnnnnnnnnnnnnnnnnnnnnnnnnnnnnnnnnnnnnnnnnnnnnnnnnnnnnnnnnnnnnnnnnnnnnnnnnnnnnnnnnnnnnnnnnnnnnnnnnnnnnnnnnnnnnnnnnnnnnnnnnnnnnnnnnnnnnnnnnnnnnnnnnnnnnnnnnnnnnnnnnnnnnnnnnnnnnnnnnnnnnnnnnnnnnnnnnnnnnnnnnnnnnnnnnnnnnnnnnnnnnnnnnnnnnnnnnnnnnnnnnnnnnnnnnnnnnnnnnnnnnnnnnnnnnnnnnnnnnnnnnnnnnnnnnnnnnnnnnnnnnnnnnnnnnnnnnnnnnnnnnnnnnnnnnnnnnnnnnnnnnnnnnnnnnnnnnnnnnnnnnnnnnnnnnnnnnnnnnnnnnnnnnnnnnnnnnnnnnnnnnnnnnnnnnnnnnnnnnnnnnnnnnnnnnnnnnnnnnnnnnnnnnnnnnnnnnnnnnnnnnnnnnnnnnnnnnnnnnnnnnnnnnnnnnnnnnnnnnnnnnnnnnnnnnnnnnnnnnnnnnnnnnnnnnnnnnnnnnnnnnnnnnnnnnnnnnnnnnnnnnnnnnnnnnnnnnnnnnnnnnnnnnnnnnnnnnnnnnnnnnnnnnnnnnnnnnnnnnnnnnnnnnnnnnnnnnnnnnnnnnnnnnnnnnnnnnnnnnnnnnnnnnnnnnnnnnnnnnnnnnnnnnnnnnnnnnnnnnnnnnnnnnnnnnnnnnnnnnnnnnnnnnnnnnnnnnnnnnnnnnnnnnnnnnnnnnnnnnnnnnnnnnnnnnnnnnnnnnnnnnnnnnnnnnnnnnnnnnnnnnnnnnnnnnnnnnnnnnnnnnnnnnnnnnnnnnnnnnnnnnnnnnnnnnnnnnnnnnnnnnnnnnnnnnnnnnnnnnnnnnnnnnnnnnnnnnnnnnnnnnnnnnnnnnnnnnnnnnnnnnnnnnnnnnnnnnnnnnnnnnnnnnnnnnnnnnnnnnnnnnnnnnnnnnnnnnnnnnnnnnnnnnnnnnnnnnnnnnnnnnnnnnnnnnnnnnnnnnnnnnnnnnnnnnnnnnnnnnnnnnnnnnnnnnnnnnnnnnnnnnnnnnnnnnnnnnnnnnnnnnnnnnnnnnnnnnnnnnnnnnnnnnnnnnnnnnnnnnnnnnnnnnnnnnnnnnnnnnnnnnnnnnnnnnnnnnnnnnnnnnnnnnnnnnnnnnnnnnnnnnnnnnnnnnnnnnnnnnnnnnnnnnnnnnnnnnnnnnnnnnnnnnnnnnnnnnnnnnnnnnnnnnnnnnnnnnnnnnnnnnnnnnnnnnnnnnnnnnnnnnnnnnnnnnnnnnnnnnnnnnnnnnnnnnnnnnnnnnnnnnnnnnnnnnnnnnnnnnnnnnnnnnnnnnnnnnnnnnnnnnnnnnnnnnnnnnnnnnnnnnnnnnnnnnnnnnnnnnnnnnnnnnnnnnnnnnnnnnnnnnnnnnnnnnnnnnnnnnnnnnnnnnnnnnnnnnnnnnnnnnnnnnnnnnnnnnnnnnnnnnnnnnnnnnnnnnnnngctcataaacctttgtcgccatccaactcagattttgcggattcctcacttcaaccctgtccgggaactgccgacatagcagcttctcgcctatgaaagctttcggacaatcaaggacttcgtaatactcgttgcctatccgaacgctttttgtgccgtccataactctgtaaaacgtcactggcgcatactggaatatgtccgcgccttcagggtaaaatctctgctctctttcagcgaggctcaagccgtaaattctctctctcgacatccccgcgaatttcgggttaggatgagagcgactgttataatctttcagataatttgaaagcatgttttttatttctgcgaacgtaaatactctttccttatcaagtagcaactcaagttcaaacctttgccacaaagtcctccacggacgttcaatttttcctttcgcttttgagttgtatggcttgtttgtttcaagctccacccctaactccctaaacaacaactcgcctctgttttttcccaatgggccgctgtccgttatcagcttttccggcaacccgaaaagcggattgtcatccttcttctgaaacgctttctggataaaccttgcggagccgtcgaagtcttcgccgtgcgcgacaaccgcgtcgatgaaaaggactcccgaaaacccgtccgtaacgccgtagtagtaaaacatctcccggcgcgcgtcttctaaaactccatcagcgttgattcgggagtttttccagctttctctttttgtggatcggacggcaaacaaccattccccagcagcgtccctatccaccgggtatagatattcgctgccgctgccgtcaaattgccatgcgtgattagcgtatttttcagttaatcttcgatactcttccctagttgtaatattgagttttcgcctgatgtatttcgcggtcgccggtttcaaagctccctgcgggattcgcccgtcgcgctctgccgctttaattgcgctctcaagtggcaacaccctctttttttccccggccatcgcaatcaatttctggtactcgcaagctatcttcgtatattcaacaagctcgttttctctcttgtcggctttataatccgagcgcaaagcgcgcttccggcctctcaatttcgcaatgtttcgcgataggtttctaggcgacatttttaacttcgcagcttccgccgccatcgccgcgcttcgttcgccgtgcggcgcggactcaacacgctccgccgcttccaatagttgccgtaccatgtctggactcaatctctctctccttttgtatctaacttaggaagtttgctctcctctggatgccagcccagcatatcatcgaatctcgacatctcattgcctacgcatctgatcgcgtccctgattcggtctctcgtttccgcattctcaggctgcatctgaaccacttctcgttgttcaagaacctctttcaacgagccgctaaacagcttcgccctctctcggagcacaacaatatacttaaacaacggctcgttcgcgctctcaagttcaagttcttccagcttttttattaacttatctttgtctgtttgtagttttctaaggctctcatccctgagatcgacgagctttgtttgcgtgctaagcgccttctttatgttttttataaaggccacaaattccgggcgcgggagcgcgtttgcttcatctatgctcaaagtcagtttttctgtgtcccccggctcctgaacaataatcttgtcgccctcgaatcggacactcggatcattcaaaagccccataatctcaagggccttaactgagtccgacatcttgcctataaaaaacacttcccggtttttgaaaaattttatatagttgtatccgcttctctcacatattcctattgcctcgcaaaatccttgaaaggcttccctgccgaagcgcgttttgacttcgttcagtaaagcgccttgcaaagccgtcagcttgtcaacctcgtggaagatcgtttttctttgcaagtctatcattctgcatttcgccgccgccgccgccagcacgtccggcccgcttcccggcggcaaaagcttttttacatccagaagttcaacatcggtgttcacgatttcggctttgtcgattgcttctagcgagacgttgttttcaccattcattgtgtgtttctcctatgttatattgtcgtatatcaactaaatgctaaaaaaagaggcgagcggcaaaaccgcttgaaaggaggtgaaccatgacccgcgtaatacccgccgcccgcctgtatcctgtgaaaacatgaacatagaggctctgttaaagacaggcgagatcggcgaccgccgaccccgcccgcgttggaggagaaacagaaaacaaatcgtctatatttagttatcacttttgccgtccttcattgccctgatctgctcccggagcctcataacacaccccgacagcgtcgcgaccatgctctcgatccgaccctcgaaagcctgtaagagcgcgtcttcagtttccagcgcggacagttcagcccggacttgacgccaccgtccccggcgtttccaattatgcaagctgaactcggaaacttccccatccactccatgcttttttatcaacatttggcaaactttcggaatggagccggtatcaaagtaaaaccgcgccgcgtcgccgcccagcctcgcgaattttcctttttccttgccgctcatcgttcgacctcgatcccgacgtttctgagttttataatgtcgcattctgtcaacattggttgtttcacattccaaaactcttcatagtcaattccggcaattcgggcgagggcgacgcgcatccaattcgacttgcgcttattgcaaatgacacgcgaaaccgctcctgtcgtaacaccgagcctttttgccgcctctcgttgtgtaagtattcctgcggtagccagcttgctacgcctatttcgctctaatgtcttactggaatgccacgctatcgtttccgcctgactgctcatacatactccctttgacgaggaaagctgttgtccattggcttgaagtgtgatataatcgctttggctgattgtatggtttgctttatgcagatttggcatactgtgattatagctcggtatactgtgggtgtcaacatgtttgccaaatattatttgcgtaaccaaacacgtgtgatttgaggtaaaagagagcgtggaagaaaaaaaaactccttcaaaacccaaaatgcctccttttgacaaggttgctattggtcagcgaattaagcaggcaagaaccgagttgggtttcactcaaaaagtgtttgccgatttgctatctgagtttttacagagttctaaaggggtttcctatggttttttatcacaggttgaaacaggtaagtataagcctagcgcggaattattatatgcaatgcaagctttttttaacattaatttatattggatttttcatggtttaggcgatgtttttatttccactgaaaaactactgccagaggatgaaaaccatccacaacggattgcttaccgttcagtgtttttattgatgaatatatcagacctaatcttttatggtaaatacgctaccaataaaatcaaagatttaaatgtacgtttggttactgtattatttgagttaaaattgaaaaacccagtattgtttgatttctttttgcatggcaatgacaattcagacatatttgataccttagaaaaaaaccaaaaaagattatatcttttagatgaggctgaaagagaagctttactttcagggtttttattagataaaactgatggcgaaacgataaaatgtccccctcgaaaaaagaagtgattcttccgatagtcggttccctctctatctatattaataaaagatgtcttctatctcgttccgctcatggctcgcccccggaagcttccgagtccccagctaatcccgataaacgtaaaaaaacgaaaaaataacccgaactcacaccctcaagatcatcccgttttcttgcagctcccttgcaaaatttgcaacaaatcttgaaatgctgcaaagcttttctccaaaatataccgcctcaccctcatgcccctctctcgattgtccgttttttgcaatgcccttgcaaaacttgaaacaaatcccgaattgttgcaaaaactgttttccgaaactcaccctcttacgcctcatacccctctctatatatacaatctcttgtctttaaatagtccatcgggcgcgccgcgcccgcccgcttcacccgccgtcaccatcgaaacaccgccatgctcccggagcctctggactcccgccgccagcccgctccccggcgacaccccgctttgctttcatccccgaaaccttcagccccgatccggcccgaccaccgccgccagcccgctccccggtgacaacccgcgccgcgatctcatccatcgggccgcgaagcgcccgccctttttactttcgtttccgaaacctaacggccccgatccggcccgcgccgccagaaggctcccgcgcccggcctgacgctccacaaaaaaaaggacggcccccgccgccacaacacaaaaaaaatattttcttccaaacccatcgaatactttcacccgcgcaaccaaattccccgacttccgaaagtccacaacccccaaatgaaagtattcggaaccgaagttatgacagaaccttacgttttttcagaccccccggtacatggtatcagcgaaatttatgaagccgtatttcttatcgccgaatccgggataaatcgtcgcgctaagacgttcctcgcatcttcagtcgtgtccgtgaaaaaaaaatgggggattagaacttgtaccctatgccgtcatactttgttccgtccgcggcaatgcaaggcgaacagcacccgctctgcccgtccccagcagcctcaaacagttcctcgcagtacggaccgcacgggcacggctcgtcaagatcatcgccttcgatatcaaaaatgcccgagccttccgcaacttgcatacttgtggccgtattatatccgctggtgttgacgattatgagtacggatcttttgtatccgagagcgacggagcatacgacgccgacgggtttatcaagaggattcagattggagagcaaagcgtagttccagccgggtttgtagttgccggagtaatcaggtccggaaactcctgaatattcgggggaacaaagctcgaacctctgttccgcagcgttgtcgtcccgaataaatgtcccctgaaaactgaatcctttttggcccagacattcgctgtcggacctgtcgcacaccgaagcgcaaagcccggaaggcgtgaaatccgccgagtacggatgcgacggcatcaccgtctgggcgacggccgtgtgcgaacaatccgcgtccgtcggaaaaaccttcattgccgtttcgttgatgtcgtccgtccttccgcactcagtcaaatcgacgatgggaaggaattccatcagggaagcgttgtccgtgccgatcaaggatctcacgggaaatcccttgcacgagttggcggcatcgttgatagccgtcttaagaacaagagtcgctcttatggcgtttctcactctcgttgacgcctgatactggtaatacgaaggcgtcatggcgcccatcaatatcagcattatgcacaaaacaacaagaatttccgccaaggtgaatcctttttcccggcgtcgcttgtttcgcattttttctccctgaatattattctgtttcaggcgcgcaataaaaaagcgcttcggctaactatggtattccccatttcgactggagtcaaacaatttgcccgtccgagaacgcgtgcgaatttgcctcataatgtatctatatcaataaaagtatacacccgcgcccaaaacactgtcaaacacagttcatttcagcggtttcgagttcaaagagcaaatgaaaacagaactaaaggctaaagattgagaatccgcgcaatccgctttcacgctgctggaccgcatttatcaccaatccgcgctggaactattctatgatatcaacccggcgggggactttatagggagcaagcgcagagcggagaaatttcctcagttcagccggttcagctgaggctccggagcgaagtttcgcttccgccataactctctctccgagggaatcgtccgggacgccgaagacgcggcagctttccaccgccggatgcgcgccgagcagcgcttccacctcctgcggatagacgttgaacccgccgacaagcacaagccttttcttatggccggttatgtatatatatccgtcttcgtctatgcgggctaggtcgccggagaacaaccaaccgtccttaagaaacatcgccgtgtcttcgggtttttcgagatattcgcgcatgacgttgccgccccggacgcaaagctcgcccgtatcgcccgtcgggagcgcctcgccgttctcatcgacgactttcacagttatgccttcaatcggcgggcctactgagccggctttcacaaactccctgccccgcatcgggttcaccgaagtcaccggcccgcattcagttatcccgtacccctgatatacatttgcgttgagtctctccacaagcccttcgtatagatcgtctgtcagaggagcgcctccgggaactatcgccctcacgaacgataggtcgctccccgccgagccgaatttatcaagcagccttttgtttatcgtcggcacgttcggaaaaacgcttatcttctcttttttaaggtccgccatcacgcgatcctctgaaaacatctcatgcagaacggtcttggcgcccgcgagaaaaggcagatgcagacatgtggtgcaggcgaacgcgtggaacaggggaatgacggtgagaaaagcgtcgtcttcatgcgccgccgccgtcgcgacgctcgaacgggcgttggtcatcagtcctagatgagttaggcaggctccgaggggatatcccctccatgcgttggtgtagatgatagcagccgtgtggttcggatctaggtccgcgggcgccggcgcggggaccgcctctgatatcgccttcttcatgtcgcgcttggccgggtcgcccatagaatcgctgtaaagcaacttcgttccggcgttcgcggcggcctccctgacgggcggctcgaacatcggatgcattatcgccagtttcgccgcgctatctttcagcatatattcaatctcgcgggcggaatacagcgggttgatagtgacgacctccaccccggccgcgaaggccccgtaaagagccacagggtattccggaacgttcggaatcgctatcgccatcctgtccccgcgcgacatgcccatctcgccgagcgcgcccgcaaacctcagcgcgtccgcgtaaagctgctcgtaccttatcactctgtcgtaaaaaacgaccgcgggccggtcgggaaaccgctccgcgctattttttagattgtccgcaaggttcataaaatcttattcctgttttccgggcgcgcgcgcacaccgcgccgcaaagcgccctttatacagtttccttattatgtgggtggaaattgcctctatcgaaaaaaaacgagggtcaagctcgcgatgcgaggtctttcaatagccagtcgacggcctctgacaggtcttctgcaatgaagtcgggttcgacgccttcgcgctccctgttgaactcccagtcgcctctgccgtatcccgtcaggacgagtatgcctgcggcgcagcccgcgcgcttcgccagcgccacatcgctgagcttgtcgccaatcatgtacgaacgggcaacgtccagtcccatttccgccgccgccctgtcaatcagtcccgtcttaggtttcctgcagtcgcagtccatcctgtaaggcggctctccggcggtcggatgatggggacaatagtaaatcccgtccagctttgcgccgcccacggccagcagctcgttcatgcgcgcgtggacatccgctatgagtctttcagggaaatagccgcgcgcgacgcccgcctgattggtgaccagaacagcgggcgctcctgcttcgttcagcttttttatcgccgaagccgacttttcgagcagcttgaaccggctgacatggttcacatagccgatctcctcgctcagagtgccgtccctgtctatgaaaacagcgggtattccgctcatcgcgcgcctcccggcagccgccgcgttttcaccgcgacctgtcgttttcctctataatatctttcatcctgaacacgagatcgagcgccttgcgcggagtcagctcttcggggtccgccgcgcggagcatttcctcgatgcggctcggaggctggtcgggaataagcgcgagttgcgccgtccgggcttcagggacttcgatgtccgactccgcttcctgagaaaccagaatttccgacgcgcggcgtatgaccgaggcgggtatgcccgccagtcttgccacctcgactccgaaactcctatccgtgccgccggggcgcaccttgtgcgtgaacagaatctccctgccccgctcaactgcggaaacgtggaagttctctatcctctcgaacaggtcggccatgcgcgtcagatggttgaaatgtgttgcgaatagagttctcgcgccaatcctctcgtgtatgtattcggagacggcccatgcgatgctaatgccgtctgcggcgctcgtgcctctgccgacctcgtcgagcagcacgaggcttttctttgtcgcgttagtcagaatcgtcgccgtctctaccatctccaccatgaacgtgctgaggccaagggtgatatcgtcgacagctccgaccctagtgaatatcctgtccaccacgcctatctccgccgcgcggcacggcacgaagctgcccatctgcgccatcagcgttatcagcgccacctgcctcatgtaagtcgattttcccgacatgttcggcccggtgatgatatgtatctggctcttcgagcaattgagcagggtgtcgttggggatgaatgtgcgcgcgggcatcgtcaggtccagcgacgggtgccggccttcttctatctttatcgtttccgacgcgctgacctgcgggcggcagtacctgttttcctccgccgcctgcgccagcgactgcaacgcgtccagcgccgccaccgcccgcgacgtcttcagcatccttccgatgtgccccgccagattgtcccttatcccgcagaacaactgatattcaagctcttcgagcctgctttccgctccgagtatcgcgaactctttttctttcagttcctctgtgtagaaccgctccgcgttggatgtggtctgtttgcgtatgtatctatcagggacgtttgccagattggccttcgtcacttcgatataataaccgaacactttgttgtagccgattttgagggatttgacgcctgtttcccttcgttctttttcttcgaggtcggcaatccatttccgtccgccttttttcagcgcgcgcagttcgtccacgcgggcatcgaagccgtcgcggatgatgccgccctcgcgggcggacctcggagcgtcgtcagaaacggcggcggcaaggtcggctcgcgcgtcttccagcgtgtccatgtcggcgcgcagggactccagcatgtcgcacttgaaagcggaggcgagggccgcgagcgcgggcagcgccgctagtgagtcgcgcactgccagcgtctccttgggcgtgattagcatggtggcgacccggctgcaaagcctctcgatatcccttacctcggaaaggctttcccttgcgccctcccgcgccgtcctgttttccagaagctcgccgacggcgtccagcctcaggtttatctccgccgggtcgttgagaggctgttcgagccagttgcgtatcagcctctttcccatcggcgtgagagtcctgtcaagcgcccacagaaggctccccttcttttccttctcgcgcatggtttccgtcagttcgaggttgcgccgcgtcgccgcgtccagatacatcccgtcgcggggccggtagagcgaaacggacatcacgtgcttggggtcggcgcgcaggttgtccctgacatagtccagaagctgcccggcggccattatcgcagcggggaactcctctatgccgaatccgagcagcgtcttcactccgaaatgcgcgcacagcctgtcccggtggtacggcgcgtcgaacatcaggtcaagctcggtgactttcacgtcgggaaaacgggccgatattctaccggcggcgtccgccccggaatcgcgcatcgccacgacgcattcgccgggcgacagccgctcgatctccctgaccagagacgaatcgtccgccgacctcgatatctcgcccgccttgaactccccggtcgaaacgtcgagtatccccagcccgaacctgtcgccggcgtccgccaccgaaagtatgtagttgtttcgcgatgagtccagcctgtccagatcgagatacgttccgggggtgacaaccctgacgacttcccggttgacgagtttaccggcgaccgcgtcctctgtctggtccgcgatggcgaccttgtgtccgcgctggatgagttttgccacgtaaccgtcggcggcgtgatggggcacgccgcacatgggcagtttgacgcccttgccgaactcgcgcgcggtcagcactatttccagttcggcggcggcggttttcgcgtcctcgccgaacatctcgtagaaatcgcccagccggtacatcaaaatggcgtccctgtggcgctccttgatggcggcgtactgctgatacataggagtggcgttcatacggcctctcccttcagggcgtgcggagacgctcccgtgatgcgggcaagcaactcatctcccggctcggccttaacgccttcgcgcacagtgaaatccactatcctgttctcccgcgtccgcccccgccgccgctctccgcccagagactcgaagaccatcgtttccgcgattccgcctacaaggctttcgttgatttccctcgatatattctcctgcaaatccaacagccgcgcaagccgcgacttcttggcgtcgagcggcgcgtcgtcggcctgcccggcggcggcggtccccggacgcggcgaatatttgaacgcgtacaactgatccacccgcgcgcgcgacgccagctcaagcgtccgctcgaattgctcttccgtctctccgggataccctactatcgcgtccgccgatatgccgcagcccggcgagtagtttcttatcatttctattgtttcgagataatacgccgcgtcgtatccgcgcctcatcctcctgagaatctcgtcgtcgccgctttggaacggcgcgtggaaatggccgcacgctttcggcagcgccgacagcccgcgcagaaactcctccgtcacccatttcgggtgcgacgttacaaaccttatccttgttacccccggcagatcgtggacggcggctatggcgtcgagaagggatcttttcggcgataagtccagcccgtaagcgagcacgttctggcctagaagaatgatttcccgcgcgccttcctccgcctttatcgcggcttccgctcgaacttgagccggagtcaggctggattccgcgccgcgcgcgtatggaaccacgcagtacgagcagaaattcgagcagccgcgcaccaccgtctggaaagcggacgccgggccgggggcaaacagagccgctcccgccgccaagccgggaaagttctcggccacagcctcccggatgatgtccgcgtagtcctgcggcctgcccgccccgacgacgtagtccacgtcgcgaatttccgcgcggatgtcggccagttcggcggagcatcctcccacgccgacgacgacgggcgcgccgccagtctttttgcgattgcgcaacacgcctatgaagctcagagccttctcctcggctttgcgccgcacgctgcacgtgttgacgtgaaccagcgaggcatcttcgggcgtcgccgcctccgccatgcccatcgagcgcagcatccgcgcgagcgacgccgagtcgtccatgttcatctggcaaccgaatgttttaatgaaaaatttgggagggcctgtctccgccatgaagatcagcctttcaactccctgaaaaagcaggaccatgctcctgtgtggcaggccccctcgccgctctgctcgacaatgaccagaagcgcgtcggagtcgcagtcgtacatcacctttttcactttttgaaaattgcccgaggtcgcccccttgttccagaactcgctgcgcgagcggctccagaaccacgtcgtgcccgtctcgatcgtccgccgcacggactcctcgttcatgtacgccaacataaggacgtccccgcttttttcatcctgaacgatagccgggataagccctttttcatcgaatttcaaatccatgtcgaaaccttctctcttggcgcaatgaggtcacagcctcatcgcgattcccctgtcccgcagatattcctttgcctgccttatggtgaaaatcccgtagtggaacagagaagcgaccaataccgcgtctgtcctgccgtcatgtatcgcgtcgtagaggtgagaaagctcgcccgctccgcctgacgctatcacagggattctcaccgcggtggagatggcgagattcaactcgttgtcataaccgattttcgtgccgtccctgttcatgcttgtgagcaggatttcgcccgcgccgcgccgttccgcctcgaccgcccagcccaccgcgtctatttcggtcggttttctgcctccgtgcgtgtagaccacccagccgtcgcccactcgcttcgcgtcgatcgcgaccactatgcactgcgctccgaaaatttcggatgactcgtttatcagactgggattcaggacagccgcagtgttgagcgacaccttgtccgcgcccgcgctcagcagttgccggatggtggcgacgttagtaatgccgcccccgacggtgaacgggatgaataccgtctccgccacccgtctgaccacatcgagcattatgtggcgcttgtccgaagaagcggtgatgtccagaaacaccagttcgtcggcttcggcttcctcgtatttttttgcctgctcgacagggtctccggcgtccacaaggttcacgaagttgacgcctttgacgacgcgcccgctgtcaacgtccaagcagggtattatccttttggcaagcaaaacgccctccgcgccgcctactgcggaaatctttcgacggcggccttgagatcgaagtcgccggtgtacagcgcgcgcccgatcaccgctccgtcaaggttcggtttttcaagagcggcgagccgctcgacatgctccacgcgggacaccccgccggcgcacaccaccgggatttccagagcgtccgccgcctgcgacatcatgtcgaaattcggctccgtcagcatcccgtcccgcacgatatctgtaagtatgattagtttagcgccgtcgtctcgcatcctgaggcacgcctctatagttactatttcagattcgtccgtccagccccggagagcgactttgccgcccttcgagtcgatggacaccgcgaccgcggcgccgaactcggagaaaagccccttggcaaaatcccgcgattcgagaacggacgtgccgactatgacgcgggaagcgccctcgtccagccagcgccggacgtcagcagccgaacggacgccgccgcccacctgcgtcctgattcccggcgacgcctcgaatatggcctttgcggcgtccaaattggaaaaacatttctggtcgagcgcggcgtcgagatcaatcacatgcagccacttcgtcccctcccgcgcccaccttatagccatttgctccggcctctccgaatacaccgtgcaaagctccctcttgccctgcgtcagccgcacgcatttgccgtccatcaaatctatcgccggatataaattcatcccttcgccatcctcccgaaattctcaagcagcttcatccccatcctctggcttttctcagggtggaactgcactgcggtcacattgtcgcgcgttatcgacgaaacgaactcgccgccgtaatccgtgacggtcatcgccagcgccgggtcctccggctcgacgagaaacgagtgcacgaaatagaagaacgagccgtcgggtattccatcagcgaccggccctctgttcctgaactcgagctggttccaacccatgtgcgggattttgaggtctcctctgaagcgagtcgccttgcccggaaaaacgccgaggccggggatgcgctctccttcttcgctgtagtcgaaaagcatctgcagtccgaggcatatccccaagaacggcttgccggatttgatttcagagacgattagccccgcaagcccctgcgattccaagtttttcatggccgccgcgaacgcgccgacgcccggaagaaccactcccgcagcgtcccggacgtcctttgcggaggtggtcacgcgcgcgtccgcccccacccgctcgaacgccttctgcacactcctcaaattgcccattccgtagtccacaatcgcaatcatgccaaatagtgtaggagttcgatatttatgtgtcaaacgatgacgtccgggcgcggcgcgtcactgattgagtttttctagggtttcaatgaatgagtctatgttgatgggtttcgaaaccgcgccgtccgctccgatctcgcgagcgagagcctcgatccgggcgcgcggcatcgcgctgaacaggaacaccatgggagccggagccgggccgctcttaatctttccgcacagttccgcgccgcttagccccggcaactgcacgtccaacatcacaagttgcggatcaaaagccgccatctcctcgaacaactctgtttcattcgacgccaccgcaacgtcgaatccttcggaaagcagcatcgtcttcaccaagtccaacaggtcgccgtcatcgtccacaaccagaatcctgttcaccctgcgcgattccacatgctccacagtctttagaatcggaatagtgaacgagaacgtcgagccttctccgggaaccgattcgacttttatccgtcctccgtgcgcctcaatgaactccttgacaatgcttagaccctttcccactccgtccgaaacaggatgcgagcctttcctgacttggaagaaaggcttgaaaatgttcttcaggtcagcggacgcgattccgatccctcggtccgaaacgcttatctccacgaaaccgtcctcgcgggtcgccgacacggcgaactgcagcctctccggcgtcgaatacttcaccgcgttttctattaggttgtccagcgtctgccgaattctgccatcgtcgcatttgacgatgacgcctttcagcgattcggacacctccttcttgaaggagtattccgacgttcggaacctgcgccggacgatgctctctatcataaggcgcgtttcgttcagccgcgcctcgaggaagttgtatatgttgatctcggccatatcgtaggtcgtcgttccgctctcgaatgcgtccagcgtgataagctcttcgaccagcttgagctgctgccggcctctttcgttgatggttttgattttctttttggcggcgtgcggcagatcctccttgagcaacatctcgctatatccgagtatcagcgacagcggcgtcctcagctcgtgagatattgaactgaggaagttaatcttttcctgctctatcctcttcctgtcggttatatcgcgcgatatgcccagcacggaggacacccgaccgtcgggggatttgatgggaacaagcctcgaacccagccagaactcccggtcgggaaactgcgtgacggtttctatgtagaacgattctccggattcaaaaaccctgtcgaggctctttttctgcctgtcggcgtccggcgagccgaacaactccgctcttgtaacccctatcgtctgttccggagtcatgccaagttgacgcgcggcgaaactattggtgtatctcacgatgtcgtctcgatcgactatgaaaatgaagtcttcggcggcttccgccagagtccggtatctctcctcgctctccctgagcgcctcttccgcctctttcatcccggttatgtccacatccatacagatgaactctttgtttccgtcccctacgtctatcggaaatatcatagaatacactacgacgctggagccgtctttcttgttgcaaatccattcggacgggccggaaggaaggttgctttcattcatctccttaagcagaatgtgaaaagcctcggttgccgcagagtcgagagtcgctccttccagagttctccctatcatctcctcggcggaccatccgaaaaccgattccgccgcgttgttccagtaaataacccggccctcgacatcgtatccctcgaccgccacgttcggcgtgttgcttatgatggcgtccaacctttgttcgctccgtttgagcgcggtttccgcttgatgcctcataagcgcgttggcgaatatctccgccaccaccgacagcaacgcgctgtggtccctcttccatcttcttctggtcttcaccgaatcaagccccatgaatccggaaagcttttcgttggaatacagggggaacataatcagcgacttgatgttttgcgcgttgaaaatgcttttttcaacttcagcgttttcaggaatcgcggacacatcgtctatagctatggtttctcccctgatgaacttgggcatcagccatttgagcgtttccaacggaatatttttgctgttctcaatctcggagctgattccctccgcgcaccattcatgcgtgttatcgacgaacaatccgtcgtcggtaagacggaacagatagctgcgatcgacctgcaggaattccccgagccttgtgagcgcgtcattcacggccgaatctatattctccgccccgacgcccacgaaactcgccgatatatccataacgacgctctggaagtcgaagttgtagcgcaacgcctcttccgcccgccttcgcgtcgtcacgtctctcatcaccgtcacaactctggcgacggcgtctttttcgaatatcggtatcttgcgggtctccgttattatcgtttccccgtcgatttcgttgatctcttcggaaagcatcatgttgccgctggtgaaaaccgatttgtattcctcccggacggagtcatcgagaaaagaaaaaacatcgaaaacgttccggcccgcgatgtccgtcggcaaaccgctttgcgcgttccattccttcatagttttgttgaaaagaacgatgttgaaatttctgtcgacgacatgaatcgcgtcggccatcgagtccatagtaagtctatacctcagttcggactccctgagcgattgttcggcgcgtcggcgctgtgtaatatcgcgcacgaccgatatgaccgtcctgttcggcgaattcaaatcgcctttcagcgagtgtattgcctcgaaatacatctccccgtccgcatatggcagagaatacgtcgcggcggatttctcgcccgtctcgaatgttttgttgaccgccttgtttagcgcttccgcggcttccggaggcagcacgtctgttggtttttttccgataaaagcctcgggcggcgcgtagagcctgtctgatctcgaagcatggtagccgactattcgcccttcaagattcacttcgaataatatatccggcatcgccttcagagtggtctcaaggcgatccctcgaatccctcagatcttcctccatgcgccgccggttcgagatttccttcctcaactcttcaataacttcgctgaactccgccgtgcgttccttcactgtttcctcaagcctttcttgatggctgagcagttgttcctctgccttccttctctccgttatgtcagtgatgaccgcgaaactgcctgaaaaccctcccacagcgtcgaaaagagggttggcagacacgagcgaatgcagaggcgagccgtcagaccgggtgaacgtcaactcgtattttccgccctcgccgagctttctccttgagaattgttttttaaatagggccaaattattcgcgtcgaggaaatttgttatcgactttccaacgactccgccgcgttcgcgcccgagcatttccaacgcgcggttgttcgcatacgtcatggctcccttttcgtctaacaccgttatgccgtcgtacatggtttctactatgagcctgaaatactcctctctctccctcagggcgttttccatctttatctgttccgtcatatctcttatgacgccctgatatccaacgaccgagccgtccggcccacggcgcgcggtcgcagttattttgcagtctatctcgcgtccgctcttgtgcctgagtttgacgtcgtaattcctgacggagccgcgggtctcaagcgcagtctgaagcggctcgcgatctctttcgtccacgtatgtcttcaacacatttctatttactatttcttctctctcatagccgagcagcgaaagcgccgcctgattggcttccagcacaatgccttcccgcgtcgatacgtacacagcgtccagagactgctcgaacagcgctttgtatctgtcctcgctctccctgagcgcctccaccgcctctttttgtctagtaatgtctatcccgaacacggtgattccggactgctctccgttttcatatatcgggaacgaattgttgatcacatgcctgatttctccagaggccgtcttgattcttgaaacgattatgtcctgtttccccgccatccctctggcgagcgtgtcaatctccattttcacatccgcaaccggcacgaactcggtcacgtgtttccccaaatcggccctcgtgtaaccgtacatctccagaacggcggtgtttgcgtatgcgacttttccctgcatgtctatttcaatcatcagaacggggatgttttcagcgatttctctgaaagctgccgagtcgattcgccccgacagacttgtcggaggcggatatgaagagttatcgggggacgattccagccgcgcgcgcaactccgcgacctgcttctccaactcttcgtatgtgggcttcttttcaggcatattcttattatattctttccggcttccgtcccgcgcgcggcctaaaatatcgcgcgctatctcaggaacataaacgccgaaatggcaaggcccgccacggccagcccccatgtccatgccagcgttttccgggtgaagacctgaacgtcctctcccagaaaacccgcgatccagacattgtgcgtgttggtcgggtcgctcacgccctgaatcatccccaccgagtagaacgccgcgactaccgccatcggcggcagcgcgccggtggaaatcattatcgccgctatccctattcccatgccccacacgttcaaaggcccccggtacaaagccaacggcgcgagcgcggtgaaaacaatcacgtagagaaccggcgcgctcggcgctatccgcctcatcacaggctccatgtatgcgccgaccgccgggtcccacacaacgcgtatcaccatgcctatccctatgattagcgccaccacgggagcgacgcccgttatcccgtcgaacaccgctttcgtcaacctctgaatcctgccgttcgggccgcggccggacacgatcaggcagtacagcattcccgcaagcagcgccgtgtttatcgggaacgcgtatcctgcgccgcctctcaaccggctggcaatgttgaatcccagaacgagagagagaggaataagcggcgtgagaaccgccagaatcccggcccgccccgcgtcccctgccgccgccgcgcctcctcccggcggaaccgcccagaaggatgtgtgaccccgacgtccgtgcaaaatgataaaaccgaggaccaccagcgcgaacgggatcatgaaaggcagaataaaacctatcaactgattctgagcgtcgatcgcgctcactgtcgagcttgccgtcattatctcagtgtaaaacttccagttgaccgggttcaacgctccgccgaggctcattccgaacaggaacagagagcctgcgactgcgggagtcacgccgatgctcatgaggatcggcagcattatagacgccaccataatgaccgctccgaggcccaccaatgacgagaataacagcgccgtcacgccggtcagcagcacgcacgacacgatcttgttgtcgccgcccagttcggacgcccatctgatgatcgtcgtggttgctccgctcgacttgagcagttcggcgagcgccgcgccgagcacgactgtaataaccaccggccacagcctcggcattccctcttctatcacaactctgaaaaattcccgcgccagaacgacggcgttcgatcccggatagctgaatgaaaggccgtggtagaaagctccgcccacgatgtacagcgtcgcggccatcagcggcaacgctatcagcgcgggcagtttccccagatacatcagcgccgcgaaagccagaaacactccgaacagagcaagccctaccgccatttccattcgcgttcacctttgttgattagtctattccgcgacttcgcggagcggcgagtctcatttctcgccgttctcggattgcggccccggataagacgatcttttgataatcaccgacgctatcctccgcccgaccatccgttccactttcatctcgtaaccttcgatatcgactgtctcttcctgtttgggaactttgcccatcgtatgaaaaatcaatccgcctagcgtttcgaactcttcgtcgtcgttgaactccgcgtcgagaatttcgttcagttccgcgatgtcgatcctagcgtccacgcgcaaagtgtccgagtccacccatctgtaaagaggctcttcggtgtcgtactcgtcccatatctccccgacgatttcctcaaggaggtcttcaatcgtcactagtcccgccgtgcatccgtattcgtcgatgactatcgccagatgcgtccgcttcttctgaaaatcatgaaggagatcatccaccatcttggattccggcacgaaataagccttgtggacgtaatctttcactgggtccgagtcgcgtccgtctttcagagcgcgcaacagagtccttgagttgaccacgccgatgacgttgtcctccccgccttcgtaaatcggaatgcgggaatgcttgtgctcttccatcagaaccgccatgcggtccaccgtagtgtccgccggagccatccgcatgtccggcctcggcgtcatcacttccctcacctgcgtttcgccgaattcgaccacgctgcgtatcatttctctttcagttttgtctatgatgccctgctctccggcatcgtccacaattcccagaatctccgactgggtgatgaacgggccttccgccgggcctgacttcccggtaaatatcctgagcgtcagattggctatcatcacgaacactttgcctatcggcgacacaatagcgtgaaacgtcgaaatcggcttgatcatttttatgaccacgcggtccgaactgttatatccgaccatcttcggaagtatttcgcagaaagcgattatcacaaacgacgccaccccgaaacttatggcgggaccgacccatgaaggccaatcagtgtgccccagcagttcttcggttatgttttcggtcattatcgcggccagcaggtttacgccgttaagacctattaaaatcgaagtgagcatgttgtttggtttggtcaaccagttgtcgatcgctcccgctcgcgcggggtgctcctctttgagggccttgagccggtgcctgctcatcgtcaccagagccgtctcggacgccgaaaagagcgcgctagccaacagcagtgcgaaaagaacaattatcgccagagtcattattttctcccagcgtcatattagaataacaaaaaatcaatgtcaaacatcgccgtctccgcgcgctaccgtgtccgccgtcaacagctccgcccggaataaacgcctcaactctacggctgtcaccctcgccgctcccgccgtcgcgctccgctgcgccaacatggcggacatgaattttatgagcggaaccgaaggcagcctgttgcgtttgcgcagacgagcaagaacgaaaaagaaaagaatcgctccgtgaaaaatggcggccctcaaaaatgcggcagctccaagcggcaaccccttcacggccacgccggtcagatgtatatacacttcctcgacgcccagcttccgcgccttgccgctcgtgcttgccgaatagcgatgtctaactttcgcgccgggcgcgtagaaacacttgcggcccgcaagagccgcccgaaggttcaaatccgtgtcctcgtaatacgcgaagaaattctcgtcgaacagccctatctcgtcgaacagcgatttcctgtagagcgccgcggccgcgcatggcccgaacacccgcgccggaaggttgtaatcccccccgtctctctgtccgcgcccccggttggagacggctccccacggcgcgtactcatcccccgccgagtcgattgttttagggtcgtcgtaaaaaactatcttgcacgcgaccgaatcgaagccgtgattagaatccagcgccgcgaccgctttttcgagccagtccgggtctggaaccgcgtcgttgttcagcagcgccacgaactcggtgtccgccgcgcggatgcctttgttcaccgcgcgggcaaatccctcattggcgctcgattcgattaattccacgtcgggatgattgttttttattatttcgcgggagccgtcccgcgacgcgttgtctatcacaataactcgctgcccgcccagagtctggctcgcgagcgcgccaagacattcgccgatatatttctctccgttccagttcgggatgacgactgtgacgcgttgcgggttgtccatcgagttcgcgctccggcgcggcgcgggcgttccgccgcccttgcctgccgtgttcaggttgttcttctctgcggctgtttctgtatgcccgtcatcagctccaacagatagtccctgtccatagacttgttcatcgcgtcctctttggtgatgatgtttttcttcatcaactcataaagggcttgttcgagagagagcatgccgatgttctttcccgtttgaatggaagcggggagttggtaggtttttccgtcgcggatgaggttgcgcagcgcccctgtgggaaccattatctcgaatgctgcgacgcgcccgcgccctgccgccctgcggaccagagtctgcgagattatcccctcgatgttctgcgacacctgcatccttatctgcgactgctgttcgggaggaaaaacgtcgatgatgcggtcgaccgtctgggccgcgcccgtcgtgtgtagcgtgccgagcacaaggtgccccgtctcagcggtggtgatcgcggtggaaatggtctcaagatctctcatttcgccgataagcaccacgtccgggtcctgtctgagcgcgctcttcaacgccgccgagaacgaccctgtgtcccgtccgacttcgcgctgattgacgaggctcttcttgttctggtggacgaactctatcggatcctcgatcgttattatatgttcttcgcgggtcgcgtttatgtggtctatcattgccgctagagtggtggacttgccgctccctgtgggtcctgtcactaggataagcccgcgcgggcgctcgcagaacttcttcaccaccggcggcaggctcaagtcctctatcgaccgaacttttgtagggatgactcgcagcacggcggccttcgtccctctctgatggaacacgttgacgcggaacctcgccttgcccggatagtcgtacgcgaagtcggactcccacgtctccctgtattccttcgcgtgctcctcgtcgagcatgctgtttatcagctcgtccatcgtctggggcgtgagtttcgccagattcgtctgaagcgcgattttcccgtctatcctcaacatcggatggttgccgactttcatgtgaaggtcggacgcgtcgaactggagcattacgtccagaagctctcttatatgcatctgctgttatcctctgcccactagtttggagaattcagggacgttctggcatttcgccaccgcgtcttcgaacttgacgagccgtcgtttcatcagttcggccaagtgctggtccagcgtgtgcatcccctgctccttgccggcctgaatcgcctgatgaatcatgaagaccttgttctctcgaataagactcgatatggccgagttgatgaccattatttcatgcgcgacgacgcggcctttccccgtcgccgcgggcacaagcgtctgagacaccacgctttgcagagtcaccgaaagctgcattcttatctgctgctgctggtgcggcgggaacacgtcgatgaccctgtttatggtctgaaccgcgcctgtcgtgtgcagtgtggcgaacacgaggtgcccggtttccgccgctgttatagccatcgagatcgtctccagagtgcgaagctcgccgacgagtatcacgtccgggtcttcgcgcagcgccgagcgcagcgcgcggtcgaacgacttggtgtcctgcccgacctccctctggcagacgctgcagttcttgtccctgtgcagaaattcaatggggtcctcgatagtcaggatgtgctctcgccgagtctgatttatgtggtctatcatcgccgcaagagttgtggacttgccgctgcccgtcgggccggttacaagtatcagccccttcgggcggtctgaaagctcttccagagtgtccggcagcgccagttctttgatggtcagtatttttagagggattgttctcagcaccgccccggtaagcccgctctgcttgaacacgtttacgcggaatctcgacactcccggcagactgtatgacatgtcgcactcgttcgtctccacgaactcgcgcaactgcctctcgttcatgatggatttcgccatcacgtccacaatctgcgggggaaggacggagcgcgggtcggcagggcggagccttccgtccagacggaagaacaccgggctgttccctttgaaatggacgtccgacccgttgtgctcggccagatacctcaggtacgcgttcagcctttctttcggcgctatgttctcttcgagcgaaggcagtaccggctgcggtttctgctgttgcggttgcggtctttgcatcgacatttttctatggcctcaaattctgcgcttccgccgggcgcgtctcgcgccgccttcggcggttatttcaaaaatcgtccggccgacagtcttacgctgtcagcgccttcaacacgctgccggccgccgtctcagagcctctcagcggccgcagatatctgtccttgtccagcttctccagcgtgtccctgctccagaacgagcaagtatccggcgtgagcgccccgcacacgcggaaaaagtcgttcgagtccttcccgaattcgagatagtaatccgccagagcgatcccgcgcttgtaaagaaacggctgcagagccttgttgacttgagccgccctcgttctcatcgtcttcacgtcgccgtccgtcacttccgtgtagacgcgcgcgcgcatccccggctgaaactccttgaccgcgtccatcttcacgttgaattcgattatggtcacagggagtatcgagcctgcggcgagacgcgtgcgggcggcgaactcatctgaaaccatgttgcgcaccgccacgcgggccgggattatccgcgccgcgacggtctccatctcggactcgcccgtctcgcgcgcgaaatgtgtcgccactccgcaatcttcaagcctcttgaagagcgcggcggcgatcttcatgttcaacgcgcctttgcccggaaacatgggcgacctttccgcccagcattccaccgcgtcgttcgtgaactcgaccgcgaaccggtcgggggacgcgtcagactgatatacccgcatccccggcgtctctcttatcaaagcgcctttccccatgtctttaccccgcgcgggctattccttcgccttccgcgcccgcgctttcttcttcgggaaaaatctctcgtatatttcgtccacgtgccttatgaaatactccacttcaaaacactcctccaactcggcgggtttcaacagcgccgccacttcggcgtcagccgacaacagcgacttaaactccgccttctccgcccacaccctcatcgcgttgcgctgcacgatgtggtacgcctgctccctcgtcgctcccttgcccaccagcgccagcatcacccgctgcgagaatatcaatcccctcgtcttgttgaggttttcaagcatcgcgtccggatacaccaacagcttgtccagaaggcgtttcagcctgaccagcatatagtgaagcagtatgcaactatccggaattatcaccctttccacagacgaatgggtgatgtcgcgctcgtgccagagagccatgttttccatggcggcgtgggcgttggcgcgcaacacgcgggcaagcccggccagacgctcggctgtgatcgggttcctcttgtgaggcatcgccgacgagcctttctggcccttcgcgaagaactcctccgcctctcgaatgtccgttcgctgaagcccgcgaacttcggtggcaatcttctcgatagtgccgccgaccaccgccagagtcgacatgaactcggcgtgcctgtccctctgaatcacctgcgtggcgataggcgcggccttaagcccaagccttcggcaggtgtcttcttcgacatcggggggcaggttcgagtaagtgcccaccgcgcctgaaatcttgccgacagatatcgtctcgcgcgccctttcgagcctttcaaggttgcgccccatctcggccagccacagcagcatcttcattccgaaagtcatcggctcggcgtgtatgccgtgcgtgcggcccaccatgacggtgaatttgtgctctatcgcgcggcgctctaaaatgacgcggatttccttgacctccgagatgagagcgtccgcagactcgcgcatgcggagcgcctgcgccgtgtccagcacgtccgacgacgtcatccccacgtgtataaatctcgagtccggcccgacattctccgccacgttcgtcagaaacgctatcacgtcgtgatcggtctctttctctatctcgtctatgcgctgaattgtgaacgccgccttctttttgatcgtcgacagcgctcgcgcgggaatttttcccttcgcgtgccacgcctcgcacgcggctatctccacgtccagccacttcctgaacttgttctcttccgaccagatcgagcgcatcggctcgtatgtgtacctgtctatcatctcgtcgaaccgccctccgaaaagtagttcctgtagcccaaagtcctcaggcgttcggatttcttaattacagcctcagcctgctgcgccctgaacctgctgtagcgcgaggcaagctccggcttgcccagagccagtatctgaacagccagcagagccgcgttcttgcatccgcccacggccaccgtcgccaccggcatcccggcgggcatctgagctatcgacaacagcgagtccagccccagcatcttcgactccatcggcaccccgatcaccggcaggttcgtgagcgccgcgaccactcccggcaggtgcgccgccgcccccgccgccgctatcatcacttttccgccattgttgtcaaacgtcgtcactattcttttgacatagtcgtgcgtgcggtgcgccgacgcgatatgcgcctcgtacgacacgccgaaactgtccagcgtttcaaaacacgccgtcatgcttttaaggtcggaatcgctccccataacaaccgccacatccggggcctgcgccctcttctgcctagcggcggcctttttcttcttttccatttatcatttttctcccttgagagtatttattctggattttctgatgtttcttttcggagaaaccttcggcagctcgtcctccacctccactcttatcgacgccacgccgtccaaagcccagcccgtcagcttgcccgctcttccgcccctgttccggtcttcgtcttcatactcttcgtcgtcttcgtcgtccggcccggagaaccctaatgactcgatgttcgccacaagctcgttgttcatcggacgactcgaaaactccttcaacacttcatccagacttttctccttctttctttcgcgaaggaaatgagggtctttttcgtcttgtctttcctgcccctcgacttggatttttatcagcaacatttccggagccgccgacggaagctctctggctccggagaaaacgcttatcaccgcgcgtccgggcgctatgtcggctggcactttcaaccatattttttcctcgaccgtctcgctcctaaacggccgcacccccactttcagccccagcttctgtccgcgcttcaccacgggcggacttgccttttctttgtttgccttttctccagccgcgttcggctctttttcttcggctttagcttccggctcggcggcgggctctttttcgcccgtcttcgtttcttccgcttccggcttctcttcgtccccgccgtctatctccactttttctataagcgcgtaagagttcctcgaatctatctcgacgttcaggttcaacttgcgcgcttccgcgtccgcgtatttgttgtccttaagcaattgaagcgccgtcacgaactccaccagagacaacgccgcgatgtcgtccccgtcgtaaaacatgttttccctttcgaccggtttttcgcaggccgagcatcctatggaaaacgacactctggaggttcctttgccgagcctgtcgatggtgttgtcgagactttgcagcgcggccatcgccgccagattgctcaacaaatcctcgtcccgcgccaccttgaacgaatacttctccgtcttgccgatatctccgtcagtgacggttatgtcgaatggtatcagcagaggaaaactgtccagccgtcccacaagagcggggccgcggtcctgagttatctctcctcgcagcgccccggtcgcggcggctttgaacgacatgtcagtgcctcgcgccaccgcgagcaccggcgcgtccgccagcagataccttacatcgcccttcctgaacagcggatgcccgaacatcagggcttgcttgccgtccacgtgcgtcaccgttcccgccgctgacacttccatatctcccgtcagaagcagcacggccaccgaactgccgggttttatctccgagccgggtccgattacggtgcgtcccgttttcgccccagcccatgcgccgcccgcgtccgtcacttctattcccgttccctcgaatattctctttgcaaaaggcatcgttcgcgccgtcaccccgcgaaccatcgccggagccgccgccgcgctcgcaaataatgtcccctctatctcgtccctgccggattcataacttattctcgtaaaaacctttccgccatgctcgaaaggcgcgtcgaactcgaccgtcccggccctcggcgcgtcatactccgccgccttcagcatggacgcgatatccgtaactcctcccagatggtggtccgtcatcggaaacgtcattgaaagcgcgccgacaagcctgtcgccgatatatatcggggaaccgctcatccccattgacactccgccgtatttctcgcgctccggcccggtcaactctatcagtatcagcggccccccgctgaccccggcccccggcataactcctttaactttcaccgggaatttcgatatctccagcccctcgaacaccgtcagcccgtatccttccattccgggcttgacctctgacgcggacatatacgaaacagccggagccgccccggcgacgcgcgtcatcgccccggaaacgaccgtcacaaaaaccgccagcgctccgagaattatccttgcttttgatttcatcattatgttccgccgcgaccgcgcgcctattaaaaatccgcgtggcgacgcggcaacaatctcaacatcaatacctcgcgcgcagttcccgtcgcgcggttaagtctgatattatatctcattatcaaatcaaattaaaacccccgtccgcctctccccgcgccctcttttttcgctccgatggcgctatccgccggaaatatgtaaaattccatataagttgtcaggcttttagccggctccgggagatttgttcatgattatcaataatttcaaagtcgaaggtttcaggtccttgaaaaaactcaacctagaccttatgcctataaacatcctcatcggccccaactccagcggcaaaagcaacataatcagcgcccttgaacttctttccgacgccgtctccggcaaactccgcgacgccattatgaaaaaacacggcggcatgatccccattctttggaatggaaccgcaaaggaaatcggttttgaggcaacaatacgctctcatcgttttggtttcaacgaaaacccggaagaaaacgcatccgatttagtgaaaagacgatatgtttatagtttaaaacttgaacaattgagagcctcaagcgaatatggcattgaattagaaaaactccatgtcgagaatattgccaatgatgatgatttatccaattacacaggcacgattattaacagagatggaaaagaatatttcacgaaagaaattaatagcgatattccagcggctgtgttcgatatttttaaagatagcgaatccatgttttttaatatggattcaatcaaaagtggatggaaaaattatactgaattacaaatatataggttcatcaatttttttaatgactgttcattttaccgaaatctgaatcatggcccggaagcagcggctagacattcgactgtcgcgaggtcggaaaaggtgttggaatcgaacggcgataacctcattgccgtccttcacactctttacaccggcaataaagagttcaaagaacagtttaacaacactctcgaagcggctttcggcgacgactttgaagaactgacattcccgcctctcgaaaacggcagaatctatatgaaatggcgctcgaaaacgcttaaacgcgagctttcacccgccgacctgtctgacggaacgattcttttcctgatgctttccgcgattcttctctccccggaacccccgccgataatctgtatcgacgaacctgaacttggaatgcacccttctatgctcggcatcatcgcggagcttatcaaagacgcgtcaaacagaactcaacttattgtttccactcattctcccgaacttttaagcgccttctccgacatgccggaatcagtcgtggtcgtggaaaaaaaagacggcgcgaccactgcgaaaagactcgaccgcgattccctttccaaatggctggaggaatacaccctcggcagattatggctcgatagagaaatcggcggatgatccatgaaaatacttcttttcgtcgaaggcgataccgaaaacaaaacacttcctgattttcttaaaaaatggctggattccaagctggacaacaggatcagcgtcgaacctattgttttttcgggttgcggcgattatttaaaacgcgccggcaaaaaatctcaattacatcttgataatagcgaagtaatcgccatcttcggcttgctcgacctttatggattgcccgaaaagtgcaaaggcggaaacactgtcgatgaaaaaatcgattttgcgagaaaaagaatcatagaatctttgccggaagaatgcagacctagattccgccagcatttcgccgttcatgagctggaagcatggttgctcagcgatcccgatatattccctcgcgggatcaaactgccagttgaatgcggaaatccggagacagtcgacttcgataaccccccggcaaaacttctcaaggaactttttaggaaatataaaaaaaattacagctataaaaagaccgttgacggcgtcaatctgtttaaaaaactctcgcctaaaaccgtgcggaaaaaatgtcctaatttcaagaagtttaccgatgaaatactggcagccgccgaaaacgctcagaagcggagccttcctcgttgaaatcggaggccggcatggatgaaatcatgactcagtcgacaaaaaagaaaatcttcatcgtcgcgggggcgagaccgaacttcgtgaaagtggctccgattatgcgcgcaatggcagaaagcccctccctgcgccccatcctcgtccacaccggccagcactacgaccacaatatgtctcagagttttttcgacgagttgaacatcccccggcccgacgttttcctagaggtcggctccggcagccacgcggcccagaccgccgccgtcatggtagccttcgaaaaagccgtgctcgaattaaaacccgacctcgttctagtggtcggcgacgtcaactcgaccctcgcctgctcgctcgtgtccgcaaaactcatgataccggtcgcccatgtggaagccggtctccgcagcttcgaccgctcaatgcccgaagaaatcaaccgcgtcctcaccgactcgatttcatcttacctcttcgtcaccgaaccgagcggacgcgacaacctcctgcgggaaggcgtcgcggaagacaacattttcttcgtcggcaacgttatgatagacactctggcggaaaacgcgcggcgagtgaagaacggcgaggcggtccgccctctcggcgatttctccggcgattacgccgccctcacccttcacagaccctccaacgtggacgacccggcgacattctcccgcatcatatccgcccttgaggccaccgcctccatagctccggtcttttttccggcgcatccacgaactgtcaacaacatccgcagattcgggctggacgaccatttcgcagcgtgggacggcgcttcaattcccgccggaaaaatcttcatcatggaacctctcggatatctggaattcctctcccttaccatgaacgccaagatcgtcctcaccgattccggcggcattcaggaggaaaccacttggctgggcgtcccgtgcgccacaatccgcgaaaacaccgagcggcccgtcaccgttgacgtcggaacgaacatcctcgtcggctccgacgccgaaaaaatctcccgcgccgccgccgccgccctgcgcggcgactggaaacagggccgagtccccgaactctgggacggccatgccgcctcccgcatcgtctcaaaactggaatctctgttatgttaagtttgtatcaacatcgccatacatctggttttcatcgatctaagaaaaaagccgattttgcaaagaacgaagttcagcaaaatcggcgaccaagagtttttttcggaaggggcgcggggaaacctgttttttgcaaaaaaatggtttcaccgcaaattactaaaaatctattatccatatattattttttccctcgctgacattgcttttcaataatgatacaatacggttgcggaggaatccgcgcgctatattggcgtacccggaatgttttcgggcatgtttaactgcggcaggttgtcttatagtgtctgatttgctgaaaagaaaaattgttattgcggcggcaacggcattggccgttctcgcgactctgtccgccgctgtgcccgcgcgcgctctcaacctccactacacaatcaccgcaaactacataatgttcgacatagaccgaaaagtgatttactgcgacggacaggtcgagcttcttcacggcaaccttcgctttcaagccgactcgatacgggtggacgtgaaatcgcacatcttctacgcagaaggcggcatcgtcgcttccactatgaagaaatccgcttccgcgctgccgggcgacacggcttcgccgtccaccaaccctatattgacggacattgaagaaaccggcgacctgctcgaccagcgcgtcgaagctcagatcacaggcatggacggcgcttcattttcaggcgaccaacttaagttcgacttggatcgcgcggcgggcatcctcactcaaacccaaagcggcgtcaggactttttatctggtcggcgaagaactcaacgagacggcccaagagcctctgatgggacaggcgttctacatctacgaagagccttatctcaccgcaaacgccgtgaccgccgcccgcatgcgcatctatcccggcgaccagtacgaagcgtggcgcgccaccatgtgggtaaaaggcaacaaagtaatgtccctccctttctggaccaacaccagcaaaaaatacaccaccggcaaatggcgcatccggaacgtcagctacggctcaaacgcggactggaaagtcggcgccaacgtgcgctacaaggaagcccgcgacttcaaaggcttcgtcgatttgaactaccacggggacagctcgaacacatattccgcggacctgcgacagtcgttccgcatgaacacccagacaagcggccagttcaacatgcgcaacctgttcggcggagacaggggctacaccatgtccatgtcgcgctacgccgccggcatgagatcgcaaacccttcagatggactacgacctttccggggcgaaaggattccggctcggagccgcgggcggcattaagaaaaccagaataaacggctacctctcaggccgcagaactggagacggcgactacggccaatcatccatgaacgccctcgtcagcttcgacggcaacagaaagttcgtcaatggcaacacgcggggcgtcggctattccgtaagctctcacataaaaatggacaacttcgattataccgacgccgtgacggcggcctacaccaccctcaccgccgtcagcccttcaatcgccctgtcaaaaaagaccagcattgattggaacacagccaccgggcttggcggcgacaccgaaggcaggcccagcgcccgcctgtccgcctccgcccgcatcggccacagaccccggcagggaatgttgattcaggcccgctataatttcactgacagcagatacaccggctcctccaccgtcaaacgccagcttatgttgtacgtgtcgaagtccaaagggcttaagtggaattccgccctgtcggcgacttatgacatccgcgaagcaaccatcagcagcctgtcttccggcctcgattacaccgtcaacaaaaaatgcagactccgcacggacttcatttacaatctgaaaaacaaccatttctccaccaagaacttcaacgtcgactacgacctctacggcacgcgcatcaacacccgctggttcgccgacaccaacgatttcatgatcgacttcacatcaaattactaagccggatttgcgcaatactgttcaataatcacaaaaataggagcaatagccgaagcgccatttgattttacccattgcgccgagcgccgctcccaaccatattgtgaacgcatagcgaaaaacggggacttgcagcgctgcatttcgcgacgggtgtccgtttttctcaaagtcaccgcccattgtttcctgttaatatcatgtagacaatggctaaacataataaaataaagcttatagacgcaacaacctttatggcaatgtttacatcttgttcatcaagatatgtttgcttaaacgcaatgttttttcttcttgtcttgatcgccaacgctaaatagtatttaataaagacaaaaagatttataattaaaacaatcaaagcaattggatttatgcaaagcttaaatgatagatcttcatcagacacatctcttgtgagcatcataacgaaccatgccacaataacatttacaaatgctaaatttttaaacgcgcgatgtcttttctttattacattgtatgccacttcgataataaccgctgttaataataacaataagaacaacattgctaatatgcgccttcacaattataatctgctcgattttctcttttgattctaaaatacgtttctacttcgtcgatgacttctgtaataacacgaccagtcgccattattagccaccagttcttttcgttctgcccataatggatgcgcgatggattggcaaaaacccaaaatggtcattcacccatttctgagcgagtcttggtcatgctttacggtcgattcggttggttttccgggctgctttcgccttccttcttttcctgatctttgatctttccaagaaattcgggaaggctgactccagccatctcgcagacatcgtgcatcgcaggcagcattttcgtgaaactgcctaaccagttggacgctgtcgagccgccgccattgccgccgccgccgcagtcccacactacgatcttgtcgaatttaatgttgcttatcgcttctgcctgcgcttttacgatttccggcaactgctccactatgagcaacatggcggctttttccgcgtcgccgttcgcggcttttaccatctccgcgaagccctcggccttcttctttaggatttcttggatgcctgccgcttctccgctcagccgctctcttatttccgcgccttcaccctgtcctttaagtgtttgttgttcctttatcgcttccgattctatgattaatttttctttttctatctcagccggcacaaccacatcggctttgcgggtggatttttctctatcagccctagcttcctccgcttttttctcggctatgtaggctagggtggcggcctcggcggctttggttttttccgcggcgacggcctttctctctgcttcggcttccgcttctcgtctgtcagcgttcgagttggcctcgactactttagcagtgttctcgcctttaatggcttcggcattggcagtggcaacgttaacgcgcatctgctgttgcgcgttcgcttcgccggttttgccgtccctttcagcatttgcaatattaacgcgcatctgctgttgcgcgttcgcttcgccggttttgccgtccctttcggcatttgcaatattaacgcgcatctgctgttgcgcgttcgcctctccggtcaggccgtctttttcggcgtttgcaatattaacgcgcatctgctgttgcgcgttcgcttcgccggttttgccgtctctttcctgctgggccacttccaccttggctttgtttatagcctcggcagccgcttttttccctaacgcctctatgtatcccgattcgtcggagatgtcggtgatgtttacattgattagcttgagaccgagcttctcaagttcagattcaacattcttcattacttcttcttcgaacttttcacgtttcgcattgatctcttcaatactcatcgttgctatggtagcgcgaagttgcccgaaaataatgtctttggcattttcctcaatttgctccttgctcatgctgagaaggcgttctgcggctaccgtcataaccgatgggttggtggaaatgcctattgtgaatcgggatgggacatccaccctgatattctgattcgacaacgcgtttttcagaccgatgtcgattgtcatcggcgtgaggtcaagatattcgcaagcctgaaaaagcggccagacgaacgctgcgccaccgtgtatgcacttcgacgtttgacccttcgccactttgccataaacgaccatgatctggtccgacggacaccgccggtacctagtcatcgcggcgagcaaagtcgcgaaaagcacaattgctactacaacaagaccgataagcatgtacatttaataatcctccgcaagaaacattatttgattttttcaatcaccaaggtttgatccccgaccgtctctattacttttatctgttctcctttatttagcctatctccctttgttgccgcatcaagctctaccagtcttccctgaagaacaatattgacctttcctctgccattcatgttttcgggcactgctatcgttacagagccttcttttccgacggcgtttttcagcgacagagttccgctgcttttcatggaagaaagccctttcataagcagcatcaccaacgctacggttacaactccgcaaacaccggcgatgattaccgtgatcgacttcgacaagcctttctccaagcaggccaaaccaaaccaagagaaaccgaggaaaaacgccaccatgtttctgatggtaaaaaaaccaagaaataaatcgctatgcgtgtcgctgcccggatctacatctccggagtcgatatcgtcgccccctgcgaaagtgaatatgagctggagcaagaaaaacaccgagaatacaacagcaacagcccaaaataccttttcaaaagagcttaatgcaccccaccatgcttccatttttcaccttcacaaataaggatttcacctaacattattcgcaaacatctaaaatgtcaataaatgagcctgtcattttgccttgatgtggtgtctgtagtgataaagctattcctgcatttcaatatttccatcagtcaccccgagatgaatcagagcaaaaccgggaaccaccacaatgctaaacaactaaaattgctagaatatcccggtacagccgcctatttacgcctcctttatttttgctgttctcgcatggtgttactataccatatcgggcggtcttgttgtcaatcgtcttgagcttccccccaaaaactggacagaggtttaaggtggaaaccgtggtggtgtagaatccagttttggagggatgagcgatgaggaagaaattcaccccagcgttcaaggccaaggtggcgcttgaggcgctgaaggggcagaaaacggttgccgagctggcgaagatttacgaggtgcatccgaaccagatcgggcagtggaagaagaaggtgctggaagaattgccgggtgtattcaacggcaagcgggccagagaggacaaaggccgggaggagcatgtgggggagctttaccggcagatcgggcagcagaaggtcgaattggactggcttaaaaaaaaatctggacttgccgactgagcagaaacggcggctgatcgacccttcgagagaggcgctgccggtgtggcggcaatgcaaactgatgggactggcgcggtcgagttactactacgagccatgcggggaaagcgagtacaacaggagcctgatgaagctgattgacgagctgtacacggagcatccgagtctggggtcgccgaaggtcacgaagctgctgcgaaacatggggcacgaggtgaatcacaagcgcatagagcggctgatgagggtgatggggcttgcggcggtgtatccgaagccgcgcaccagcattcccgacgccgcggcccgcaagtatccgtacctgctggcggggctggcaatagagcgtcccgaccaggtgtgggccacggacatcacgtacatccgcatgcgcacagggttgcgtatctggcggcgatcatggactggtacagccggtacgtgctctcgtggcggctgagcattttcatagacgcggcgttttgcgtggaagcgctggaagaggcgctttcgcgcggatggccggagatattcaacagcgaccagggcgcgcagttcaccagcgaagcgttcacaaagccactgctggacaggagcgtcgccatcagcatggatgggcgcgggcggtacatggacaacatcttcgtggagcggctgtggcggtcggtgaaatacgaggaggtttacctgaaggattacgccgacgtatgggaagcggagcgtgagatttcgagatatttgcgctggtacaacgaagtgcgccctcaccaggcgctgggctacgcgacgcccgcccaggtgtactttgaccggagcgtcgaaattggcccgcagggcttgcgaaacagcgcggcgagtgatattgtggcggcgtaaaagaaaacgcgccacagaggaatggaggggcgttttacagagagaaaaaccgcccggcgacaggaggtggcaaagcaaaacaatcgaatgcggggacttgggaaaactcctcgcgtgtgagcacacgtacacgcgcgcgcgcacgcatgatgcgtgcgtcaggaacaggcaaagtcaaaggcaaaagactaaaacctacaccaaaccccaccttataaacccccattttctgtccaaccaatggggggaggttcctctgtcgctctttgggttgataataatagacgtctgttctttgatagaaacatccgatggttatattttttattgcgcatcagttatcataaaacaaaattgagaagtttgggaaaagggggttggggaaagaacccttttcaaagggtttttccccaatcgccaaaagcgacagtctcttgtgtcggtttatcaggattatacagtttttcggatttatacagtttttcaggtttagaccgggtcaaccgcgtcgccgagcagcgcgcgggaaaattcggaggcgttgaacggcagcaggtcttccatcttttccccgacgccgacgaacataatcggcatgcgccattccttgagtatggagaatacgaccccgccgcgcgccgttccgtccatcttcgtcagcacgagggcgtctatcgggacggcctgtccgaactgctgaacctgattgtatgagtttcttccgatggtggaatcgaggacgagccacgctctgaagttctcgaccccggctttttccaccgccacgcggtggattttctggagttcgcgcatcaggttggattgagtgtgaaggcgtccggcggtgtcggctataagcaggtcggcgccgcgcgcgcgcgcggcctgtatcgcgtcgtacatgaccgccgagggatccgcgccctctctctgccttattatcggcacgtccgaccgcttggcccatatctcaagctgctcggaagccgccgcccggaacgtgtcgcaggccgccagcatcaccttgcgcccttcggctttatagcgcatcgccagcttgcctatcgtcgtcgttttcccggagccgttcacgcccatcatcatgacgacgttcagcccgggggccaaaggctccgccgcagcgcccgattcgagtatctcggagagtatgtccacgatgagcgcgtttagcgcttccgcgtccggcgggcgtttttcgaccgctttgcttttgatttcatctacgatcagcgcggcggtggacgcgccaacgtccgacaacagcagcgcttcctccagcctctcgcagaactcgtcgtctatcttcacggcccgccctatggcggctgatattttatgccgtaagctgtcgctggtcttcttgagacccttcttcaatctgtcgaacatggttgttattccatggataccgtaaggagcttcgagtatccttcctgtttgtccattgttatgccgaacaattgatcggctcccaccagcgttcctttgttgtgggtgacgaccagaaactggctgttggtcgaatgttttttcagcatttcgcggaaccgcacaatattgctttcgtcaagcccggcgtcaacctcgtccagcacgtagaacgggctgggtttcactttgagtatggagaaaatcagaaccagcgcgcaaagggctttttcgccgccggacagaagggttatcgccctcatcctttttccgggaatctgcactgaaacgtccacgccggattcgagagggtcgccgtcgccgacaagcatcagctccgcctcgccgccgccgaacatctcgacgaacgtctcctgaaacttctccctcacccgctcgaacgtctccatgaactgcgctcggctgcggtcgtcatactcgttcactatgtccatcagggtcgcgcgcgcgtcttcaagatcccctatctgctcgctgagcaggtcgaatctgttggacttctcctcgtattcgccgatagccagcatgttcaccggctgaagcgtctcgagctcttttttcagcgcgaggtagcgtccttttccggccgggccgccgtctgcggtttcctcaagcgcccgctcctcggagacatcgtcgaactcctccgagaactgccttctgatctcttcgagttgcgtttcagcgcgcgcgcacttcatctcgctgtccagcatcgcttctttgagttcttccagtcgggtttcaacagcgtgtatctcgccgcgcagccgcaggctttcgtcttccatgcctttgagagcggtccgtttctgcgcgagcgcggattccgcggcggcgcgcgcggccccaagctccttcgccagcgcctcgcccgctttcatctcttcggaagtccggagcctgtccgccgacagcttcgacttctccgcgtcgatatccccgcttctccttcgcacccgctccaactccgcctgcctgtacttctcggcgtcgcccgccgcctctatctcccgcctcagttcccccatctcgacgcgcagatcaacctcgcgcatctcccgtttcctgaacgcgtccgctatctcgtccagccccgactgcgccgtcttcaactcggcttcgaggctctttctcttttctgaaacttccttgaacttcgattcgagcttggcgacatccgactctgagccgcctccggttgacgcgcattcggccagcgctttttccgccgattctaggtctttcgtcagaatttcgacgcgctccacagccgccgccgcgcgctcgcgcgccgcggccagttcgatattcagtttgttaaattcttttccagacgcttcggacgacgacctcagcgacgcgtatttcttttcagcctcttcgcgcgcggcgcgggccgccttgacttccgcgttcttcttttcgagttcggactttagctcggccacgcgctctcttgcggcctcgctggtcggcagagcttcgcccgtgaacagcgtcccgttgataaaacacgccgctccgtccgccctcacaaccccggctcccgaaggcagttccgaaatcgcctctttcatctccgcgtcggtgtcgacaatcgcgaacattgataatacattcagcaactcgttcggcgctgcggatttgaccgaaaccgcgtccgacaggagccgtttcgcccattttttctttttgagagccgccgcagccgccgccccggctcctgagaaccagtcaagaatcagcctcgcggccccgccgtcggcggcctcttcgagcgccttccctatgtccgcggacgtcgaaatagaagcgttgaaaagctcgttcaaagcgcggcgcgcggcaggctcgaacccggttttgatctcaatctcgtcggcgagccgggcggtttgtttccctttttcgctcacggccatcaggcccgctacgcgttcgatagcttcgacccgcgccgacaaagcgttgcgctccgcgacgaccgcatcaagcgccgaccgcgctttatcccgcgcggcggaagtttcctcgatgcccgcgcgaagcttttccgcctgcgattctttttcgcggatttgtttttcaaattgcgaaactttttcgctctcggacttgccgcgttcccgcgccgccgacagcctgtcccgcgcggaatcgcgggcggaggtcagagacttcactcgcgcggccatccccgcaagcctgtctttcgccaccgccagctcgcccgcaaggctcgcctccagcttcttcaaatcctcggcttccggcagaagcccgtcgcgcttctctgtcaggtctttcctgttcagcttcagatcgtcggaggattgttttgtggcgttttcaagttcggcggcggcttcatcgagcctgcgttttttctgctcggccttcgcgcgaaggtctaatatgtctttttcgagatttttctcctgctttacgatatcggctttttcgatgtcagcggcggcggcccttctgtccgcgtcttccaccgcgcgggccagcagcctcgcggattcctccgcgcgccccagtttcgagccgatgtccgccaactcgcgcagagccgagtcgatttccgcccgcgccgcgtctatgcccgcacccacattctctctggactgtctcagctcgccgactttcttcagcccttccgccctctttgccttaaggccctctccctcgacggaaagctgttccaagcggctcttcaaacgccttatctcggacgcgaaaacgcccagcttcagcctttccatctcctcgactatctcgtcgtaccgcttcgccttttccgcctgctctttcaaaggccccagcgattcggagatctcggtcagaatgtctttcagccgggagatgttgatgttcgtgtctttgattttcgacagcgttttggttttttcgattttgtatttatttatcccggcagcctcgtcgaatatctcccgccgctgcgagggggacaagtcgatgacgtactcgacgtcgccctgattgattatcgaatagttcgtggtggacagtccggtgtcgatcagcaactcctgaatgtccttgagcctgcaagactcgttgttgatggcgaactcgctctcgccggatttaaagtaccttcgggttatcgagatttcgctttggggtagcggaaaatagccgtcgtcgttgtcgaaagtgaggacgacttcggcgaagccgaggggcttgcggctggcgctgccgtgatagacgacttcttcgagcttgcggccccggatcgagcgcatgctctgttcgccgagcgcccaagttatcgcgtccaccagattgctttttccgctgccgttcgggccgaccaccgcagtgacgccctcgcggaactcaaagaccgttcggcgggcgaacgtcttgaatccgaacattgacaccgatttcagatacattgcgggccttgttgttttttatcgtctcaggagccgtcggcgctcatgccgagtatcgccgcgcgcgccgcctccgtctccgcttcctttttgcttcgcccctcgccggttccgtgcgaggccccgttgatgaagacctccactttgaacatcttgcggtggtccgggccgttctcggatatcataacatatcgagggagagtcttgtggcgtttctgagcgtattcctgaagttccgtcttgaagtcgcgcgcggcctcgccgcccgcctcctcaaggaactcagacatccgctcgatgacgaaatcgcgcgccctctcgaatccttggtcgatgaagacggcccctatcagcgcctcgaaacaatcgaccacgaacgccgtgtggtctctgccggcagactcctcgacgcccttgccgacccggatgaaatctccaagctcgattcttcgcgcggctttcagcaaaacgcctttgctgacaatgtgcgccttggccttgctcatcgcgccctgatcgtcttccggaaaagatttgaacaggcgttcgcagatggaaagagctagaacggagtcgccaaggaattcgagccgctcgtagctgcgttcaagccgctcgcgttccggcagcacacacgaaccccagtacgacggatgcgtaagcgccgccctcaaacccgactggtcgttgaaatccacgccgatgattcccagcaagtcctcgagcggcctcgggaatccttctctgtcccgaacttcgaggggggaaaggttcaacgggtcacacctgccgttttttcagataatcggcggcgtctcccaccgtgactatcattaccgcgtcctcgtccggcacttctatgccgaactcgtcctcgacggccattatcaagtcgaatatcttgcgcgagtcggctccgaggtcgtccctgaacgacgcctccatcactatcctgtcctccgacacgccaagctccgccatgatcactttcttcaggcgatctatcatgtctgacatttatcgtcctgcctccgttatccctcgactttggtcacaagaacagtcttgcccttgtagtagccgcatttcgcgcatgcgcgatgcgtcatcttcacttcgtggcactgcggacattccgtcagcgtcggcgtcttcaagcctcttttccactgcgccttctggcttcgtgtgctcgaacgcgatttcttatatttcggaagcgccatcttctttcacctcccgctccatttttctctctaaaaactttcttccttctttcaccgtgctcataactttgtgcaatgtttgctccagattgtcaagcgtctggagggcatacatttccgcgccggccccgacgtcccctttgccggccccctcaggcgaagacattttctccgccgtcgcccttgccgagtcctcttccgcctcggcctccatctctatcctcatcgacctcatttcattgagcgtcgcgtatatcttcttttcgtccacaacgatttttcctataaatgaaaggaaaaaaccgctgtccagatgcgattccagcgtgtccagcaacttctgaaaccttgccagtttttctttcttcaatcccggcccgccttccctagtcgccttatcccgctctcacttctttgaatatctttccttcagcttcgcgtccaccatcggcgacacaagagaactcacgtccccgccgaaagacgccacttcctttattatcgaggagcttatgaaagaatgctccgtgctcgtcaccagaaacaccgtctcaacgttcggagccagtcttttgttcaccagcgccatctggaactccatctcgaagtccgtgaccgcgcgcagcccgcgcacaaccgctttcgctccgcacgccttcacataatccacaagcaacgtgtcgaaactctccaccttcacattggcgatgtccttcgtcagttccttcgctatttccatcctctcctgaatcgagaaaagatgttttttggacgggttgttggaaatcgcgacgataagctcgtcgaacaccgaggccgatcgctgcactatatccatgtgaccgttggtcatcgggtcgaaacttcccggatacgccgccatgttcatttttcgatgtccttaatgtttttccagaccgtcacccagcttgagccgtaccttctggagtcccgcattgaaagacttccgaactccccgcaaaccggtttcgctccgtgctgtccgacaatcctgccgccgtccgccagcatgtccgccagccccggcgattccatcgtcgcctcgaacatccccccgtcatacggcgggtcgaggaaaatcagatcgaaaattcccctcgccgcccctccggcgacgtattcccttgcgtccatccttataatttcaaccttgccctcaagcccgaatttactgacgttgcgctctaccagtcgtatcgctttcgacgagtgatccacaaacaccactctctccgctccccggcttaacgcctctattcccacactccccgctccggcgaacaggtccagaaaccttgctccgtccatcggcccggtcaggttgaatatgctctccctgactcggtcgtatgtgactcttatgctgtcgtctccatcctccgggccgaacagcttggatctcttcaaatcgccgccgattaccctcaaaactctctccggtcggttgcgcgcctaacccggatttttcgcaagaaaaacccggacttgacaagcgcgtctgcccgtcggacatccgcgcgaatccgtataatataacatatttatatattttatctagtatataaaagaactattatttttctgactctgccagtcaaagcacggttcctgcgcgcgcgcttgtaatctcatccttcataacggcaatttcgccgtttacaatcaccgcgtcgaacccgcacggatatctgacggggtcctcatacgtggaattatcccgaagcgcgtcagggtcgaacaccactatgtccgcaagataaccttcctttatcaatcccctgcgggcagccccgattttccttgcgggcatagacgtcatttttcttacggcctctcccatcggcatcagcttctctccaatgacataatgcttcaggaacctgaccgtcgtggagaacagccggggatgcgccttcgccccctcgtccgtctccaccccgtccgatcctatgctgctaagaggatgcgacatgatgaaccgcaggtcgtcttcggatatgaattcgcccgcgaccggggcgttgctgaaaccttcttttagaagcacatggagcgcggcggctttagcgcccttgcccgtgtccttcataacatccgccagcgtgcgcccctcgtactgcttcaattttttcagttcgaggaaaatcaccttttcctccatccccggctcgttcagcagcatcgtcgtggcgagtatgttggaaaacgccgtgaacggatagacatccgcctcgacgtccacgccgcgcgcgcgcgcctcctccatcatcttcatcgttttgcgcggcttgccccagtttcggctcaggattgccttgtgatgcgatatctgcagagacactcctgtttccatcgctatcccgattgcctcccggttcgcttcctcaagcttgtctatctcgtttctcacatgaacgctgaacagcgcgccgcgtttcgccgccgtcccgcagagagccttcacttcttctctcgacgaaaacatctgcatcggatacgccagcccggcggaaaaccctctcgcgccttcgtcaagcgacttatccagcaacgacttcattgcttctatctgccccgcgttcgcttttaacggcgaacgccccatcgtcatctgcctcaaattgccgaacccggtctgcagaaacacattcgctccgattccgatccttttgatatgttcgatatacccggcggtggaatcccattcaaactgacactctgttccaaacatgccggagaggtatcccctgaaatccctcctcagcctgtcgttcatcggcgctccggaaaaaccgcacgagcccacaaccgctgtcgtaaccccctgcctcagcttcgcctccattgagccgttcacggctatcttgaaatccgaatgcgcgtgcatatcaatgaagcccggacacaccatcttgcctgtggcgtcgatggatgaaagcgcgggatcatccgcgcgggccatggcgctcgcctcgtcgcccacagcctttatcgtatcgccttctatgtagacgtcgctcctgacgcccggcccgccgaccccgtcaaaaactgttccgcctttgatgtatatctttccttccatgcgctaatcccccgctatttcggacggcgtttccttcacttcgccgctacgccgttatatactatatccgattttatcgacactgcgcgcggagagataaaatgtcacaacaaaccgaaagagagcttgtttcgcggctcaataagaacatatccacaaaaaagaaatcccccggaaacagacgctgcgtcgtcggcttggacggattcatagacgagatagtccacgtggtggacacccgcaagaacaactccgaatacgagcggctcgaactgatgtccaactacgccgaaaggataaaaagctacgcgggcaagagcggcaacatagagtacgtgccgcagcgagtgaagatcggcggcaacggcccgattatggcgaacgccatcgcctctctcggtgtctcgacgacttatatcggaacgctcggcaggccggatatccatcctgtctttcgccccctgaaagacgccgcaaacgtaatatccatcgcagagccttgccatacggacgcggtggagttcctcgacggaaaaatcatggtgggaaagatggcccccgtatcagacgtcacttgggacaggattctggaggatgtcggaaaagagcgttttgtcagattgctgcaagaggcccacttgctcgctctcgtcaactggagcatgctcccgttcatgtccgacatctgggaaaatatcatcgcggaagtctgcccgaaactttccaaagccggcgaccgctttttcttcatcgaccttgccgacccccagaaacgggagttgtccgacattaaaaggatgttgagcatagttccgaagttttcaagttgctataaagtcatacttgggctgaacggacgcgaggctgggcagatagcgtccgcgctcggcgtctccgccgacgcttccgggccggacgccgccgcccgcgcctgcgaggaaatctcccgcgcgctcgacatctactccgtcgtggtgcatcccgtcgaattcgccgtcaccgtcgtcgacggcaaaacctaccatcaggacggcccacacacaaaacgccccgtaatcacaaccggagccggagaccatttcaacgcggctttctccctcgccctcgctctcggaaccgatccccaaacggccctcctcatgggcgtgtgctgctcaggctattacgtgatgacaggcgagactcccgacatggacaagctgttgtcgttcatgtccgactggcgggacgaccccttcggcaaaatgtgaagcgcgcctcttctgatgttgccaataatatacccgacatccgcccgtaggtggcgacccgccgggttgcccggatgtgcgataaaggaaaaaggcgacagcccaatcagcgggcaattcatgaattgcccctacagctaaaaccgcaattggcaacgtttgtcattaggctatacatgttattaaatgattccacccgctaccaagcgcgccatgcgcaaacttttttctttgcgcattatgctttttaccaaaatagttaatgggaaccttcattcaattcttcgtatatacgcgcaaacgcatttgtgacaatcagcatttattgccgccattcgcctcggatgcttttgatataataaaaaaggggcggcccgaaagccgccccttgcgtttcgcttgtgcttcttaaaatgtcagcccagcagcttcgagatcattccggctgctttcttcggattgagaagatcgcggcgggaagccattttgatcttctgctgtttctccctgtccgcgtacatttcgaacatctcttccttgtagtggaagacctgaatgtagttgacttccttgtaatcgctcgaaatatgagcgtccgggtagcgtttcttggcctcttcgacgcgctggagggcgagtttaacaatgtcctcgcgcttgccgaattcgagcgctccggtcgggcaagtggtgacgcacgccggctgcaggccgttcgtgatccggtcgaaacagagcgtgcacttaacgtacggcgctccgtctttttcctgtttcgggatgttgtagccgcaattcatcccttcgaccttagctgtccgctcattgtatatgacggcgcccgtgtcggtgatgacgacggctttgtcatccgtgccgtcggcgatcatcttgcaggccggctctatgcagtggcggcaggagtccttgaagaacgtccagatgattccgaggtctccgccttcctgttccttgaatctgaccacggtgcgggtctggtgagaaaggtcgggcgggttctggtgggttcctcggttgttcgtcttttccgcggcgtcctgattccagttcttgcaggctttctggcaaccgcggcaggcgatgcatttcgaagagtcaaaaagttttgcgtatgccattcccgatcaccccttcctttctatattcaccatgaacgccttggattcagggatcatggtgttagcgtcgcccacggtgggcgtgagcaggttcgcggtgtctccgccgttttcaggcgcgcaccagccgaagtgccatgtggttcctacctgatgaacggtctggcctttgattgtgaaaggtttgaatctcgatgtgaccatcgcgacgacgtcgatctggccgcgcgccgacttgattgtgaccatttcgccgttctttattcccttgagggcagccagctctttgctcatctcgacgaagttctgcggagccagttcgacaagctgcttgttccagcgggtcatgagtccggtctgccagtgctcgacaaccctgtacgtggagcaaacgaacggatagcgcggatcgcaggtcaaataaacgtccttgccctcgccctcgcccttttcgttgaacagcttgacggtcgggttgattctctgtccgctgaaagcgttgttctcgaccgggcattcgagcggttcgtagtgttccgggaacgggccttcggccagtccgggaccgaatatcttgcctactccttcccatgtcatgataaaaggcagtttgcctttttctttgtccgacatcgggggagccgcgttgtccgcgatgtctccgacccatttggctccgtcccacttgatgacgggcagttcggggcggcgcgggtttccgtcgaggtctaccgacgcgcggttgtatatgatgcggcggttcaacggccagcaccacgaccagttggagtaaagcccgatgcccgacgcgtcgttgttgtcccggcgcatcatcatgtttccggcttcgggataacttccgctgtacagccagttgccgcaggcggtcgagccgtcgtccttgaggccgacgaagttcgtaacctgcgtccccttttttaacacagcgccgtccgctccggccacgtcctgcgtgtaatagccgttaacctcgcgggctatcttgcgagagcttaggtgtccgttttcctcgtaatcccacgctagtccgagtatcggggccgggaatgctccgccttccgtcttgtatagctctttcaagcggtgaatgaggccgtcgataatctcggcgtccggcatcgcttctcccggaggattgacggctttgtagcgccactgcgcccaacgtccgctgttgctgatgctgccttctttttccaccgacgccgcgcagggaagcatgaacaccgcggtctttatcttgctcgggtccatccccgggcctttccagaactgtcccgtctcgttcgggaacagattcacgttcaccagccagtcgagttcgccgagagctttgcggacttttccggcgttcgcgctgctgcatgccgggttcatcccccacgcgaagaatccggagaatttgcccttgctcatctggtcgaacaggttaagccacgagtagttggctcccacatcgcccttcggcagccagccgtatccgaaatcgttttccttcgtcgctgattcgccgtagaatgccttaagcaggctgaccatgtacttcggggtgtggctccaccagttaaggctctgaggctccgccgtcgtcggcgtggtggccttcaggaagtccgccagcgtggcttgtgtgccgagtgggaacttcagatagccgggcagtatgtggaatagaagggcgaagtccgtcgagccttgcacgtttgactcgccgcgcagcgcgttcacgccgccgccggccactcccatgttgcccagcaacaactgaattatcgacatagtcctgatgttctgggttcccaccgtatgctgcgtccaacccatcgcgtacaggatggttccggacttcgcgggaccggatgtggaagtgtacgtcttatagacctttaaaagctcgtccttggtcgtgcccgtcacttccgccactttgtcgatgtcgtagcgggaataatgcttcttcagaagctgatatacgcagttcggatcctgcatcgagggatcctttattaccacgccgttggcgtctttctgatacgcccacgtcgccttgtcataattgcgtttttcagcgttgtatccggagaacagcccgtcctcgaacttgaagtccttgttgattaggaacgaagcgttcgtgtaattctggacatagaacttgtcgatcagatcgttgtccagaatatacttaatcatgccgcccaagaacggaatgtccgtcccggagcgaaggcgggcgtaaatatccgcctttgaagacgtcttggtgaaacgcgggtcgacgctgataagtttcccgcctttctccatcgccttcgtaacccatttgaatgaaatcggatggttttccgctgcgttgcttcccatcaccaacacgacatcgctgttgctgaaatcgatccagtgattggtcattgctcctcggccgaacgactctcccagagccgctacagtagccgagtgtcatatgcgggcttggtgttctatatacaccaagcccaaacctctgaggaatttttggtagatgtagcactcctcgttgtccagcgcggcgctccctacggacgcgattccttccgtgcggttcaccgtctctcctttggcgttcttctcggcaaaactcgcgtcgcggctcttctttatccgctttgcgatctcgtcgagcgcccagtcccacgacacttctttccattccttgccgtacggctcgcgatacaacggcttagtcactctgtcgttgttcaccgcgaggtgatacagcgacgcgcctttgctgcatagcgcgcctcggttgatcggagcatccgggtcgccttcggtgttgattatcttgccgtcaacagcgtgcaccaagatgctgcaactgaccgaacagtacgggcagatggtggttgttaccgtcgcgccttttgtgcgcaactctgcggcataggctcgggaactcttgaacccgaaaccgattccgctgagcgacagtccggctaccgtcgcgcccgaaactttcagaaacgttcttctggtcagcttcatgtgtgtgaactcacccctctcataggatttatttttaatcaaacaaatacacctttagcttacacagtttcttctcataaccacttcaaaatacccacgatgaaaagaggtgtcaatagaatgagaaattaatagaaatctatgtcagaaatgacatagattttcaaaataatcttttatctatttggatatttgcttatgctatatttaacatagcttcgacgtatagttcaccgagcgaacatcctaacaacgtctctccgggcgcgtccgccgatagcacgcaaccatcctctatcgtgccggggccggaaagtattctcgcctccggctccaccgccacaagcctgtctcctgccactccgtggacgattatcggctctttcgcgccgaccgggagcgtctccctcaattcgcagaactctatccttgtgatctctccggggtcggaatgaatgtgaacggcgtaatccctcgcgcctttttcgtccacaaagaaatgaacgaagttcaagtcccgctcccctgtcctgtccggcggcgcgcccccccctcctaattgtatatatataattccttctatttcttccctttgcgcgctgtgcttgtgcccgtaacaaacatactccacgcccgccttctggaacatccctatcatcctctcgacttccttttctctttcctccaacgttgtgttccttatgtacatcgggtcaagcatgcttcggtttccgtagaccgggaaatggaaaaaaacgaacctgtgctcggcgggccgcgcaagctgctcctcaagccactcccattgttcgtccggtttcggcccgtccatcctcaacgttgcgtcgttgtgtttctgcgcgttgtcgagcatcagaacctgcgtgtccccgtaattcaccgcgtaataaagattgcccatccgctccctgtacagcttggtcgacaggtagctgtcgtggttgccgattgtcgcaaacagcggagcttcgagtttcgccgtctcagtttcaaaaacgttccattgcgctggttcgtccacatccacgttgtcccccgcgtttaccacgaaaaccggtctgcgcaagttgacctgacggcgcacgcgcgcgaactgctccgtcgccccgtccgcccccagatgcgtgtcgctgaaagcgataaagttcagtcgctcgccgggcgccgggttgtatgcggtttccagaactgcgcctcccggccgcgaagcgttcgccctcagcgctacgattccatccgactcccggatctccgccgtctcgactccttttcccgaaaacgacagcctgcctgcccggacattcgccagttcgattctaaacgcgtccgtccccgccgctcccccctgaatcctgaaccccggctcgagcgatgtggcgcgcactcgggcgaaaccctctccgcgctgacgcacgaacgccccccgcgcggatatcctcagttcctcgctcgcgcgggcgccgccgaacggccatgccgccatccccgccgccacacccgctcccgctgcggccatccccttcaaaaaatcccgcctcgtcatttctttcataaagcgctcccatttttcgtcagaaaagcttccggttccgcgcgcacggcgcgacaaacaatgaacatctctttgactcgtttttcagcgaaattccatcttcagccgtcgctcgcagcttcttctattccggcgaatctgtttctcgttcgacaggctccggggaatccggtttgaaccttgctttgttgattacgaatataaaagtgtcgccctgaatgaaatagggatgaaacaagtccggattgtccgccgcccaatatgcttccaccggcgtttccactctcccgcgcgcaaactcgcgcgttaggaatagaacgtccacatcttcctttattaatacagcaagccatgcgtcgaaatcgggatatcccctgaagatgtgattgagccaaaccgattccgagggcggcttgtagccggggaacgagcggaggtctttttcatagtggtgaaaaacagcgccctgcctgccgtccacattcgcgtatatcaccctgtttttgagcctgtgtccgtatagtccgtacggcgaacagttgccggaatacgcgaccgtcaaagccgagtcgatggaattcagcgcccgccatcctgacgccagataatgagcgccgtaccaatcgtatctgaatctttccatgtggccggatttgtaagggagcgcgaaatacagagccgcggcggccatcatcgcggggacaatcgcgcgagcgggttttcgtcccgccggggcgaaaaacgccgccgcccccgcgagcgccgccatagcgaacagcgcaagcgccggagccgcgtttgagacccattccggcaacccggccccgccgaaaaacgcgtcccgcgcgaacgcgccgaaacgcgtcgcggcccctacgttgcccaacgccaacgcgcccgcgaccacccaccatcccctttcccacttccccttccacatcgcaatccctatccctatcgcggcaagcatcagacccggagccagaaacctcgcgttattctcgatgttgtaagggttcacatgccagaacaggagaaataccgccgggactagcgcgataaccaagcgaacatgcggcgcgcggcgggttttcaacgctgcggacatcagcgagaaaaacaggactcccgataccagcggaagcgcagaagccgccgaagccggcaaaaaaccggggtaacgcgcctgcgccgcaatcgcccccgctgccgccgcgaacgccaccgcgcgcgccgcagtcgccctgccgggagccgctttcagcgcccccgcaatcagcgccgcgccgaataaaaccgcagccgcgccgccgccgagcgcccgcccgaccactatcttcccgaacgcccccatgtccgacgcgggtatgtgcaggtatgaccggaacatcgccgccctctcgaatgccccctcgaatattttccatccgaatatgtccagccccatcgggtagaacgggctgcctgtcaatgaaaggttgcgcgcgtaccagaatatgcctgcggctgctgcggcggcgaaaaatgcgtccgctctggacagaacttttttccatgactcgccgcgcgcgcgcgccgccaccagcggaaccagtagcgccagcatcaccgccccgaaatacttcgagccgacagccagccccgccgctagacctgccatcagcatgtcgcctttcgcgcgcccgccgtccgaccgcgggatcaaaaacgcgactgcggccaagaaaaatgccgtaaaataaaggtctattccgaattgaagggtttgcgcaagaacaattgggactgcggaacccgccgccgccgccgtcgccgcgctcttcggcggcatccccgcccgcagccctattacgtgcgccgcaagcgccgcagtcagcagtcccgccgactccatcagcccgcacagcaggtcgtcgttcagaggcagcatcagccacagatacatcagttcgccgttccccggatagtaggtcgtcgcctgttccgggcttagcgtctgaacgaaaactatctttcccgcgtgcagccactccgccggaaataccagatggtccagaaaagcgtccgtgggggcaggcggcatggtcagcgcaaacgagcacatcatcaagaaaaggacggcggatatgattttcactgcggccatcgccgcgcccgccatcgcgtccggctccgaatgcggcgcttcgccaaaagaaagaacgtcaggggagtaaaccgcccgcgaagatttcgccttgacgcgcgccgccgcgacaacaaccgccagaatcacgatctgcgccgcgaacgcgttcgggtacttaatcgcgcccgccatagacaacaggagcagggtaaaagcgaccgtggagacaaaaacgacgcaggcggcaagcaaccgctcaggcccgcgtcgattccccgtcagcaaccccgacgccacccacgccgccgccgctgctggcagattcagcgcgaacagcctcgcgatgtcgctcagattttccattgttgaattataccaattatttcatccgaacaaacggttttttatatgacattgaacataaactgcggaattccgctatatttcgcttgctggcaaatatgcgcctctgaatctcttcatatctccctttttctttgtttattattccggcggcgctgttaattatttcgcggtttcgtgtaaaccctgaggaatttcggtaatatagtaatgagggacaaaataccggataacatgcggcaagggagttttccctcggaacggaggcggaggctatgaaaaagattgtggcggcggcgatgatagcggcggcgatgatagcggcgtcaacggtcgcgacctttgcggctgaaacatacaacttcggcgtttacatggggccggacgagcgggaccagcagcttaaaaccgttctcggcgcggtggtcaaatacgtcgccgacatcgagaaggtcgatatgcaactcaaatggtacgacgacgaaaaggccttcaccgacgacgccgcgaaaggcgttctcgatttcgcgttcacaaaaaataccgatccgttttttcttctggccactaaactcggctatgagccgatacttggcgtgtcgcttttcgacaagaaaaccgcccggatgtgcctctactcaagctcggacacgaaaatcacgggcatcgacaaaatgaaagacctgcgtctagccacctacaaggaacacgacggctactatccgctccgcaagatgttcggagacaaaattctcgatgggcttttcaaggaagtgaaattgaacagcaacggcatggcctcgctcgacatgcttgcaaaaaaagaggttgacctcgcccttgtgcacgagatgaacgtcttttccctcaagctgttcaaccccgccatgataagcaaactgaacgagcttgtttgctcggaagcgacagttcagccggggataatgaaacacaagaacgcccctaccctgctagtcaacaggctgtccagcgtgatggaaagcgcccacaagtccgaaaccctgaaaccctacagaagccttatgaaaacaacaaaaatacgctttttccccgttaccataaaagacttcgacccgctcatcaagctatacaccgacgcggcaaaaagcggctgggataaagactacaataaatggctggccgccgctaaaaaatagttcgccgatataaacgacttattatttgaaattactcatgaattgttgctgttttcgctcacgcacaaaaaaaacattttgtgcatggcacacaaacgagtgggtaaaatcaattaagaactggcataaacgcgttaaatgaaactgccgtattcatgcttgaacccggctttatttatagacccctgagaaccgggccatttttatagcggcacactgcttctcacgcacaaacgagcttgtgagcgccgcccatgtttgtttttctgtaggggcgcggtttccgcgccctatcatggcgttgttccgggcggggcaaccccgcctctactttgaataacgcgccttgcggtccgcatttcttccgctttgaacattcgctcccgaatcctaatgatggatccgggtttaaatgaaaactccaaatctgcacatggtattatttgtagcgcacataaataatcaaggaaagaagcgggattttcaattagtattccgacacagtcgccgaatttgcctttcattcccagagcggcgaaaagcgggcacaggcatcgctggggcgcgcgctgccagtccccgattttagcgtgtaaatgtttgccgggcgggtggaacatagcctgctttcgctcgcaggacataacaattccaacaagaacaatcccaccccctgccgacattccttttttactgtccgattaaatatttttcaaagacggcaatttgacgcgcaataatgtcacaggcaacgagtagaatgcatgacaaggttgtcgcattctaattgattgacaaaaagggactatgtatctgatataataaggcggctatatcacataacaggaggcaacgctatgtttaatttagtagatgaggaatggattcccgttctatggaacaacggacaagtaagcgccatcggcattaaggaagcgttcacgcgagccggaagcatacgccagatagccgcgagcaaccctatggaccgtttcgccatcatgagatttctattggccgtgctttattggtgcaaaggcaacccgacagaaggtgaaacaaaattgaaaggagattcatttcctgccgaatggtttgaaaaacttgaagcggaaaaagactgtttcaatctgctgggagaaggaaaaagattttttcaaaatcaatcagcgaataggaagaaatcaacaacggaattgctccaagaaatacctaccggcaacaattttcgacatttccgccattcgacagataatatcaacggattgtgcaaggcatgttgcgcaatggggctattgaggctccctctgttttccgtgtccggtctgcccgacctaaaagcaggcattaacgggactccgccaatctatatatttgccatcgggcctaatcttaaggaaaccctcgtttcaaattggatgcatgttgatagtataggcaatccctcatgggtcgcgccgtcgattactaataattctagctcttgcgcgcctttgcttgacggattgacgaccttatcaagaaaggtctttctgcacaatcccgatgacgaaatgtcagactgtataggatgtggcaaacgggactttttgataacaacatgtgaattccagagcgccggagaacttcgaaacgaattatgggatgatcctcatgttttgtacacagacaaagaacctcgcaaatcattaaaagctccggatcccacatcgactgggagattcagaatggatagaccgtggccggaaacggcatctcgaatatcccaatcaaacagattcattggcgcaaatacggacaatatgattctcgtgataggtttctccacagacaaagcgaaaaatatagatgtctgggaacgaacgataagaataccgtcaaaacctgcaagcacagatacggcggccacgcttatcgaattatggaaaaaagaaagttggctgatagaaaaacagcggatcggttcgagatctgataaagaaaattcatcaatggccgcaacgatacgtcctcatgttgagcatgtggtttcgtcgcgacttgacgaattgctaaccggcgaccctgccgcatgggacgacgcctcgcgcgagtaccgaccattaatgagcgcggttgccggagctttatccccggggtttacttcttcggctctcgaaagacgcagacaaatatcccgcgtcatccccgatatgcgtgaaaaaaaatccgccggaaaatcccgcgtgaagaaaggaggaaaaaaagatgagtgaaacgcagcgctttatcgacacgctgacgaaccttaaatccggcgagttaagcctgttgcgcgctcactcaggacaaaaacttgacgagtccgtccccgcatttgatttgttcacaggaatatggtggccgttaagacaacggagtcaacgcgcgccgcgccgcgaagtggcgtggctgatagcgaaactctacgcttttcgtcccgccgtttccaacgaacaaggaaagactctcgcgtctcaacttgggagttctatgccgcgcaatcagacttccgacgagtcaaaccgccttaggcaggctttcgacaacctgcttcttgcatcccttagcgacattgagccgagtttacaatgggctttagacagaatcgagtcaaaaaaactcaatctcgattgggttaagctgaccgacgatctttccatctgggaacgcgagtcaacccgcctgagatgggcggaagaatttctaaaccgaaaaggagaataacatgctaatcgaaatccacatgatacagaaccacagtccggccaacttgaacagagacgaccttggcgcgccgaaaacctgctatttcggcggagtcatccgctcgcgcatttccagccaatgcgtcaaacgaagcataaggatgagcgaggagttcaaatctctatgcggcggcgtccgcacaagacagttggcaaaactgatttcagaaagaatccaaggcaaggcagacgccaaaaagagagctgtcgcaatactcaaaaagtgcggcatcgctcctaaagacgaagaaaaaagcgatatgttggtctacaccacaaaagaagcgatctcgaaaatggcagacctgctggaaaacagttccggcaagtccgacgatgagcttgcatcggaattcggggggcttatttctgaattgaccgctgttcccgacatggccttgaatggaagaatgcttgaaaccggtgttcttaaagacacaacagtcgaggccgcgcttcaagtcgctcacgccatatcaacgcacgaagcccgtccggaagttgattattacgttgccgcagacgacattccgggagccgacgcgggcgccgggtatgttgatgaagctttgttctcgtccgcatgcttttacaaatatttctcaattgattttgaggctttagttaaaaacttgaaaggcaacaaagaactcgccgcacacaccgtaggagctttcatccgcgccgcggcgacagtcaatcccacaggaaaacaaaacagcttcgccgcgcataatcctccagacggcattttgattgaactcaaaaaatcgcccgttagttatgccaatgcattcgcaaggccggtctctatcagcggagggcgcgacatcgtttctcagagcgtcgctcaactcggacaatacatcctcgatctggacgccggctacggtaaaccggaaaaccgattctggttctctccgaacctgcggttcccgttgcagacgatagaggagaataaagaaatcgatctctcagataacaacgtcaaatcacttgacgaactgatccccgccatcgtctccgctatcggatatgactggagcaaagtaaaagaggttgttcttaattcagaggtggcatgatgggcgaaaacacgatgtttctccgtctagaagggccattgcaagcgtggggcggacatgagtccaagtttgtcgtccgcagaacctgcgaagcccccacgaagtccggcgtttccgggattatttgcgccgcgcttggcgttccgcgagcagaagcatcctcattctggttgccgaagcttcgctctttgcttatgggcgtcagaattgacagggccggaatccgctggtgggactaccacactgtgggcgcagaaatgcagatgagcattgcggaagccgagggcaagacaaagaaaggcgcgctgctcacgcgtcgagaatatctttgcgacgcttcttttttagtcgctttgcagggagattcagcagtgatcgatcagatcgaaaccgccgtaataaatccgaaatggacgctctatctgggaaggaagaactgcgttccatcgcggccattgagcgagcgccctccggaatcgcatcctgatctgatctcggcgttgtcatctgttccttggcgcagaaggaacaaggaagatgaagcgccgcagtcaatcgactgcctgattgactggacgcccacgcaagaacagccggaagcgccggatgacgcgttagtgtggcacgatgtccccatactgttcgagccgccatcccatcagcctcggtttgtgatgctgaaaaacctctcagttggaacagaaggagatgtcaggatagcggaagacgcggcgcaaagcagagttcccgatccgccacgttcccgcgcggactattcaaactccgcatacaagaacgcgcgggccgagcggctgaactccgaccacggactttgcgttttctgcaaatctcccgcgacaacagttcagcatgtgacatatcgccgcgctggcggcaatgaatctcaagaagatttgcgctctctttgccgactctgtcacgacgcagtcaccatgatagagtacggacacggaatggggcttgaccggataaaccccgaacaccctcaatggcgcgatgaaattatcaagaaacgagaagaagtagtccgataccggtctctcgaaacccgacggagacgcctgagcgcagaggaggtggaataatcgtcatgtttctttcttgccttttaatcaacaccggcgacaaccccgaccgaccgcgtccgggaagaatatggttgcgcaatctttacagagtccatcagcgcttgtgcatggcgttcccttcgtcttccgcatcgttagccgacccggattttcttttgccattcaagcctgacggcttcgcaaaaggccatgtgcatgtccctcgcaaacctgataccggttttctgttccgcgtcgaccctcttgcgggaaacggagccgcaatcatcgttcagtccgcatcaatgcccgattggcaatatgcgttccacaacgccgggtttcttctctccgccgaaccgcaagtaaaagccttcgagcctgtcttttcccttgatatgcaataccggttcaggctccttgcaaacccgactcgaaaaatctgcaccaagaccggcgaagacggcaaaagacgcaacggaaagcgtgtcccggtggcctcagataaacttgaagaatggctacattcgcgagccgaacgcgcgggtttttccgtcgttaaaaactctctgtccttaactccgtcttatgtctatgtgagcgcgcggaacgaaaaccttaaagggcaaaagcttcgttccgtccggtacgacggcgttattacaataacggacgcggatctattcaaagaggcagtgacaaacggcatcggcggcggcaaaggcttcggtttcggccttgtcagcctcgcccggatatgaccgccatgagggacttgcgtgaactgccgaaattcgaaaatagatggagccatcttttcctcgaacacggaaggctggacgaaaaggccggagccttgctatttcacgggaccgacgggtctatcgagattccgattaaccagctaggactgcttttgctaggccccggcacgaccgtcactcaatcggcaatgcgttttcttgccgacaacaacacgcttgtgtgctggacaggcgaacaaggcgtccgtctttacgcgcacagcacgggaggctctcactcctcaagacgcttgcttcgacaagcggggctttacgtcaacatggattcgcgcatcgccgtcattcgccggatgtacaacatgcgctttccggaaaaacttcccgactccgtttctctcgacaccgtaagaggaatggaagggcacagagtcagggaggcataccgcaagctcgcggaagagaacggcgtgatgtggcgcggcagaatatacaatccgcagaactgggatcaggccgacccgctcaaccgggcgctctcatccgctttcgcctgcctttacggcttgtgccacgctgcaatactttcggcgggatattctcctgccatcggattcattcataccggcaagatgctttccttcgtctatgacgtcgccgacctgtacaagatggaaatagcagttccgctcgcgtttcaaacttgctctgaaagcgatgtcgatgtcgagcgcaatgtaagattggcttgtcgggacgtttttcataaaacaaagctgatgaaacgcgtcttgccggatatcgcggaggtattagatgctggtgatgatattggagaaatccccggcgagcttgaggggagacttgtcacgctggatgatagagccgcgaccgggactctaccttggcaatccgagcgcgaggattagagatattctgtggaacaaagccgtcaagaaaatacgcgacggcggcgtcactcagatatggagcgacacccgctctccgcaaggatatctttaccgctcctgtgggaaaccggcccggccaatgatcgatgtcgatggacttgcccttgttctttctccttacaaaactgaaaggactgacgagactttgatcaatcaaaataataaggagtcttcacaagatgattgatttgacaatactactaaaagtgttttaaaaaaaccggcatacaatatgctggtgtcttccccacgcgtgtgggggtgaaccgccgactgagaacgacggcgaccgaggcgcgccgtcttccccacgcgtgtgggggtgaaccgggggcgatatgaaatccactaaacaggccacagtcttccccacgcgtgtgggggtgaaccgtttgtcaactggaaccagatgtacagctataagtcttccccacgcgtgtgggggtgaaccgtcttcatgctttgatcctttcggtatgtttgtgtcttccccacgcgtgtgggggtgaaccgatactcgaatacccgaatcctgtatctgcgccggtcttccccacgcgtgtgggggtgaaccgtgtttcccatgttgtctataaaattgagagccgtcttccccacgcgtgtgggggtgaaccgggggtgaaatgatgagcgttttttcgcagaaagtcttccccacgcgtgtgggggtgaaccgacgaagctatgcagttgcctaaaatcctgaacgtcttccccacgcgtgtgggggtgaaccggtaaatgccccacgtgcggcgaaccgatgtacgtcttccccacgcgtgtgggggtgaaccgtaaactctaatccgtcgccgctatctgtggcagtcttccccacgcgtgtgggggtgaaccgccatcgttgtcttccaccaggccgcttacgtagtcttccccacgcgtgtgggggtgaaccgcgggtggcgacgcttacggcttcttctttagcgtcttccccacgcgtgtgggggtgaaccgcagcctttgacagatggaatgcccgccgttgggtcttccccacgcgtgtgggggtgaaccgagaagcccatgacacaaacccaactattgatagtcttccccacgcgtgtgggggtgaaccgatggaagaaacaacatctcaaaaacttgcaaagtcttccccacgcgtgtgggggtgaaccgcgggggtcggctgacggggtcggggatggcagtcttccccacgcgtgtgggggtgaaccgcggcgagcagtttgagttgcgaccgccgacgcgtcttccccacgcgtgtgggggtgaaccggagggcgattgaaatggcagaaagcaccgcaggtcttccccacgcgtgtgggggtgaaccgcccggaagctaacaaaggaaatcaacaaacaagtcttccccacgcgtgtgggggtgaaccgccgttgaagataaattgttcccatatgtctgcgtcttccccacgcgtgtgggggtgaaccgtggatcagcacttgattgaccgtgagcggatcgtcttccccacgcgtgtgggggtgaaccgaatcctagagatcatgccgtcgccgccaatatgtcttccccacgcgtgtgggggtgaaccggcttgagcgtggtcgagggcgcgattgccgctgtcttccccacgcgtgtgggggtgaaccggctaatagaattaatagaattaacgtccggaatttcggcgtccggaacaaaattgccgttattctgttttattattgattgtgaaacaaatccatcacggcgaggtttgagatattgtgaacgattccaaagacctgtttgaaaaagttaaacatctattgctcggccagtactttgctgttctttcatcggtacagagggacggcagtccgtattcaaacataatcggttttgcggctacggacgatctcaaacatcttgtttttgcgacgccccgaaacacgaggaaattcgacaatctgctcggagagccgcgcgtttcgcttctggttgacaacaggagcaacagcaaaggcgacgttcatgacgccgcagccgtaaccattctcggagcggtcagggaaatcgaccgcgtcaatgatagcatttactttgagctatacgcggaaaggcatcctcatttagtggatttcttaagggcggacgataccgccgtcatagcggtgagcgttaatgagtactgctatgttagcaagttccagagcgttatgacgttgagcatgaaataaggagacaggccgcaatgaaaatatggaagtttatgaaaagaatcgggacgaccgcggcgacgctggcggcgcttgactccgtctggctgggcgtcattatgagcgactattataaagaacatctcggagaactggccagaagaaacgacgccgggctgacccccgactggaccgccgtgatattggtttacgttgcgctgacggcaggcctgaacatattcgcggtggatacggagtccggcagcgggcgcataaagaattctctcgtcaggggcgcgttattcggattaatcagttatggcatttacgaccttacgaacatggccacgctcaaggggtggtcttgggaaatgacggtggcggacatgctttgggggacattcctgtgttccgtggcaagcgccgcgacggccgccgccgccgcaaagtgagcgtcaaatgaaactgaaccaaatcgttatcatcggagtcgttctcctgttgtcgttcgccggggggcagttcacgtcgtccggcatggactggtaccggactatacaactgccgacatggacaccgccgggttccgtcataggcatagtgtggacgacgatatacatactgacggcggtatcggcgattatagcttggagagttttcgctggggattcccgattctatcttgtggccggactgttcatgatgaacgcggcgttcaacctcgcatggagctacattttttttgcccggcgcatgataggcccggcggttatagattcgatggcgattgaaatcacgctgcttgcgctcattccggttctgtggaagaaatcgcgcgcggcgtcggttctactcctgccatacgcgctgtgggtcgggttcgcgacatatctcaattactgcatctacgcgttgaacaagacgtgaaacaggagacgcccgcaagatgaaaacgatgtttgcgcggataacttgtctgagcctgattatcgccgcttcctccgttatttcggttgcgctcgcttcggattcaggatatgtcgcaacgggcgcaaaggcgaagaatttcaaactgaacgaccagcacatgcagttggtggaactggacaagctgcgcggatcgacggttgtcataatctacaccggcagaaacggattcgacgacgcggctgaaatcatcaagaaactcgacaagaaacatagcgggcgggaagacgggaaaaaagccggcaaggatatccgcatagtcggcgcggcgaacttaaagggcgttcccgctttcgtgaagaagatggtgaaaaaccgcatgaaagagccgcgttatccttcgttcctcatggactggaaaggcgagatagcggcaacctacggttatgatgaaaaagggattgccgcgttcgtagtggatggaaaaggcatagtgcggttttcaggcaatatcaaaaacgccgacgatgacatctctaaagtatccgcagctatcgactcgatatagaatccacccctgagttcatagtagaaacaacggcggagcggcgaaaagcaggcacaggcatcgctgaggcgcgcgctgccagtcccctttttcgctcagagttcacagtagaaacatcgaatgtttattgaacacaaacagacattacgcaaacgataatcaatccccccgccggcattcctctttttgtgccttcattctttatcttttgtttcttaattcattctttcttgccgtcattccttttctcttgtgccgtcattcccgcgaaagcgggaatccattttcacccgcccggatgctatttcgcctatcagcgacattgtaaactgtcaaaagcctcggccttaccatagatgctcccgtttttaaaattgctaatttcaaacctgaccacttcttcttcgcttcttctcgcatttgctatttgtgttgagtcaggcagtcaacagctttgggattgtttgttctgcgcaatactttgattatgtattcctgtatttcttggttgtctgcttcgtcaagaagtttgcacaagagcataattgcagcgtcttttccatattcgccaaggtttcgtatacaagagttctgaaaatcgctgtggtctctgtgaatagattcattgctgggggggttcggcatttttcctctggacaaatctattctttctctgtcacgagtaatatcgttaaagtaactctgtttttcttctccactcgcgatcctttccatcacaaacaatgctttgtcctcataaccccatcttagaagacacccggcagctacgcctctaactctaatgtcattgtcatttatggcgtttgatatcacagcttgagatttgacatccaacctacataattcattggtagcattcattcgcaattctggacttatgtcagatttaattatgtcttcaagcaaggggacgatacgtgggtctcgagaatttgctatgtctactaaaacaagtcccttcgcaaactcggaagtaagatgatttttgtattgatatatttttagcggtagttcacagcaaaacgttcttctatcgtattcatatatcaaccgctgatgctttttttgctcttcttcatccatatcatcgaagtctttccggggatcaatatatgatggtttccgcgaagaccaaacagggcaccactcgtcagctctgaaagaatcagatggattatccagaaacttatttaaaacttcctctcccatctttatctcttcatccggacacgctttcaaacccgtgaaatcatctgcggatgcgctgacaaaagcaatcaatgtccacaccaagcagcacagtatcatcagcaaaaccgcatatggtggagtcaggcggagcctgtttacagaattagagttgatctggttggctgatcttgattttgtataagcacggctgttgtagggatagttgttcggtcgcggatgtgtggtctgtcgcagcttcatggcggttatgttgccattatgaacgaaggagaacgatttggcaacggggggtgggaggttgtgtgttgtggagggcggatggggtggcttaaggagtgggatgctaggaataaattcccggaaaggcaaagcggcaatgaattgccgcactccaaagttccacattaattttggctgatccttaggcataggcagaaacgagtttggggggcgcgcccggagggacaagagcgaagcaggtgtgggcgctaaagctcaaggatgtcggggcgggacaggcgggcgccttggaaatcaacttcgagttcgggccattcgcctgtgcgggtgatgaattcggcgcggtcggcaaacgcgattatggtgtcttctgatttcgtgcctgtaatggaggggttccatgcgaaagcgcaattgggtttgacctcgccgggggtgtcggggctggcgcagaagtatcttgacttgtagccgcacgggccgccctgatggtgaaggagccattcgtggtcgaagccttcgctggagtaaacggcggtggcgtcgcggaaaacggaggaaatcttcgcgccgggtcgggtgagcaagttgaaagccgcatcgacgcggcagcaggcggcgtgtctgcggcggaggtcgtccccggcggggccgaagctgaccatccgagtggcggaagccacaagcccgccccttctggcgcagaggacaagcattgcggctcgctcaaggggctgccgcgtcggcagaggatgcctgtatgccgggagcctgcctccggaagctacgaggacgacgatcggctgcgcgtcccgcgtccagcactcggaggcgagcgcggcggcggcggcgttctcggtcatgcccggacgcaaagccctcgcggcggactcgagcgcggccccggcgtccgctccgagcgccctgaacctgtccatctcgctttccgtcaactccatcatcaggtcggagaaatcctcgcccgccgggacgaagccggaggccggcatgtccgccgccgccacgcccgcccccgcgcacatccgcgctatcttcgcgttcctgtcgtcggcccatggaatctcgacaagctccacgtccagcccgacgagttcctcgtctctgattcttgcggactcgattcggttggtcacgaccgcgcatcggtctggaagcagaacaaaggaggcgacgcccgcttcggcggccatgttcacgtggcaactggctccgcaagcggcccacgcaaagttgtccgaccgcgatagcgccagcgcgccccagccccgctctttcattctctcccgcatcctgtctatctttatgccgaattcttccgctctggtcattgttccggccctcaggttattgtttgtcgcgacgccgccgcgattcggatattatatcagttcttaatcggttttgccgattgagagcgcccgcaacggagttgtggacgccacccgtgatgacagggttgcggatagcgagcgcgctgatagctaattttatttaatcgctgatataatgattcgaggcggttgcggtggggacgccgcgaaacttgcgcggattcgcgtattgaaccggagaatgcggggcgcgaacgccgaggagcgaagtatgttaataggaattatatccgacactcacgacaaccttgaccggttaagagcggcgatatcgacgctgaaatcccgcggcgccgcgcggcttatccactgcggcgacatcgtttccccgttcgttgtgaaagctatcgcggaagccgggttcgaggagtgtttcggagtgttcggaaacaacgacggagaattgatttatctttccgaaacatttaagaagatagggcggatagagaagccgccggctttcatagagatgggcggagcgcgttttgccgtgcttcacgagcctatgccggacgacgcgatggcggcgctgccggtggacgccgtgctgttcgggcacacgcatcagcctgttctcaaggacggcaaacccgtgatagtgaatcccggagagtgttgcggatggctgacaggcaaatcgactatcgccgtttttgacacggcggggatgaaggcagagctaatcgagctgtaggcgcgaaagccgcgaggaggccgcaagccttcggaggaaacagatgaaagttaaaatggcgataatagcggcggttctggcggcggcggtctgcgctccggcgtcggcggttcttccggacgcgcgcgggccaaacgcctctgtagcaggcgaaaactccgcgacgatgaaagaaattttcaggataaaggtggagaacgcggcgggcggagcggtggaagtgagcgaagacggaggcgcttcgtggacggccgccggaaaagtcctgctggccgccgggacgataaatccgcgagcgtacaccgccagcggctgggcgtcttcgggggctgtcgctgcgaccgccgtaaacgccattcacataaaagtgcggcagaacgaagacagaggcgcggtgttcagcatcctgcccaaagatttcttctctccgccggcggattataaatctttctattcccggaacagttcaataataacgaatatcccggctggagggagcattttcggaggagccgaatcgccgttcataggctcgcgggttctcgcggcccgcgccggttccgctcactccccaatcgccgaggattatacgccgtcagaaggcgattccctgctgataatcgtcgaacagccggagaaatatccatcggaaatcgtcttcgaaaacaggttcggagggttcatccttataaagtatcccggagaggaaccgaaactcatcgggcaggtgttgaaaccggtggcgggggttggaaggttcgaaggctcgctgtacacggacgtcgggagaatcagggcgaaccacacgggagtcatctgcgtctcgacgtcgccggtgggagagataggcggttttcagataatccctgaaaaccacgcgatgagcgcggagatggagaacgcgaggctgctgacgcagtggatggtggtcgggccgccgggggcggcggacccgtcgctcgaaggggtggctccgctgttcaggcatttcatcaggccggtacatttcaaaagcgggccgcagggaaaaacgcttgaacaggctttgggggcgttcatagttcaggcgcggatcggcggcggggagtggacgcggatgccgtcggtgtccgggcgggacgacaaagctctgaaagacgtcacgcacatacgcatgctgttcccggtcgaatggaaacattagccgggctatcgcctatgcggggcggccgggctttgcgggttgcgggcgcggggtatacaccggggcgcaaatgcgtataattgagactaggcaaggaaagcgggacgattaaggatgtcggaattaagacgcgaccccgtgttgggtcgatgggtgataatatcctccgagcgcggcgacaggccgagcgatttcatcgcagcgaaacctcttccgaaaacgggcttctgcccgttctgtccggggaacgaagacaagacgccgcctgagatagacgcggtgcgggactcgtgcacggagccgaacaagcccggctggcgcgtgcgcgtggtgtcgaacaagtatcccgcgctctcaatcgagggcgacctcaacaagcgggcgcgcggcatctacgacatcatgaacggcatcggcgcgcacgaggtcttcatcgagacgcccgaccacgacaaaaccatatccaccctagaaccgcaaaacatggaacagctaatgtggatgtacagggaaaggatgatagacctcgagaacgacgaacggttcaaatacatactgatattccggaacgcgggtcagtccgccggggcgtcgctggctcatcctcactcccagctcatcgccacgcctaccgtccccaagagaataaccgaggagcttaacggcgctcaggaatacttcgacttcaaagaccgctgcgtcttctgcgacatgatagacgaagagagggactaccagagaagggtcatcagcgagaacgaccgatttattagtttcgcgccgttcgcgtcccggttcccgttcgagatgtggcttgtgccgaaacatcacgaccccaatttcgcggacttggaagactccgacatcgcgtctctggcgcagtgttttcagaagtcgctcaaatatctggacaaggcgctggacttcccgccgtacaactacatcatccacaccatccccgtgaacaccagccgacagtacacgtaccactggcacatagagataatcccgcgcctgaccaacatagcgggattcgagtggggcaccgggttctacatcaatccggttccgcccgaacaggcggtggagattctgcgctcggcgaacggagacacgcaatgagcgggggcgaactgagccacatagacgaaaaaggccgagcgtcgatggtggacgtgtcggaaaaggaacgtaccgcgcggcgcgcaaccgtccggggcgaagtgcggctcaggcccgacgtgatagacaaaatactgtccggcggaatctccaagggagacgtgttccaagtcgcccgcgtcgccgccgtgtgcgccgcgaaaaaaacatccgaccttatccccctgtgccatcctctcagcctgacgaaagtttccgtcgagttcagcgccgacagagacgctggaataatcgttatcgacgcggaagccaaagcgatggacagaacgggggtggagatggaagcgctaaccgccgcgaccgtggccgccctcactatctacgacatgtgcaaagccgtccagaaagacatctccatcggccctttccgccttatggaaaaagaaggcggcaagagcggcccttataaaaacgaagcttgaacccgaacttgaagaaaaatatttgccggaagaaatcagattaaaaaactgtcgatggttgaccgcgtccggaggcgttcagaatgaaggcaaaaacaatcgcgttggctatagttgcggcggcgtttatggcgggcagtccccgcgcgctcgcggacggaggctccccctcccccgcttcgctgagggttctcaccgcaaacgtcggcaacgcggacatactgaactgcggcccgaaatatttttacaaactgtgtctcgtggaatgggagaagaaggtcgcggaagggatagccaagctgtcgcccgacatagtgtcgctgcaggaagttctggacgttcagtggtgcgaggcggcggccgtggagaaaaacaagaagaatgtgtgcttccggtttgaggacaggaaagagaggcatcaggttcgcaggctgttgggagatgattatacgatagtgtgcgacgggcgcgccaactacgagtgcataggagtgaaaaaaagcgtcgggacgattgaaggttgcgggcgcggagaactgtgccgcgctccgggctggccgctgacaatcgaaacgccggaaggatgctcgacaaagacggtcgtgttcggggcggacgcggagattaatgggaaacggctgaggatagtcaacgggcatccgtcggcggcggacgccggatgccgcgccgaagagttgagaaggttgttcgagggatacgaagggttcccggcgcttgcggccacggacagtcctgcgattatcatgggcgacatgaatatggacccgtttcaatgggacgccgcaaaagacgacgtggcggtttggctgaagcatgttggggatggcaagaaatattactatctgagcggtcctgcggaaaacgacccgccgttcaggacatgctccgggttcacgctggaccacgtgataacgaacgcggcgcgcggctcttgcgtcacgctggggcagtcgcccgggacggaacggctggacgggcatccgaagggggctccgattcaggaagcgcccgaccatttcgctattctttgcgaaatatccctgcctgacggggattgacggcgcggcggcaatcggtttggagcgggatagacgccgttctagggccgatttaaataaagttgcaaaaatatatctcaataacaataataatgcctgttggcggagtgtcgcggaacgaactgcgacgcgcccgtcaaaattcatcaggggagtgccgcgatggataaggaaaaagaaaaagaattagtaaagtcgtatctttaccttaacgccgtccttcctcagcttgaggagataatcgcgtatgacgcggaggcgcgcgagctgacgaaaggctggaactgcacgatccagatgcacgtgcccggcggggcgggagtcaggttcgtcttcaaagacggcaaatgcgaggcgaaactgggcgctgtgagcatgcccacaatctcgctgaggattccgacgccggaagccgccaacaaaatgatagagaacaccggcacggtcattcccatgatatggggcttctggaacatcgggaaactcggaaagttcatgaagctgacgaaactcatggagaagtatctgagaccgtcggaagaagatctcaaaaacaaggacttcttcgagttccatacgcgcgtgaaactcatgatggccgtctatggcatgaaggccgtcggagagcacgacacgtatgtaaaaggaatagtgtcgaaagtgccgaacgggccgatggagataaaggtgctgccggacgggccggtggcgcatatcgtgctggacaacggaaagttcgctgtggccaaagggccggcggcgaacccgatggtcgtcatggaaattaaagacatcaagctggcgtacgatatgctgaacgccaatgtagagttcatggaagagctgggcctgtgccgcataaggctgcgcgggcacgtcggaatggctgaaagcctcgcggtcgttatggagcgcatcggcctgtatatcagttgacgccggacgactatacccaactggagggcttgaaaatggaaacttacaaatttgataaatcatacgagtggttcgagcgggcatgcaaagtcattccgggcggagtgatagggcacaaacaccccgcgttcaccgtccccggctcgtatccgtatttcgcgactcgcggcgagggaagccactactgggacccggacggaaacgagtacatcgactggatgtgcggtttcgggccgatggtgctgggatacaacaacccggtggtggacgcggcggcgcaggaacaggcaaaactgggcgacggcatgagccatccggggccgatcagcatcgagtacgccgagatgatggttaaactcaccaagggcatggactggtgcgtgtacggaaagaacggcgcggacatcaccacatggtgcatgaggctggcgcgcgaatacacggggagaaagaaaatcctgatcgcgcgcggcgcgtatcacggcgctcaggcatggtccaccccaagctacggcggcatcatcgacgaggatcgcacgcacgttcacttcttcgaatggaacaacctagactccttcatggaactgatcaacacatacaaagggcaggtcgcgggcgtgatgatgacgccgtaccaccactgcatatacgcggaccagcagatgcccgctcccggctggtgggaagccatcggcaaagtctgcaaacaggaagaattgattctgatatcggacgacgtgcgcgccgggttcaggctcgacatggctggcagccacgcctacttcggatacgagccggatctggtctgctactccaaagccatagccaacacctacccgatctccgccggtctgggaacgaacaaactgaaagagaccgccgaacacgttctgttcacgggaacgttcttcagcagcatggttccgatggcggcgtccatcgccaccgtgaaagagatgcagaggctggacggagtaaactacatgatgaaaatcggcaaggcgctctgcgacggccttgtcagcgtaggcaaatcccacgggtttgagattatcatgtccggaccgtacgacataccgttcatgcggttcgcgcgcgagaagaacttcatgctcaaacagctcttcagcggcgaggccgccatccggggcgtcatcttccacccgcaccacaactggttcacctcctgcgcgcacacggaagaagacatcaagaaatcgctcgaagtggccgacatcgctttcaagaaagtcaaagacaaatacggaagcgactgaagcgcgacaaacggatagacgcagtaaatccgcctttaaaagcgcctccggcggccaaagagaaacttttgaaaaagtttctctttggaatctcttcaaaacttttcacatgagcgcggcggagcgatggcgcgaacgcgcccgctccgccgcgcgcatagaaatgttttgagggaaaacttttttaaaagttttcccttaaccgcattaaagcgcctccggcggttcaaggaaactttgaaaagtttccttgaaaatccttcaaacttttccttgcgcgtcggtacgggacgctgacgcgtcccgtaccgacgctcctgtggaaatgtttaagaagaagattcctcatgaaacccctttctcaatatcttttcgcatgatacgcgccgatgggaagagcgaagccttcccatcggcgctagcgcgaaaagttttgaaagggtttaagggaatactttttcaacgttccgtcattagtaatacgtatcatatacgaagaactaaatgaaagctcccatttactattt

SEQ ID NO: 960 - DNA, 103604 bp, Artificial Sequence
  Synthetic Oligonucleotide
  misc_feature (1)..(26422): n is a, c, g, or t
nnnnnnnnnnnnnnnnnnnnnnnnnnnnnnnnnnnnnnnnnnnnnnnnnnnnnnnnnnnnnnnnnnnnnnnnnnnnnnnnnnnnnnnnnnnnnnnnnnnnnnnnnnnnnnnnnnnnnnnnnnnnnnnnnnnnnnnnnnnnnnnnnnnnnnnnnnnnnnnnnnnnnnnnnnnnnnnnnnnnnnnnnnnnnnnnnnnnnnnnnnnnnnnnnnnnnnnnnnnnnnnnnnnnnnnnnnnnnnnnnnnnnnnnnnnnnnnnnnnnnnnnnnnnnnnnnnnnnnnnnnnnnnnnnnnnnnnnnnnnnnnnnnnnnnnnnnnnnnnnnnnnnnnnnnnnnnnnnnnnnnnnnnnnnnnnnnnnnnnnnnnnnnnnnnnnnnnnnnnnnnnnnnnnnnnnnnnnnnnnnnnnnnnnnnnnnnnnnnnnnnnnnnnnnnnnnnnnnnnnnnnnnnnnnnnnnnnnnnnnnnnnnnnnnnnnnnnnnnnnnnnnnnnnnnnnnnnnnnnnnnnnnnnnnnnnnnnnnnnnnnnnnnnnnnnnnnnnnnnnnnnnnnnnnnnnnnnnnnnnnnnnnnnnnnnnnnnnnnnnnnnnnnnnnnnnnnnnnnnnnnnnnnnnnnnnnnnnnnnnnnnnnnnnnnnnnnnnnnnnnnnnnnnnnnnnnnnnnnnnnnnnnnnnnnnnnnnnnnnnnnnnnnnnnnnnnnnnnnnnnnnnnnnnnnnnnnnnnnnnnnnnnnnnnnnnnnnnnnnnnnnnnnnnnnnnnnnnnnnnnnnnnnnnnnnnnnnnnnnnnnnnnnnnnnnnnnnnnnnnnnnnnnnnnnnnnnnnnnnnnnnnnnnnnnnnnnnnnnnnnnnnnnnnnnnnnnnnnnnnnnnnnnnnnnnnnnnnnnnnnnnnnnnnnnnnnnnnnnnnnnnnnnnnnnnnnnnnnnnnnnnnnnnnnnnnnnnnnnnnnnnnnnnnnnnnnnnnnnnnnnnnnnnnnnnnnnnnnnnnnnnnnnnnnnnnnnnnnnnnnnnnnnnnnnnnnnnnnnnnnnnnnnnnnnnnnnnnnnnnnnnnnnnnnnnnnnnnnnnnnnnnnnnnnnnnnnnnnnnnnnnnnnnnnnnnnnnnnnnnnnnnnnnnnnnnnnnnnnnnnnnnnnnnnnnnnnnnnnnnnnnnnnnnnnnnnnnnnnnnnnnnnnnnnnnnnnnnnnnnnnnnnnnnnnnnnnnnnnnnnnnnnnnnnnnnnnnnnnnnnnnnnnnnnnnnnnnnnnnnnnnnnnnnnnnnnnnnnnnnnnnnnnnnnnnnnnnnnnnnnnnnnnnnnnnnnnnnnnnnnnnnnnnnnnnnnnnnnnnnnnnnnnnnnnnnnnnnnnnnnnnnnnnnnnnnnnnnnnnnnnnnnnnnnnnnnnnnnnnnnnnnnnnnnnnnnnnnnnnnnnnnnnnnnnnnnnnnnnnnnnnnnnnnnnnnnnnnnnnnnnnnnnnnnnnnnnnnnnnnnnnnnnnnnnnnnnnnnnnnnnnnnnnnnnnnnnnnnnnnnnnnnnnnnnnnnnnnnnnnnnnnnnnnnnnnnnnnnnnnnnnnnnnnnnnnnnnnnnnnnnnnnnnnnnnnnnnnnnnnnnnnnnnnnnnnnnnnnnnnnnnnnnnnnnnnnnnnnnnnnnnnnnnnnnnnnnnnnnnnnnnnnnnnnnnnnnnnnnnnnnnnnnnnnnnnnnnnnnnnnnnnnnnnnnnnnnnnnnnnnnnnnnnnnnnnnnnnnnnnnnnnnnnnnnnnnnnnnnnnnnnnnnnnnnnnnnnnnnnnnnnnnnnnnnnnnnnnnnnnnnnnnnnnnnnnnnnnnnnnnnnnnnnnnnnnnnnnnnnnnnnnnnnnnnnnnnnnnnnnnnnnnnnnnnnnnnnnnnnnnnnnnnnnnnnnnnnnnnnnnnnnnnnnnnnnnnnnnnnnnnnnnnnnnnnnnnnnnnnnnnnnnnnnnnnnnnnnnnnnnnnnnnnnnnnnnnnnnnnnnnnnnnnnnnnnnnnnnnnnnnnnnnnnnnnnnnnnnnnnnnnnnnnnnnnnnnnnnnnnnnnnnnnnnnnnnnnnnnnnnnnnnnnnnnnnnnnnnnnnnnnnnnnnnnnnnnnnnnnnnnnnnnnnnnnnnnnnnnnnnnnnnnnnnnnnnnnnnnnnnnnnnnnnnnnnnnnnnnnnnnnnnnnnnnnnnnnnnnnnnnnnnnnnnnnnnnnnnnnnnnnnnnnnnnnnnnnnnnnnnnnnnnnnnnnnnnnnnnnnnnnnnnnnnnnnnnnnnnnnnnnnnnnnnnnnnnnnnnnnnnnnnnnnnnnnnnnnnnnnnnnnnnnnnnnnnnnnnnnnnnnnnnnnnnnnnnnnnnnnnnnnnnnnnnnnnnnnnnnnnnnnnnnnnnnnnnnnnnnnnnnnnnnnnnnnnnnnnnnnnnnnnnnnnnnnnnnnnnnnnnnnnnnnnnnnnnnnnnnnnnnnnnnnnnnnnnnnnnnnnnnnnnnnnnnnnnnnnnnnnnnnnnnnnnnnnnnnnnnnnnnnnnnnnnnnnnnnnnnnnnnnnnnnnnnnnnnnnnnnnnnnnnnnnnnnnnnnnnnnnnnnnnnnnnnnnnnnnnnnnnnnnnnnnnnnnnnnnnnnnnnnnnnnnnnnnnnnnnnnnnnnnnnnnnnnnnnnnnnnnnnnnnnnnnnnnnnnnnnnnnnnnnnnnnnnnnnnnnnnnnnnnnnnnnnnnnnnnnnnnnnnnnnnnnnnnnnnnnnnnnnnnnnnnnnnnnnnnnnnnnnnnnnnnnnnnnnnnnnnnnnnnnnnnnnnnnnnnnnnnnnnnnnnnnnnnnnnnnnnnnnnnnnnnnnnnnnnnnnnnnnnnnnnnnnnnnnnnnnnnnnnnnnnnnnnnnnnnnnnnnnnnnnnnnnnnnnnnnnnnnnnnnnnnnnnnnnnnnnnnnnnnnnnnnnnnnnnnnnnnnnnnnnnnnnnnnnnnnnnnnnnnnnnnnnnnnnnnnnnnnnnnnnnnnnnnnnnnnnnnnnnnnnnnnnnnnnnnnnnnnnnnnnnnnnnnnnnnnnnnnnnnnnnnnnnnnnnnnnnnnnnnnnnnnnnnnnnnnnnnnnnnnnnnnnnnnnnnnnnnnnnnnnnnnnnnnnnnnnnnnnnnnnnnnnnnnnnnnnnnnnnnnnnnnnnnnnnnnnnnnnnnnnnnnnnnnnnnnnnnnnnnnnnnnnnnnnnnnnnnnnnnnnnnnnnnnnnnnnnnnnnnnnnnnnnnnnnnnnnnnnnnnnnnnnnnnnnnnnnnnnnnnnnnnnnnnnnnnnnnnnnnnnnnnnnnnnnnnnnnnnnnnnnnnnnnnnnnnnnnnnnnnnnnnnnnnnnnnnnnnnnnnnnnnnnnnnnnnnnnnnnnnnnnnnnnnnnnnnnnnnnnnnnnnnnnnnnnnnnnnnnnnnnnnnnnnnnnnnnnnnnnnnnnnnnnnnnnnnnnnnnnnnnnnnnnnnnnnnnnnnnnnnnnnnnnnnnnnnnnnnnnnnnnnnnnnnnnnnnnnnnnnnnnnnnnnnnnnnnnnnnnnnnnnnnnnnnnnnnnnnnnnnnnnnnnnnnnnnnnnnnnnnnnnnnnnnnnnnnnnnnnnnnnnnnnnnnnnnnnnnnnnnnnnnnnnnnnnnnnnnnnnnnnnnnnnnnnnnnnnnnnnnnnnnnnnnnnnnnnnnnnnnnnnnnnnnnnnnnnnnnnnnnnnnnnnnnnnnnnnnnnnnnnnnnnnnnnnnnnnnnnnnnnnnnnnnnnnnnnnnnnnnnnnnnnnnnnnnnnnnnnnnnnnnnnnnnnnnnnnnnnnnnnnnnnnnnnnnnnnnnnnnnnnnnnnnnnnnnnnnnnnnnnnnnnnnnnnnnnnnnnnnnnnnnnnnnnnnnnnnnnnnnnnnnnnnnnnnnnnnnnnnnnnnnnnnnnnnnnnnnnnnnnnnnnnnnnnnnnnnnnnnnnnnnnnnnnnnnnnnnnnnnnnnnnnnnnnnnnnnnnnnnnnnnnnnnnnnnnnnnnnnnnnnnnnnnnnnnnnnnnnnnnnnnnnnnnnnnnnnnnnnnnnnnnnnnnnnnnnnnnnnnnnnnnnnnnnnnnnnnnnnnnnnnnnnnnnnnnnnnnnnnnnnnnnnnnnnnnnnnnnnnnnnnnnnnnnnnnnnnnnnnnnnnnnnnnnnnnnnnnnnnnnnnnnnnnnnnnnnnnnnnnnnnnnnnnnnnnnnnnnnnnnnnnnnnnnnnnnnnnnnnnnnnnnnnnnnnnnnnnnnnnnnnnnnnnnnnnnnnnnnnnnnnnnnnnnnnnnnnnnnnnnnnnnnnnnnnnnnnnnnnnnnnnnnnnnnnnnnnnnnnnnnnnnnnnnnnnnnnnnnnnnnnnnnnnnnnnnnnnnnnnnnnnnnnnnnnnnnnnnnnnnnnnnnnnnnnnnnnnnnnnnnnnnnnnnnnnnnnnnnnnnnnnnnnnnnnnnnnnnnnnnnnnnnnnnnnnnnnnnnnnnnnnnnnnnnnnnnnnnnnnnnnnnnnnnnnnnnnnnnnnnnnnnnnnnnnnnnnnnnnnnnnnnnnnnnnnnnnnnnnnnnnnnnnnnnnnnnnnnnnnnnnnnnnnnnnnnnnnnnnnnnnnnnnnnnnnnnnnnnnnnnnnnnnnnnnnnnnnnnnnnnnnnnnnnnnnnnnnnnnnnnnnnnnnnnnnnnnnnnnnnnnnnnnnnnnnnnnnnnnnnnnnnnnnnnnnnnnnnnnnnnnnnnnnnnnnnnnnnnnnnnnnnnnnnnnnnnnnnnnnnnnnnnnnnnnnnnnnnnnnnnnnnnnnnnnnnnnnnnnnnnnnnnnnnnnnnnnnnnnnnnnnnnnnnnnnnnnnnnnnnnnnnnnnnnnnnnnnnnnnnnnnnnnnnnnnnnnnnnnnnnnnnnnnnnnnnnnnnnnnnnnnnnnnnnnnnnnnnnnnnnnnnnnnnnnnnnnnnnnnnnnnnnnnnnnnnnnnnnnnnnnnnnnnnnnnnnnnnnnnnnnnnnnnnnnnnnnnnnnnnnnnnnnnnnnnnnnnnnnnnnnnnnnnnnnnnnnnnnnnnnnnnnnnnnnnnnnnnnnnnnnnnnnnnnnnnnnnnnnnnnnnnnnnnnnnnnnnnnnnnnnnnnnnnnnnnnnnnnnnnnnnnnnnnnnnnnnnnnnnnnnnnnnnnnnnnnnnnnnnnnnnnnnnnnnnnnnnnnnnnnnnnnnnnnnnnnnnnnnnnnnnnnnnnnnnnnnnnnnnnnnnnnnnnnnnnnnnnnnnnnnnnnnnnnnnnnnnnnnnnnnnnnnnnnnnnnnnnnnnnnnnnnnnnnnnnnnnnnnnnnnnnnnnnnnnnnnnnnnnnnnnnnnnnnnnnnnnnnnnnnnnnnnnnnnnnnnnnnnnnnnnnnnnnnnnnnnnnnnnnnnnnnnnnnnnnnnnnnnnnnnnnnnnnnnnnnnnnnnnnnnnnnnnnnnnnnnnnnnnnnnnnnnnnnnnnnnnnnnnnnnnnnnnnnnnnnnnnnnnnnnnnnnnnnnnnnnnnnnnnnnnnnnnnnnnnnnnnnnnnnnnnnnnnnnnnnnnnnnnnnnnnnnnnnnnnnnnnnnnnnnnnnnnnnnnnnnnnnnnnnnnnnnnnnnnnnnnnnnnnnnnnnnnnnnnnnnnnnnnnnnnnnnnnnnnnnnnnnnnnnnnnnnnnnnnnnnnnnnnnnnnnnnnnnnnnnnnnnnnnnnnnnnnnnnnnnnnnnnnnnnnnnnnnnnnnnnnnnnnnnnnnnnnnnnnnnnnnnnnnnnnnnnnnnnnnnnnnnnnnnnnnnnnnnnnnnnnnnnnnnnnnnnnnnnnnnnnnnnnnnnnnnnnnnnnnnnnnnnnnnnnnnnnnnnnnnnnnnnnnnnnnnnnnnnnnnnnnnnnnnnnnnnnnnnnnnnnnnnnnnnnnnnnnnnnnnnnnnnnnnnnnnnnnnnnnnnnnnnnnnnnnnnnnnnnnnnnnnnnnnnnnnnnnnnnnnnnnnnnnnnnnnnnnnnnnnnnnnnnnnnnnnnnnnnnnnnnnnnnnnnnnnnnnnnnnnnnnnnnnnnnnnnnnnnnnnnnnnnnnnnnnnnnnnnnnnnnnnnnnnnnnnnnnnnnnnnnnnnnnnnnnnnnnnnnnnnnnnnnnnnnnnnnnnnnnnnnnnnnnnnnnnnnnnnnnnnnnnnnnnnnnnnnnnnnnnnnnnnnnnnnnnnnnnnnnnnnnnnnnnnnnnnnnnnnnnnnnnnnnnnnnnnnnnnnnnnnnnnnnnnnnnnnnnnnnnnnnnnnnnnnnnnnnnnnnnnnnnnnnnnnnnnnnnnnnnnnnnnnnnnnnnnnnnnnnnnnnnnnnnnnnnnnnnnnnnnnnnnnnnnnnnnnnnnnnnnnnnnnnnnnnnnnnnnnnnnnnnnnnnnnnnnnnnnnnnnnnnnnnnnnnnnnnnnnnnnnnnnnnnnnnnnnnnnnnnnnnnnnnnnnnnnnnnnnnnnnnnnnnnnnnnnnnnnnnnnnnnnnnnnnnnnnnnnnnnnnnnnnnnnnnnnnnnnnnnnnnnnnnnnnnnnnnnnnnnnnnnnnnnnnnnnnnnnnnnnnnnnnnnnnnnnnnnnnnnnnnnnnnnnnnnnnnnnnnnnnnnnnnnnnnnnnnnnnnnnnnnnnnnnnnnnnnnnnnnnnnnnnnnnnnnnnnnnnnnnnnnnnnnnnnnnnnnnnnnnnnnnnnnnnnnnnnnnnnnnnnnnnnnnnnnnnnnnnnnnnnnnnnnnnnnnnnnnnnnnnnnnnnnnnnnnnnnnnnnnnnnnnnnnnnnnnnnnnnnnnnnnnnnnnnnnnnnnnnnnnnnnnnnnnnnnnnnnnnnnnnnnnnnnnnnnnnnnnnnnnnnnnnnnnnnnnnnnnnnnnnnnnnnnnnnnnnnnnnnnnnnnnnnnnnnnnnnnnnnnnnnnnnnnnnnnnnnnnnnnnnnnnnnnnnnnnnnnnnnnnnnnnnnnnnnnnnnnnnnnnnnnnnnnnnnnnnnnnnnnnnnnnnnnnnnnnnnnnnnnnnnnnnnnnnnnnnnnnnnnnnnnnnnnnnnnnnnnnnnnnnnnnnnnnnnnnnnnnnnnnnnnnnnnnnnnnnnnnnnnnnnnnnnnnnnnnnnnnnnnnnnnnnnnnnnnnnnnnnnnnnnnnnnnnnnnnnnnnnnnnnnnnnnnnnnnnnnnnnnnnnnnnnnnnnnnnnnnnnnnnnnnnnnnnnnnnnnnnnnnnnnnnnnnnnnnnnnnnnnnnnnnnnnnnnnnnnnnnnnnnnnnnnnnnnnnnnnnnnnnnnnnnnnnnnnnnnnnnnnnnnnnnnnnnnnnnnnnnnnnnnnnnnnnnnnnnnnnnnnnnnnnnnnnnnnnnnnnnnnnnnnnnnnnnnnnnnnnnnnnnnnnnnnnnnnnnnnnnnnnnnnnnnnnnnnnnnnnnnnnnnnnnnnnnnnnnnnnnnnnnnnnnnnnnnnnnnnnnnnnnnnnnnnnnnnnnnnnnnnnnnnnnnnnnnnnnnnnnnnnnnnnnnnnnnnnnnnnnnnnnnnnnnnnnnnnnnnnnnnnnnnnnnnnnnnnnnnnnnnnnnnnnnnnnnnnnnnnnnnnnnnnnnnnnnnnnnnnnnnnnnnnnnnnnnnnnnnnnnnnnnnnnnnnnnnnnnnnnnnnnnnnnnnnnnnnnnnnnnnnnnnnnnnnnnnnnnnnnnnnnnnnnnnnnnnnnnnnnnnnnnnnnnnnnnnnnnnnnnnnnnnnnnnnnnnnnnnnnnnnnnnnnnnnnnnnnnnnnnnnnnnnnnnnnnnnnnnnnnnnnnnnnnnnnnnnnnnnnnnnnnnnnnnnnnnnnnnnnnnnnnnnnnnnnnnnnnnnnnnnnnnnnnnnnnnnnnnnnnnnnnnnnnnnnnnnnnnnnnnnnnnnnnnnnnnnnnnnnnnnnnnnnnnnnnnnnnnnnnnnnnnnnnnnnnnnnnnnnnnnnnnnnnnnnnnnnnnnnnnnnnnnnnnnnnnnnnnnnnnnnnnnnnnnnnnnnnnnnnnnnnnnnnnnnnnnnnnnnnnnnnnnnnnnnnnnnnnnnnnnnnnnnnnnnnnnnnnnnnnnnnnnnnnnnnnnnnnnnnnnnnnnnnnnnnnnnnnnnnnnnnnnnnnnnnnnnnnnnnnnnnnnnnnnnnnnnnnnnnnnnnnnnnnnnnnnnnnnnnnnnnnnnnnnnnnnnnnnnnnnnnnnnnnnnnnnnnnnnnnnnnnnnnnnnnnnnnnnnnnnnnnnnnnnnnnnnnnnnnnnnnnnnnnnnnnnnnnnnnnnnnnnnnnnnnnnnnnnnnnnnnnnnnnnnnnnnnnnnnnnnnnnnnnnnnnnnnnnnnnnnnnnnnnnnnnnnnnnnnnnnnnnnnnnnnnnnnnnnnnnnnnnnnnnnnnnnnnnnnnnnnnnnnnnnnnnnnnnnnnnnnnnnnnnnnnnnnnnnnnnnnnnnnnnnnnnnnnnnnnnnnnnnnnnnnnnnnnnnnnnnnnnnnnnnnnnnnnnnnnnnnnnnnnnnnnnnnnnnnnnnnnnnnnnnnnnnnnnnnnnnnnnnnnnnnnnnnnnnnnnnnnnnnnnnnnnnnnnnnnnnnnnnnnnnnnnnnnnnnnnnnnnnnnnnnnnnnnnnnnnnnnnnnnnnnnnnnnnnnnnnnnnnnnnnnnnnnnnnnnnnnnnnnnnnnnnnnnnnnnnnnnnnnnnnnnnnnnnnnnnnnnnnnnnnnnnnnnnnnnnnnnnnnnnnnnnnnnnnnnnnnnnnnnnnnnnnnnnnnnnnnnnnnnnnnnnnnnnnnnnnnnnnnnnnnnnnnnnnnnnnnnnnnnnnnnnnnnnnnnnnnnnnnnnnnnnnnnnnnnnnnnnnnnnnnnnnnnnnnnnnnnnnnnnnnnnnnnnnnnnnnnnnnnnnnnnnnnnnnnnnnnnnnnnnnnnnnnnnnnnnnnnnnnnnnnnnnnnnnnnnnnnnnnnnnnnnnnnnnnnnnnnnnnnnnnnnnnnnnnnnnnnnnnnnnnnnnnnnnnnnnnnnnnnnnnnnnnnnnnnnnnnnnnnnnnnnnnnnnnnnnnnnnnnnnnnnnnnnnnnnnnnnnnnnnnnnnnnnnnnnnnnnnnnnnnnnnnnnnnnnnnnnnnnnnnnnnnnnnnnnnnnnnnnnnnnnnnnnnnnnnnnnnnnnnnnnnnnnnnnnnnnnnnnnnnnnnnnnnnnnnnnnnnnnnnnnnnnnnnnnnnnnnnnnnnnnnnnnnnnnnnnnnnnnnnnnnnnnnnnnnnnnnnnnnnnnnnnnnnnnnnnnnnnnnnnnnnnnnnnnnnnnnnnnnnnnnnnnnnnnnnnnnnnnnnnnnnnnnnnnnnnnnnnnnnnnnnnnnnnnnnnnnnnnnnnnnnnnnnnnnnnnnnnnnnnnnnnnnnnnnnnnnnnnnnnnnnnnnnnnnnnnnnnnnnnnnnnnnnnnnnnnnnnnnnnnnnnnnnnnnnnnnnnnnnnnnnnnnnnnnnnnnnnnnnnnnnnnnnnnnnnnnnnnnnnnnnnnnnnnnnnnnnnnnnnnnnnnnnnnnnnnnnnnnnnnnnnnnnnnnnnnnnnnnnnnnnnnnnnnnnnnnnnnnnnnnnnnnnnnnnnnnnnnnnnnnnnnnnnnnnnnnnnnnnnnnnnnnnnnnnnnnnnnnnnnnnnnnnnnnnnnnnnnnnnnnnnnnnnnnnnnnnnnnnnnnnnnnnnnnnnnnnnnnnnnnnnnnnnnnnnnnnnnnnnnnnnnnnnnnnnnnnnnnnnnnnnnnnnnnnnnnnnnnnnnnnnnnnnnnnnnnnnnnnnnnnnnnnnnnnnnnnnnnnnnnnnnnnnnnnnnnnnnnnnnnnnnnnnnnnnnnnnnnnnnnnnnnnnnnnnnnnnnnnnnnnnnnnnnnnnnnnnnnnnnnnnnnnnnnnnnnnnnnnnnnnnnnnnnnnnnnnnnnnnnnnnnnnnnnnnnnnnnnnnnnnnnnnnnnnnnnnnnnnnnnnnnnnnnnnnnnnnnnnnnnnnnnnnnnnnnnnnnnnnnnnnnnnnnnnnnnnnnnnnnnnnnnnnnnnnnnnnnnnnnnnnnnnnnnnnnnnnnnnnnnnnnnnnnnnnnnnnnnnnnnnnnnnnnnnnnnnnnnnnnnnnnnnnnnnnnnnnnnnnnnnnnnnnnnnnnnnnnnnnnnnnnnnnnnnnnnnnnnnnnnnnnnnnnnnnnnnnnnnnnnnnnnnnnnnnnnnnnnnnnnnnnnnnnnnnnnnnnnnnnnnnnnnnnnnnnnnnnnnnnnnnnnnnnnnnnnnnnnnnnnnnnnnnnnnnnnnnnnnnnnnnnnnnnnnnnnnnnnnnnnnnnnnnnnnnnnnnnnnnnnnnnnnnnnnnnnnnnnnnnnnnnnnnnnnnnnnnnnnnnnnnnnnnnnnnnnnnnnnnnnnnnnnnnnnnnnnnnnnnnnnnnnnnnnnnnnnnnnnnnnnnnnnnnnnnnnnnnnnnnnnnnnnnnnnnnnnnnnnnnnnnnnnnnnnnnnnnnnnnnnnnnnnnnnnnnnnnnnnnnnnnnnnnnnnnnnnnnnnnnnnnnnnnnnnnnnnnnnnnnnnnnnnnnnnnnnnnnnnnnnnnnnnnnnnnnnnnnnnnnnnnnnnnnnnnnnnnnnnnnnnnnnnnnnnnnnnnnnnnnnnnnnnnnnnnnnnnnnnnnnnnnnnnnnnnnnnnnnnnnnnnnnnnnnnnnnnnnnnnnnnnnnnnnnnnnnnnnnnnnnnnnnnnnnnnnnnnnnnnnnnnnnnnnnnnnnnnnnnnnnnnnnnnnnnnnnnnnnnnnnnnnnnnnnnnnnnnnnnnnnnnnnnnnnnnnnnnnnnnnnnnnnnnnnnnnnnnnnnnnnnnnnnnnnnnnnnnnnnnnnnnnnnnnnnnnnnnnnnnnnnnnnnnnnnnnnnnnnnnnnnnnnnnnnnnnnnnnnnnnnnnnnnnnnnnnnnnnnnnnnnnnnnnnnnnnnnnnnnnnnnnnnnnnnnnnnnnnnnnnnnnnnnnnnnnnnnnnnnnnnnnnnnnnnnnnnnnnnnnnnnnnnnnnnnnnnnnnnnnnnnnnnnnnnnnnnnnnnnnnnnnnnnnnnnnnnnnnnnnnnnnnnnnnnnnnnnnnnnnnnnnnnnnnnnnnnnnnnnnnnnnnnnnnnnnnnnnnnnnnnnnnnnnnnnnnnnnnnnnnnnnnnnnnnnnnnnnnnnnnnnnnnnnnnnnnnnnnnnnnnnnnnnnnnnnnnnnnnnnnnnnnnnnnnnnnnnnnnnnnnnnnnnnnnnnnnnnnnnnnnnnnnnnnnnnnnnnnnnnnnnnnnnnnnnnnnnnnnnnnnnnnnnnnnnnnnnnnnnnnnnnnnnnnnnnnnnnnnnnnnnnnnnnnnnnnnnnnnnnnnnnnnnnnnnnnnnnnnnnnnnnnnnnnnnnnnnnnnnnnnnnnnnnnnnnnnnnnnnnnnnnnnnnnnnnnnnnnnnnnnnnnnnnnnnnnnnnnnnnnnnnnnnnnnnnnnnnnnnnnnnnnnnnnnnnnnnnnnnnnnnnnnnnnnnnnnnnnnnnnnnnnnnnnnnnnnnnnnnnnnnnnnnnnnnnnnnnnnnnnnnnnnnnnnnnnnnnnnnnnnnnnnnnnnnnnnnnnnnnnnnnnnnnnnnnnnnnnnnnnnnnnnnnnnnnnnnnnnnnnnnnnnnnnnnnnnnnnnnnnnnnnnnnnnnnnnnnnnnnnnnnnnnnnnnnnnnnnnnnnnnnnnnnnnnnnnnnnnnnnnnnnnnnnnnnnnnnnnnnnnnnnnnnnnnnnnnnnnnnnnnnnnnnnnnnnnnnnnnnnnnnnnnnnnnnnnnnnnnnnnnnnnnnnnnnnnnnnnnnnnnnnnnnnnnnnnnnnnnnnnnnnnnnnnnnnnnnnnnnnnnnnnnnnnnnnnnnnnnnnnnnnnnnnnnnnnnnnnnnnnnnnnnnnnnnnnnnnnnnnnnnnnnnnnnnnnnnnnnnnnnnnnnnnnnnnnnnnnnnnnnnnnnnnnnnnnnnnnnnnnnnnnnnnnnnnnnnnnnnnnnnnnnnnnnnnnnnnnnnnnnnnnnnnnnnnnnnnnnnnnnnnnnnnnnnnnnnnnnnnnnnnnnnnnnnnnnnnnnnnnnnnnnnnnnnnnnnnnnnnnnnnnnnnnnnnnnnnnnnnnnnnnnnnnnnnnnnnnnnnnnnnnnnnnnnnnnnnnnnnnnnnnnnnnnnnnnnnnnnnnnnnnnnnnnnnnnnnnnnnnnnnnnnnnnnnnnnnnnnnnnnnnnnnnnnnnnnnnnnnnnnnnnnnnnnnnnnnnnnnnnnnnnnnnnnnnnnnnnnnnnnnnnnnnnnnnnnnnnnnnnnnnnnnnnnnnnnnnnnnnnnnnnnnnnnnnnnnnnnnnnnnnnnnnnnnnnnnnnnnnnnnnnnnnnnnnnnnnnnnnnnnnnnnnnnnnnnnnnnnnnnnnnnnnnnnnnnnnnnnnnnnnnnnnnnnnnnnnnnnnnnnnnnnnnnnnnnnnnnnnnnnnnnnnnnnnnnnnnnnnnnnnnnnnnnnnnnnnnnnnnnnnnnnnnnnnnnnnnnnnnnnnnnnnnnnnnnnnnnnnnnnnnnnnnnnnnnnnnnnnnnnnnnnnnnnnnnnnnnnnnnnnnnnnnnnnnnnnnnnnnnnnnnnnnnnnnnnnnnnnnnnnnnnnnnnnnnnnnnnnnnnnnnnnnnnnnnnnnnnnnnnnnnnnnnnnnnnnnnnnnnnnnnnnnnnnnnnnnnnnnnnnnnnnnnnnnnnnnnnnnnnnnnnnnnnnnnnnnnnnnnnnnnnnnnnnnnnnnnnnnnnnnnnnnnnnnnnnnnnnnnnnnnnnnnnnnnnnnnnnnnnnnnnnnnnnnnnnnnnnnnnnnnnnnnnnnnnnnnnnnnnnnnnnnnnnnnnnnnnnnnnnnnnnnnnnnnnnnnnnnnnnnnnnnnnnnnnnnnnnnnnnnnnnnnnnnnnnnnnnnnnnnnnnnnnnnnnnnnnnnnnnnnnnnnnnnnnnnnnnnnnnnnnnnnnnnnnnnnnnnnnnnnnnnnnnnnnnnnnnnnnnnnnnnnnnnnnnnnnnnnnnnnnnnnnnnnnnnnnnnnnnnnnnnnnnnnnnnnnnnnnnnnnnnnnnnnnnnnnnnnnnnnnnnnnnnnnnnnnnnnnnnnnnnnnnnnnnnnnnnnnnnnnnnnnnnnnnnnnnnnnnnnnnnnnnnnnnnnnnnnnnnnnnnnnnnnnnnnnnnnnnnnnnnnnnnnnnnnnnnnnnnnnnnnnnnnnnnnnnnnnnnnnnnnnnnnnnnnnnnnnnnnnnnnnnnnnnnnnnnnnnnnnnnnnnnnnnnnnnnnnnnnnnnnnnnnnnnnnnnnnnnnnnnnnnnnnnnnnnnnnnnnnnnnnnnnnnnnnnnnnnnnnnnnnnnnnnnnnnnnnnnnnnnnnnnnnnnnnnnnnnnnnnnnnnnnnnnnnnnnnnnnnnnnnnnnnnnnnnnnnnnnnnnnnnnnnnnnnnnnnnnnnnnnnnnnnnnnnnnnnnnnnnnnnnnnnnnnnnnnnnnnnnnnnnnnnnnnnnnnnnnnnnnnnnnnnnnnnnnnnnnnnnnnnnnnnnnnnnnnnnnnnnnnnnnnnnnnnnnnnnnnnnnnnnnnnnnnnnnnnnnnnnnnnnnnnnnnnnnnnnnnnnnnnnnnnnnnnnnnnnnnnnnnnnnnnnnnnnnnnnnnnnnnnnnnnnnnnnnnnnnnnnnnnnnnnnnnnnnnnnnnnnnnnnnnnnnnnnnnnnnnnnnnnnnnnnnnnnnnnnnnnnnnnnnnnnnnnnnnnnnnnnnnnnnnnnnnnnnnnnnnnnnnnnnnnnnnnnnnnnnnnnnnnnnnnnnnnnnnnnnnnnnnnnnnnnnnnnnnnnnnnnnnnnnnnnnnnnnnnnnnnnnnnnnnnnnnnnnnnnnnnnnnnnnnnnnnnnnnnnnnnnnnnnnnnnnnnnnnnnnnnnnnnnnnnnnnnnnnnnnnnnnnnnnnnnnnnnnnnnnnnnnnnnnnnnnnnnnnnnnnnnnnnnnnnnnnnnnnnnnnnnnnnnnnnnnnnnnnnnnnnnnnnnnnnnnnnnnnnnnnnnnnnnnnnnnnnnnnnnnnnnnnnnnnnnnnnnnnnnnnnnnnnnnnnnnnnnnnnnnnnnnnnnnnnnnnnnnnnnnnnnnnnnnnnnnnnnnnnnnnnnnnnnnnnnnnnnnnnnnnnnnnnnnnnnnnnnnnnnnnnnnnnnnnnnnnnnnnnnnnnnnnnnnnnnnnnnnnnnnnnnnnnnnnnnnnnnnnnnnnnnnnnnnnnnnnnnnnnnnnnnnnnnnnnnnnnnnnnnnnnnnnnnnnnnnnnnnnnnnnnnnnnnnnnnnnnnnnnnnnnnnnnnnnnnnnnnnnnnnnnnnnnnnnnnnnnnnnnnnnnnnnnnnnnnnnnnnnnnnnnnnnnnnnnnnnnnnnnnnnnnnnnnnnnnnnnnnnnnnnnnnnnnnnnnnnnnnnnnnnnnnnnnnnnnnnnnnnnnnnnnnnnnnnnnnnnnnnnnnnnnnnnnnnnnnnnnnnnnnnnnnnnnnnnnnnnnnnnnnnnnnnnnnnnnnnnnnnnnnnnnnnnnnnnnnnnnnnnnnnnnnnnnnnnnnnnnnnnnnnnnnnnnnnnnnnnnnnnnnnnnnnnnnnnnnnnnnnnnnnnnnnnnnnnnnnnnnnnnnnnnnnnnnnnnnnnnnnnnnnnnnnnnnnnnnnnnnnnnnnnnnnnnnnnnnnnnnnnnnnnnnnnnnnnnnnnnnnnnnnnnnnnnnnnnnnnnnnnnnnnnnnnnnnnnnnnnnnnnnnnnnnnnnnnnnnnnnnnnnnnnnnnnnnnnnnnnnnnnnnnnnnnnnnnnnnnnnnnnnnnnnnnnnnnnnnnnnnnnnnnnnnnnnnnnnnnnnnnnnnnnnnnnnnnnnnnnnnnnnnnnnnnnnnnnnnnnnnnnnnnnnnnnnnnnnnnnnnnnnnnnnnnnnnnnnnnnnnnnnnnnnnnnnnnnnnnnnnnnnnnnnnnnnnnnnnnnnnnnnnnnnnnnnnnnnnnnnnnnnnnnnnnnnnnnnnnnnnnnnnnnnnnnnnnnnnnnnnnnnnnnnnnnnnnnnnnnnnnnnnnnnnnnnnnnnnnnnnnnnnnnnnnnnnnnnnnnnnnnnnnnnnnnnnnnnnnnnnnnnnnnnnnnnnnnnnnnnnnnnnnnnnnnnnnnnnnnnnnnnnnnnnnnnnnnnnnnnnnnnnnnnnnnnnnnnnnnnnnnnnnnnnnnnnnnnnnnnnnnnnnnnnnnnnnnnnnnnnnnnnnnnnnnnnnnnnnnnnnnnnnnnnnnnnnnnnnnnnnnnnnnnnnnnnnnnnnnnnnnnnnnnnnnnnnnnnnnnnnnnnnnnnnnnnnnnnnnnnnnnnnnnnnnnnnnnnnnnnnnnnnnnnnnnnnnnnnnnnnnnnnnnnnnnnnnnnnnnnnnnnnnnnnnnnnnnnnnnnnnnnnnnnnnnnnnnnnnnnnnnnnnnnnnnnnnnnnnnnnnnnnnnnnnnnnnnnnnnnnnnnnnnnnnnnnnnnnnnnnnnnnnnnnnnnnnnnnnnnnnnnnnnnnnnnnnnnnnnnnnnnnnnnnnnnnnnnnnnnnnnnnnnnnnnnnnnnnnnnnnnnnnnnnnnnnnnnnnnnnnnnnnnnnnnnnnnnnnnnnnnnnnnnnnnnnnnnnnnnnnnnnnnnnnnnnnnnnnnnnnnnnnnnnnnnnnnnnnnnnnnnnnnnnnnnnnnnnnnnnnnnnnnnnnnnnnnnnnnnnnnnnnnnnnnnnnnnnnnnnnnnnnnnnnnnnnnnnnnnnnnnnnnnnnnnnnnnnnnnnnnnnnnnnnnnnnnnnnnnnnnnnnnnnnnnnnnnnnnnnnnnnnnnnnnnnnnnnnnnnnnnnnnnnnnnnnnnnnnnnnnnnnnnnnnnnnnnnnnnnnnnnnnnnnnnnnnnnnnnnnnnnnnnnnnnnnnnnnnnnnnnnnnnnnnnnnnnnnnnnnnnnnnnnnnnnnnnnnnnnnnnnnnnnnnnnnnnnnnnnnnnnnnnnnnnnnnnnnnnnnnnnnnnnnnnnnnnnnnnnnnnnnnnnnnnnnnnnnnnnnnnnnnnnnnnnnnnnnnnnnnnnnnnnnnnnnnnnnnnnnnnnnnnnnnnnnnnnnnnnnnnnnnnnnnnnnnnnnnnnnnnnnnnnnnnnnnnnnnnnnnnnnnnnnnnnnnnnnnnnnnnnnnnnnnnnnnnnnnnnnnnnnnnnnnnnnnnnnnnnnnnnnnnnnnnnnnnnnnnnnnnnnnnnnnnnnnnnnnnnnnnnnnnnnnnnnnnnnnnnnnnnnnnnnnnnnnnnnnnnnnnnnnnnnnnnnnnnnnnnnnnnnnnnnnnnnnnnnnnnnnnnnnnnnnnnnnnnnnnnnnnnnnnnnnnnnnnnnnnnnnnnnnnnnnnnnnnnnnnnnnnnnnnnnnnnnnnnnnnnnnnnnnnnnnnnnnnnnnnnnnnnnnnnnnnnnnnnnnnnnnnnnnnnnnnnnnnnnnnnnnnnnnnnnnnnnnnnnnnnnnnnnnnnnnnnnnnnnnnnnnnnnnnnnnnnnnnnnnnnnnnnnnnnnnnnnnnnnnnnnnnnnnnnnnnnnnnnnnnnnnnnnnnnnnnnnnnnnnnnnnnnnnnnnnnnnnnnnnnnnnnnnnnnnnnnnnnnnnnnnnnnnnnnnnnnnnnnnnnnnnnnnnnnnnnnnnnnnnnnnnnnnnnnnnnnnnnnnnnnnnnnnnnnnnnnnnnnnnnnnnnnnnnnnnnnnnnnnnnnnnnnnnnnnnnnnnnnnnnnnnnnnnnnnnnnnnnnnnnnnnnnnnnnnnnnnnnnnnnnnnnnnnnnnnnnnnnnnnnnnnnnnnnnnnnnnnnnnnnnnnnnnnnnnnnnnnnnnnnnnnnnnnnnnnnnnnnnnnnnnnnnnnnnnnnnnnnnnnnnnnnnnnnnnnnnnnnnnnnnnnnnnnnnnnnnnnnnnnnnnnnnnnnnnnnnnnnnnnnnnnnnnnnnnnnnnnnnnnnnnnnnnnnnnnnnnnnnnnnnnnnnnnnnnnnnnnnnnnnnnnnnnnnnnnnnnnnnnnnnnnnnnnnnnnnnnnnnnnnnnnnnnnnnnnnnnnnnnnnnnnnnnnnnnnnnnnnnnnnnnnnnnnnnnnnnnnnnnnnnnnnnnnnnnnnnnnnnnnnnnnnnnnnnnnnnnnnnnnnnnnnnnnnnnnnnnnnnnnnnnnnnnnnnnnnnnnnnnnnnnnnnnnnnnnnnnnnnnnnnnnnnnnnnnnnnnnnnnnnnnnnnnnnnnnnnnnnnnnnnnnnnnnnnnnnnnnnnnnnnnnnnnnnnnnnnnnnnnnnnnnnnnnnnnnnnnnnnnnnnnnnnnnnnnnnnnnnnnnnnnnnnnnnnnnnnnnnnnnnnnnnnnnnnnnnnnnnnnnnnnnnnnnnnnnnnnnnnnnnnnnnnnnnnnnnnnnnnnnnnnnnnnnnnnnnnnnnnnnnnnnnnnnnnnnnnnnnnnnnnnnnnnnnnnnnnnnnnnnnnnnnnnnnnnnnnnnnnnnnnnnnnnnnnnnnnnnnnnnnnnnnnnnnnnnnnnnnnnnnnnnnnnnnnnnnnnnnnnnnnnnnnnnnnnnnnnnnnnnnnnnnnnnnnnnnnnnnnnnnnnnnnnnnnnnnnnnnnnnnnnnnnnnnnnnnnnnnnnnnnnnnnnnnnnnnnnnnnnnnnnnnnnnnnnnnnnnnnnnnnnnnnnnnnnnnnnnnnnnnnnnnnnnnnnnnnnnnnnnnnnnnnnnnnnnnnnnnnnnnnnnnnnnnnnnnnnnnnnnnnnnnnnnnnnnnnnnnnnnnnnnnnnnnnnnnnnnnnnnnnnnnnnnnnnnnnnnnnnnnnnnnnnnnnnnnnnnnnnnnnnnnnnnnnnnnnnnnnnnnnnnnnnnnnnnnnnnnnnnnnnnnnnnnnnnnnnnnnnnnnnnnnnnnnnnnnnnnnnnnnnnnnnnnnnnnnnnnnnnnnnnnnnnnnnnnnnnnnnnnnnnnnnnnnnnnnnnnnnnnnnnnnnnnnnnnnnnnnnnnnnnnnnnnnnnnnnnnnnnnnnnnnnnnnnnnnnnnnnnnnnnnnnnnnnnnnnnnnnnnnnnnnnnnnnnnnnnnnnnnnnnnnnnnnnnnnnnnnnnnnnnnnnnnnnnnnnnnnnnnnnnnnnnnnnnnnnnnnnnnnnnnnnnnnnnnnnnnnnnnnnnnnnnnnnnnnnnnnnnnnnnnnnnnnnnnnnnnnnnnnnnnnnnnnnnnnnnnnnnnnnnnnnnnnnnnnnnnnnnnnnnnnnnnnnnnnnnnnnnnnnnnnnnnnnnnnnnnnnnnnnnnnnnnnnnnnnnnnnnnnnnnnnnnnnnnnnnnnnnnnnnnnnnnnnnnnnnnnnnnnnnnnnnnnnnnnnnnnnnnnnnnnnnnnnnnnnnnnnnnnnnnnnnnnnnnnnnnnnnnnnnnnnnnnnnnnnnnnnnnnnnnnnnnnnnnnnnnnnnnnnnnnnnnnnnnnnnnnnnnnnnnnnnnnnnnnnnnnnnnnnnnnnnnnnnnnnnnnnnnnnnnnnnnnnnnnnnnnnnnnnnnnnnnnnnnnnnnnnnnnnnnnnnnnnnnnnnnnnnnnnnnnnnnnnnnnnnnnnnnnnnnnnnnnnnnnnnnnnnnnnnnnnnnnnnnnnnnnnnnnnnnnnnnnnnnnnnnnnnnnnnnnnnnnnnnnnnnnnnnnnnnnnnnnnnnnnnnnnnnnnnnnnnnnnnnnnnnnnnnnnnnnnnnnnnnnnnnnnnnnnnnnnnnnnnnnnnnnnnnnnnnnnnnnnnnnnnnnnnnnnnnnnnnnnnnnnnnnnnnnnnnnnnnnnnnnnnnnnnnnnnnnnnnnnnnnnnnnnnnnnnnnnnnnnnnnnnnnnnnnnnnnnnnnnnnnnnnnnnnnnnnnnnnnnnnnnnnnnnnnnnnnnnnnnnnnnnnnnnnnnnnnnnnnnnnnnnnnnnnnnnnnnnnnnnnnnnnnnnnnnnnnnnnnnnnnnnnnnnnnnnnnnnnnnnnnnnnnnnnnnnnnnnnnnnnnnnnnnnnnnnnnnnnnnnnnnnnnnnnnnnnnnnnnnnnnnnnnnnnnnnnnnnnnnnnnnnnnnnnnnnnnnnnnnnnnnnnnnnnnnnnnnnnnnnnnnnnnnnnnnnnnnnnnnnnnnnnnnnnnnnnnnnnnnnnnnnnnnnnnnnnnnnnnnnnnnnnnnnnnnnnnnnnnnnnnnnnnnnnnnnnnnnnnnnnnnnnnnnnnnnnnnnnnnnnnnnnnnnnnnnnnnnnnnnnnnnnnnnnnnnnnnnnnnnnnnnnnnnnnnnnnnnnnnnnnnnnnnnnnnnnnnnnnnnnnnnnnnnnnnnnnnnnnnnnnnnnnnnnnnnnnnnnnnnnnnnnnnnnnnnnnnnnnnnnnnnnnnnnnnnnnnnnnnnnnnnnnnnnnnnnnnnnnnnnnnnnnnnnnnnnnnnnnnnnnnnnnnnnnnnnnnnnnnnnnnnnnnnnnnnnnnnnnnnnnnnnnnnnnnnnnnnnnnnnnnnnnnnnnnnnnnnnnnnnnnnnnnnnnnnnnnnnnnnnnnnnnnnnnnnnnnnnnnnnnnnnnnnnnnnnnnnnnnnnnnnnnnnnnnnnnnnnnnnnnnnnnnnnnnnnnnnnnnnnnnnnnnnnnnnnnnnnnnnnnnnnnnnnnnnnnnnnnnnnnnnnnnnnnnnnnnnnnnnnnnnnnnnnnnnnnnnnnnnnnnnnnnnnnnnnnnnnnnnnnnnnnnnnnnnnnnnnnnnnnnnnnnnnnnnnnnnnnnnnnnnnnnnnnnnnnnnnnnnnnnnnnnnnnnnnnnnnnnnnnnnnnnnnnnnnnnnnnnnnnnnnnnnnnnnnnnnnnnnnnnnnnnnnnnnnnnnnnnnnnnnnnnnnnnnnnnnnnnnnnnnnnnnnnnnnnnnnnnnnnnnnnnnnnnnnnnnnnnnnnnnnnnnnnnnnnnnnnnnnnnnnnnnnnnnnnnnnnnnnnnnnnnnnnnnnnnnnnnnnnnnnnnnnnnnnnnnnnnnnnnnnnnnnnnnnnnnnnnnnnnnnnnnnnnnnnnnnnnnnnnnnnnnnnnnnnnnnnnnnnnnnnnnnnnnnnnnnnnnnnnnnnnnnnnnnnnnnnnnnnnnnnnnnnnnnnnnnnnnnnnnnnnnnnnnnnnnnnnnnnnnnnnnnnnnnnnnnnnnnnnnnnnnnnnnnnnnnnnnnnnnnnnnnnnnnnnnnnnnnnnnnnnnnnnnnnnnnnnnnnnnnnnnnnnnnnnnnnnnnnnnnnnnnnnnnnnnnnnnnnnnnnnnnnnnnnnnnnnnnnnnnnnnnnnnnnnnnnnnnnnnnnnnnnnnnnnnnnnnnnnnnnnnnnnnnnnnnnnnnnnnnnnnnnnnnnnnnnnnnnnnnnnnnnnnnnnnnnnnnnnnnnnnnnnnnnnnnnnnnnnnnnnnnnnnnnnnnnnnnnnnnnnnnnnnnnnnnnnnnnnnnnnnnnnnnnnnnnnnnnnnnnnnnnnnnnnnnnnnnnnnnnnnnnnnnnnnnnnnnnnnnnnnnnnnnnnnnnnnnnnnnnnnnnnnnnnnnnnnnnnnnnnnnnnnnnnnnnnnnnnnnnnnnnnnnnnnnnnnnnnnnnnnnnnnnnnnnnnnnnnnnnnnnnnnnnnnnnnnnnnnnnnnnnnnnnnnnnnnnnnnnnnnnnnnnnnnnnnnnnnnnnnnnnnnnnnnnnnnnnnnnnnnnnnnnnnnnnnnnnnnnnnnnnnnnnnnnnnnnnnnnnnnnnnnnnnnnnnnnnnnnnnnnnnnnnnnnnnnnnnnnnnnnnnnnnnnnnnnnnnnnnnnnnnnnnnnnnnnnnnnnnnnnnnnnnnnnnnnnnnnnnnnnnnnnnnnnnnnnnnnnnnnnnnnnnnnnnnnnnnnnnnnnnnnnnnnnnnnnnnnnnnnnnnnnnnnnnnnnnnnnnnnnnnnnnnnnnnnnnnnnnnnnnnnnnnnnnnnnnnnnnnnnnnnnnnnnnnnnnnnnnnnnnnnnnnnnnnnnnnnnnnnnnnnnnnnnnnnnnnnnnnnnnnnnnnnnnnnnnnnnnnnnnnnnnnnnnnnnnnnnnnnnnnnnnnnnnnnnnnnnnnnnnnnnnnnnnnnnnnnnnnnnnnnnnnnnnnnnnnnnnnnnnnnnnnnnnnnnnnnnnnnnnnnnnnnnnnnnnnnnnnnnnnnnnnnnnnnnnnnnnnnnnnnnnnnnnnnnnnnnnnnnnnnnnnnnnnnnnnnnnnnnnnnnnnnnnnnnnnnnnnnnnnnnnnnnnnnnnnnnnnnnnnnnnnnnnnnnnnnnnnnnnnnnnnnnnnnnnnnnnnnnnnnnnnnnnnnnnnnnnnnnnnnnnnnnnnnnnnnnnnnnnnnnnnnnnnnnnnnnnnnnnnnnnnnnnnnnnnnnnnnnnnnnnnnnnnnnnnnnnnnnnnnnnnnnnnnnnnnnnnnnnnnnnnnnnnnnnnnnnnnnnnnnnnnnnnnnnnnnnnnnnnnnnnnnnnnnnnnnnnnnnnnnnnnnnnnnnnnnnnnnnnnnnnnnnnnnnnnnnnnnnnnnnnnnnnnnnnnnnnnnnnnnnnnnnnnnnnnnnnnnnnnnnnnnnnnnnnnnnnnnnnnnnnnnnnnnnnnnnnnnnnnnnnnnnnnnnnnnnnnnnnnnnnnnnnnnnnnnnnnnnnnnnnnnnnnnnnnnnnnnnnnnnnnnnnnnnnnnnnnnnnnnnnnnnnnnnnnnnnnnnnnnnnnnnnnnnnnnnnnnnnnnnnnnnnnnnnnnnnnnnnnnnnnnnnnnnnnnnnnnnnnnnnnnnnnnnnnnnnnnnnnnnnnnnnnnnnnnnnnnnnnnnnnnnnnnnnnnnnnnnnnnnnnnnnnnnnnnnnnnnnnnnnnnnnnnnnnnnnnnnnnnnnnnnnnnnnnnnnnnnnnnnnnnnnnnnnnnnnnnnnnnnnnnnnnnnnnnnnnnnnnnnnnnnnnnnnnnnnnnnnnnnnnnnnnnnnnnnnnnnnnnnnnnnnnnnnnnnnnnnnnnnnnnnnnnnnnnnnnnnnnnnnnnnnnnnnnnnnnnnnnnnnnnnnnnnnnnnnnnnnnnnnnnnnnnnnnnnnnnnnnnnnnnnnnnnnnnnnnnnnnnnnnnnnnnnnnnnnnnnnnnnnnnnnnnnnnnnnnnnnnnnnnnnnnnnnnnnnnnnnnnnnnnnnnnnnnnnnnnnnnnnnnnnnnnnnnnnnnnnnnnnnnnnnnnnnnnnnnnnnnnnnnnnnnnnnnnnnnnnnnnnnnnnnnnnnnnnnnnnnnnnnnnnnnnnnnnnnnnnnnnnnnnnnnnnnnnnnnnnnnnnnnnnnnnnnnnnnnnnnnnnnnnnnnnnnnnnnnnnnnnnnnnnnnnnnnnnnnnnnnnnnnnnnnnnnnnnnnnnnnnnnnnnnnnnnnnnnnnnnnnnnnnnnnnnnnnnnnnnnnnnnnnnnnnnnnnnnnnnnnnnnnnnnnnnnnnnnnnnnnnnnnnnnnnnnnnnnnnnnnnnnnnnnnnnnnnnnnnnnnnnnnnnnnnnnnnnnnnnnnnnnnnnnnnnnnnnnnnnnnnnnnnnnnnnnnnnnnnnnnnnnnnnnnnnnnnnnnnnnnnnnnnnnnnnnnnnnnnnnnnnnnnnnnnnnnnnnnnnnnnnnnnnnnnnnnnnnnnnnnnnnnnnnnnnnnnnnnnnnnnnnnnnnnnnnnnnnnnnnnnnnnnnnnnnnnnnnnnnnnnnnnnnnnnnnnnnnnnnnnnnnnnnnnnnnnnnnnnnnnnnnnnnnnnnnnnnnnnnnnnnnnnnnnnnnnnnnnnnnnnnnnnnnnnnnnnnnnnnnnnnnnnnnnnnnnnnnnnnnnnnnnnnnnnnnnnnnnnnnnnnnnnnnnnnnnnnnnnnnnnnnnnnnnnnnnnnnnnnnnnnnnnnnnnnnnnnnnnnnnnnnnnnnnnnnnnnnnnnnnnnnnnnnnnnnnnnnnnnnnnnnnnnnnnnnnnnnnnnnnnnnnnnnnnnnnnnnnnnnnnnnnnnnnnnnnnnnnnnnnnnnnnnnnnnnnnnnnnnnnnnnnnnnnnnnnnnnnnnnnnnnnnnnnnnnnnnnnnnnnnnnnnnnnnnnnnnnnnnnnnnnnnnnnnnnnnnnnnnnnnnnnnnnnnnnnnnnnnnnnnnnnnnnnnnnnnnnnnnnnnnnnnnnnnnnnnnnnnnnnnnnnnnnnnnnnnnnnnnnnnnnnnnnnnnnnnnnnnnnnnnnnnnnnnnnnnnnnnnnnnnnnnnnnnnnnnnnnnnnnnnnnnnnnnnnnnnnnnnnnnnnnnnnnnnnnnnnnnnnnnnnnnnnnnnnnnnnnnnnnnnnnnnnnnnnnnnnnnnnnnnnnnnnnnnnnnnnnnnnnnnnnnnnnnnnnnnnnnnnnnnnnnnnnnnnnnnnnnnnnnnnnnnnnnnnnnnnnnnnnnnnnnnnnnnnnnnnnnnnnnnnnnnnnnnnnnnnnnnnnnnnnnnnnnnnnnnnnnnnnnnnnnnnnnnnnnnnnnnnnnnnnnnnnnnnnnnnnnnnnnnnnnnnnnnnnnnnnnnnnnnnnnnnnnnnnnnnnnnnnnnnnnnnnnnnnnnnnnnnnnnnnnnnnnnnnnnnnnnnnnnnnnnnnnnnnnnnnnnnnnnnnnnnnnnnnnnnnnnnnnnnnnnnnnnnnnnnnnnnnnnnnnnnnnnnnnnnnnnnnnnnnnnnnnnnnnnnnnnnnnnnnnnnnnnnnnnnnnnnnnnnnnnnnnnnnnnnnnnnnnnnnnnnnnnnnnnnnnnnnnnnnnnnnnnnnnnnnnnnnnnnnnnnnnnnnnnnnnnnnnnnnnnnnnnnnnnnnnnnnnnnnnnnnnnnnnnnnnnnnnnnnnnnnnnnnnnnnnnnnnnnnnnnnnnnnnnnnnnnnnnnnnnnnnnnnnnnnnnnnnnnnnnnnnnnnnnnnnnnnnnnnnnnnnnnnnnnnnnnnnnnnnnnnnnnnnnnnnnnnnnnnnnnnnnnnnnnnnnnnnnnnnnnnnnnnnnnnnnnnnnnnnnnnnnnnnnnnnnnnnnnnnnnnnnnnnnnnnnnnnnnnnnnnnnnnnnnnnnnnnnnnnnnnnnnnnnnnnnnnnnnnnnnnnnnnnnnnnnnnnnnnnnnnnnnnnnnnnnnnnnnnnnnnnnnnnnnnnnnnnnnnnnnnnnnnnnnnnnnnnnnnnnnnnnnnnnnnnnnnnnnnnnnnnnnnnnnnnnnnnnnnnnnnnnnnnnnnnnnnnnnnnnnnnnnnnnnnnnnnnnnnnnnnnnnnnnnnnnnnnnnnnnnnnnnnnnnnnnnnnnnnnnnnnnnnnnnnnnnnnnnnnnnnnnnnnnnnnnnnnnnnnnnnnnnnnnnnnnnnnnnnnnnnnnnnnnnnnnnnnnnnnnnnnnnnnnnnnnnnnnnnnnnnnnnnnnnnnnnnnnnnnnnnnnnnnnnnnnnnnnnnnnnnnnnnnnnnnnnnnnnnnnnnnnnnnnnnnnnnnnnnnnnnnnnnnnnnnnnnnnnnnnnnnnnnnnnnnnnnnnnnnnnnnnnnnnnnnnnnnnnnnnnnnnnnnnnnnnnnnnnnnnnnnnnnnnnnnnnnnnnnnnnnnnnnnnnnnnnnnnnnnnnnnnnnnnnnnnnnnnnnnnnnnnnnnnnnnnnnnnnnnnnnnnnnnnnnnnnnnnnnnnnnnnnnnnnnnnnnnnnnnnnnnnnnnnnnnnnnnnnnnnnnnnnnnnnnnnnnnnnnnnnnnnnnnnnnnnnnnnnnnnnnnnnnnnnnnnnnnnnnnnnnnnnnnnnnnnnnnnnnnnnnnnnnnnnnnnnnnnnnnnnnnnnnnnnnnnnnnnnnnnnnnnnnnnnnnnnnnnnnnnnnnnnnnnnnnnnnnnnnnnnnnnnnnnnnnnnnnnnnnnnnnnnnnnnnnnnnnnnnnnnnnnnnnnnnnnnnnnnnnnnnnnnnnnnnnnnnnnnnnnnnnnnnnnnnnnnnnnnnnnnnnnnnnnnnnnnnnnnnnnnnnnnnnnnnnnnnnnnnnnnnnnnnnnnnnnnnnnnnnnnnnnnnnnnnnnnnnnnnnnnnnnnnnnnnnnnnnnnnnnnnnnnnnnnnnnnnnnnnnnnnnnnnnnnnnnnnnnnnnnnnnnnnnnnnnnnnnnnnnnnnnnnnnnnnnnnnnnnnnnnnnnnnnnnnnnnnnnnnnnnnnnnnnnnnnnnnnnnnnnnnnnnnnnnnnnnnnnnnnnnnnnnnnnnnnnnnnnnnnnnnnnnnnnnnnnnnnnnnnnnnnnnnnnnnnnnnnnnnnnnnnnnnnnnnnnnnnnnnnnnnnnnnnnnnnnnnnnnnnnnnnnnnnnnnnnnnnnnnnnnnnnnnnnnnnnnnnnnnnnnnnnnnnnnnnnnnnnnnnnnnnnnnnnnnnnnnnnnnnnnnnnnnnnnnnnnnnnnnnnnnnnnnnnnnnnnnnnnnnnnnnnnnnnnnnnnnnnnnnnnnnnnnnnnnnnnnnnnnnnnnnnnnnnnnnnnnnnnnnnnnnnnnnnnnnnnnnnnnnnnnnnnnnnnnnnnnnnnnnnnnnnnnnnnnnnnnnnnnnnnnnnnnnnnnnnnnnnnnnnnnnnnnnnnnnnnnnnnnnnnnnnnnnnnnnnnnnnnnnnnnnnnnnnnnnnnnnnnnnnnnnnnnnnnnnnnnnnnnnnnnnnnnnnnnnnnnnnnnnnnnnnnnnnnnnnnnnnnnnnnnnnnnnnnnnnnnnnnnnnnnnnnnnnnnnnnnnnnnnnnnnnnnnnnnnnnnnnnnnnnnnnnnnnnnnnnnnnnnnnnnnnnnnnnnnnnnnnnnnnnnnnnnnnnnnnnnnnnnnnnnnnnnnnnnnnnnnnnnnnnnnnnnnnnnnnnnnnnnnnnnnnnnnnnnnnnnnnnnnnnnnnnnnnnnnnnnnnnnnnnnnnnnnnnnnnnnnnnnnnnnnnnnnnnnnnnnnnnnnnnnnnnnnnnnnnnnnnnnnnnnnnnnnnnnnnnnnnnnnnnnnnnnnnnnnnnnnnnnnnnnnnnnnnnnnnnnnnnnnnnnnnnnnnnnnnnnnnnnnnnnnnnnnnnnnnnnnnnnnnnnnnnnnnnnnnnnnnnnnnnnnnnnnnnnnnnnnnnnnnnnnnnnnnnnnnnnnnnnnnnnnnnnnnnnnnnnnnnnnnnnnnnnnnnnnnnnnnnnnnnnnnnnnnnnnnnnnnnnnnnnnnnnnnnnnnnnnnnnnnnnnnnnnnnnnnnnnnnnnnnnnnnnnnnnnnnnnnnnnnnnnnnnnnnnnnnnnnnnnnnnnnnnnnnnnnnnnnnnnnnnnnnnnnnnnnnnnnnnnnnnnnnnnnnnnnnnnnnnnnnnnnnnnnnnnnnnnnnnnnnnnnnnnnnnnnnnnnnnnnnnnnnnnnnnnnnnnnnnnnnnnnnnnnnnnnnnnnnnnnnnnnnnnnnnnnnnnnnnnnnnnnnnnnnnnnnnnnnnnnnnnnnnnnnnnnnnnnnnnnnnnnnnnnnnnnnnnnnnnnnnnnnnnnnnnnnnnnnnnnnnnnnnnnnnnnnnnnnnnnnnnnnnnnnnnnnnnnnnnnnnnnnnnnnnnnnnnnnnnnnnnnnnnnnnnnnnnnnnnnnnnnnnnnnnnnnnnnnnnnnnnnnnnnnnnnnnnnnnnnnnnnnnnnnnnnnnnnnnnnnnnnnnnnnnnnnnnnnnnnnnnnnnnnnnnnnnnnnnnnnnnnnnnnnnnnnnnnnnnnnnnnnnnnnnnnnnnnnnnnnnnnnnnnnnnnncccgtgcgattgctcccacgcgcgcttgccgggctacttgttgaacgggtaatctacaaggtgaactcctttcagttcacaagatcagccaggcttatcctggcactcccgaggagcgcccaaaacgtgcacctcggcgctaccggctagtgttcagtaagagtggccaaactggaccgtgcctaatggggccagccaagcagtttgaggggcaggtaggccccggcgtggactacggaaccattcaaggggtcagcgaaggtgatagcgtgtactaccgaccaaattaggctgtcggaagggagaactcatgcgagcattcctccaggtagctctggtagtgggactgtttgccgacatgcaactcgttttcggccaatcagggtcgtccggttcgggggcaagccctttggtcctgcggggtagggtgctaagcgtgaaggacgagaccctatctaatgcgtcatttgtcgccgtgaccgcgacgttaagactcgagttcgtcaatgccgggggaagccccgtcatcctgctgaccgaccgttcccctctctgcgttggagcgacgctgactaggagttccggggcggcactcggcgataacatcttgttcgatgagtatcgtgggccatccgtaagcacatcgcccgactggggggtattccgcgcaacgcttgaccaacagaagccgccggcccgcctcgtccagataatcaaacccggagaaagttgggctaccgagagcttagtcgtactacgccctccgattaagctcgaacgttacagagtggaccgcccccctgtagcttggcagattctgaaagagtcctcccccgtctggctccgactaaagtgtgacgtgtggcctcaaaacgtcgaacgtcggccaacatctggaaaggtggtcttcggccatgaacttcagaagaggtggcgacattttggcgaactgcaattaaatagtctagtttctgaacctattgaattagatttgcgggaacgggatcaaactgactcgccaaggccgtgaccgtgacgggaatggtgtcaggaagtgcgccgggcaaaaccggcatgcagtcgaggatgaaagagcgcgtagcccggaggttgggaagcgaggacgtgcgcgcgttccagcgctcgtccgcggctctgggccggaccgcgaattccgcttcgccgagccctgggccggggattataatcacgcccctgtcgccgctcttgacacgcccggcgtgcacgggtttatgaaggcaaatcgacggaaggccgcggaggagtgcggagaggcggacacgtccgcgctacgtgctcgaaaatcgccaatcacaaatcaacaatcgcaaatcctcaatcgggaatcggcaatcgacaatcacccaatggcccgatctcaaaacgcgcgccgagttttgaatcccttatcaggagtcctcgatgccgtgcctggaatctcttataacgcctcccgtgtccccaacccgcgtgtttcaagccccagagaattcttgcggcacttttggggttgctgtatactggcgtttcgatgtttggaacctacgccaattcgtttacctactttagctaccggttttggggcttcgctccaatccggtagagtggcgttggtctgaactaaaaaggcgatgttgcaaggccagcccactccccgcgagtgggctttttcattctaggggaggaagaaagcgatgattatttccatggcgccggatgcgacgcagaagcaaatcgatcatgtttgcgagtgcatccgggagtttgggtacaaggtccactccattcaaggggaagagcgcgtggtgattggcgtgatcggggtgggcgacgtgaccgcctgcctggaagcgattgaggtggcgcccggcgttgccagcgcggtgcgaatctcgtcgccttacaagtttgtgagcagggaattcaagcaggagcgcacgcgaatccccatcaacggcgtttccatcggcggcgaccaatttgtggttatggcaggcccgtgctcggtggagagcgaaaaacagattatggattcggccgagctcgtggcgtcagtgggcggaaagattctgcgcggaggcgccttcaagcctcgcacgtccccctacgacttccagggcatggaggtggaagggctaaagttgcttgcccaggcgcgcgccgccacgggtctcgccatcgtcaccgaggtgatgagtgagcacgacgtgccgctgatcgccgaatacgcggacattgtgcaagtgggcgcgcgcaacatgcagaacttcgcgctgctgaaagcgctgggccgttgcccgcgcccggtgctgctgaagcgcggcatgagctcgaccatcaaggaactcctgatgtcggcggagtacatcaccgcgcacggcaatcccaacgtcatcctgtgcgagcgcggaatccgcaccttcgagaccgctacgcgcaacacctgcgatatttccgccgtgccggttctcaacgagctgacccacctgccggtcatcgtggaccccagccacgccgccggccggcagagcctggtgcccgccctgtgccgcgccgccgtggccatcggggccgatggattgattgtagaagtgcatccctgcccggaaaaggccaagagcgacggcgcccagtctctcgacttcccgcggttccgctccctgatgcaggagctcaagccttacctcgatctctggaaggagatgcgcggcaaacagaaagccgccgagaccgcagccgggtaggcggcgacttgctggacctgccgggtgaaatttgtagcgaggtttgtagcgctgacctttaggtccgcatctctcgtattcgaaaatcgaatttgcgaaggctggttgaaggtgaaacgggaggtgcagacctcccgacgcgccggggcaggtgccagccggcgcccatccgccagaacgtccaaatctcactatcggcattacggtaatggtaattatccgttcaatgaatcataaactgcacgataaaaagtgcggcgaagatgtaagtgagcagagggcactcccgccagcggccggtggcgagcttgagcaccgagtaggaaataagcccgaaggcgatgccatcggcgatgctgaaggtgagcggaatccccaccagcaccaggaaggccggcaggtattccgtgggatcatcccagttgagctcacgcaggggcttgagcatcatcgagcccactacgatgagcgccggagccagcgtgggataaagcagggaggcgcccaccttcaccccgccgccaatcatcgccgccagcgggctgaaaaacagcgaagcggcaagcagtattcccgtcaccacactcgccaggccggtgcgcgcgccgtcggaaacgccggcggcggattcgatgtagcaggtgatggtggaagttcccaacgccgcgcccacggtggtgcccacggcatcggagaacagggcgcgatccacgcgcggcaatttgccgtcgcgcaccaagcccgcctggtgccccacgcccaccagggttcccaccgtgtcgaagagcgccaggtagaagagcacgaaaatggccgcccccaagcgcgccggcgagaccttgaacaagccggccaaatcgaatttccagaatgtgggcgccagatgaagttgcagcgagaacagtccctggtaatggaccaaccccagaagcacgcaaatcgcggtggtggagagaatccccatcaggatggcgccgcgcacgcggaagctcaatagcacgacgataagcagaaggcccgcgacggtggccagcactgccggctggcgtaaatcgcccatgcgcaccagcgtgccggacgaggccaccaccagtccgccgtattggagcccgatgaacgtaatgaaaaggccgattcccgcggcgatgctgcacttcagcgaatggggaatcgagttcacaatttgcgcgcgtaagccggtgagggtgatggcgacgaagaaaatccccgccagaagcaccgccgccagggcctgctgccaggtgaggccgaatcccaaggggatggcgccgcagagcgtaaacgcgaagaagaaattctcacccatgccgggcgcgagtgctacggggtaattggccagaagccccatcaacagcgtggaagcggcggccgcaagacaagtggccgtgagcaccgcatggaaatccattcccgcagccgatagcacacccggctgcacgaagatgatgtaggacatggcgaggaaagtggtgatgccgcccaggatttcgcgttgaaaggttgtgccatttgcatcgagctggaaaaattgtgcgatctgcttcttcacgccttgcctccctggcataggtaagaactcgtccacgcttgccggcgcgctgcttgcgttccaggcctgccatcgcggcagacccgcgccctgactccggagggatgggcacactccctgttcccacaggagcggagatcttcggcgcgccccccgccgggccccggaaatctaatcacgttgaggggaaaactgccagaggaatcaacaggaagtttcactgcattttgccagggggaagatcatgttcaaccggaacagaacagacaatcaactgcctctgagattgcgaatcaaacgtggactcatcgtaaccgccgtaccttgcatccaccagaaagccgttgtacctcagcagggaattgagctcctgcgggaagaaaatccggaccgccatttcttccacgaattcgccgccttcgcggggcattctgtggtagaggcgaacgtgattgatctgacggcaagtgtcgtaactattgctctccgtcacttcgaccatgccgcggccattgggcgccggatagcgtgaatggggaaagcgctcctcgggatcgcgcgaaagaatatcgaggcgcgggttgaccgagtcaatgatgaacttcccctgcggagccagatggcgtttcacacaagcgaagcatgcttccaaatccttggcttccacgagagaggaaacggagttgaaggggaagatcaccagaggaaaccgcgttcccagctcgaacccccggatatcgtggttgacccattccaccgatagctttgagcgcaggcatttccgcttggcctcgcgcagcaaggcttctgatgcgtcaatccccgtcacgcgaaaaccgactcgggccaggtggagagaaactctgcccgttccacatgccagatcgagaacaggttcagcgtatttgcgcgcctggcgagtccagaagtccaagtcggcggtgaagtttcgccactttaaatcgtggtgcaccccctcgaagaacaaaggtaagttagcagtggcatgcatggcggtcattagggaaggaaatcgcttcccttctcggcaaaactgcgggagctggctacctctttggtggcattccctccggcgagagaacccaccttagtttttcacaattttgatgtgattgcaactcttttatatatgttcgttaggagtattacccttacatgcactggcactctctggaggtcatagctctgatggtaccctgccggtcgacggcatcaatggtggggttaccgaccccgtcagcgttgcccacatgcgccaataggcaccgtgaggcgacatcgggaaagggcggttttcatgcgcccaggagcttcgccaacttatcccgctgggagaggtttttccgccacataaggcggcgcagacgacggaactcgtcggggtcgattctttgcaccgtgccgcggccgcgatgagggctgaaggcaagaatgtggtcgagatccggcttgcgcgcgagaggattttccaggcgcacggcctggcgcggcgggcagaaatcgatgagcgaacccaggcccacgtcgcggccatcggaggcggcgcgcgccacgcccaccacctgcttgcggtcgacctcgtagcaaaggaaaaggtcgccgcgtttcacttcttcgcgaaggtaacgcaggctcgaggcgctgcgaatccacccttcgtcacccatcgcgaagacgccgcgctggcgggagcgaaagtacgcctcgaattcccacccccgcctcgtattgatcttgaaaacccaaacctgccccggcgcgccagccgttcctaccttccttgactggcggaggcgatgcttgggcgccatagtcccagcgctcagaccttcaccaccgtcgcggtgcgcacagcgggaatggcacgaatttcctggagcacctcgtcgggcacgtgattgtcgacattgaccaagccgatggcctgttgcgtttgcggatcgcgccccagggtaaaggtggcaatgttgattttgcggtcgccgagaatggtgcccactttgccgatgacccccggcacatcctgattgcggataaacaggataatgccacgcaggggcgcttcaatatcgatgtcattgagtcccaggatgcgcagcgcaccccgcacccccaccatgcccacacccgtggcggtttcgccctcggtgtaaaggccgatgcccagtgagttggagaacgtcgcgcgccgggcgctgcgcagttcggcaacttccacgccgcgctgcttcgccagggccccggcgttgatcaggttcacttgctcggaaagcgccggcgtcaggactcccttgagcaccgcgttctttaccaggtgagtgttcagctccgcgagtcccccgtcgtagctgatgcgcacttcgcgaattctttcacccgcaatctgggccaggaacgcccccagtttttcgccgagctgaatgtagggttccagcttcttgaattcgtcgggagaaatcgccggaagattgaccgcattgcgggccacgcccgagatcaggtaatcgcgcacctgctccgcgatgcgaatgcccacgatttcctgcgcctcttccgtggagccggcaatatgcggcgtggcaatcacgttggggtgattaacgagtttccaatccttgggcggctcagcctcgaagacgtcgagccccgctccggccacctgaccgctttccaaggccgccagcaggtccgcttcattgatgagctcgccgcgcgcgcagttgacgatacgcacacccggcttggcaagcgccagggtccgggcattgagcaggtggcgcgtctcgggcgtggcggaggcgtgcagactgacaaagtccgccgacttcaacacatcttcgagcgagcccagcttgactcccaactccccggccagcagggaagaaacataggggtcgcaggctacgatctccatctcgaaggcctttgccaggttcgccacgctcgagccgatttggcccagcccaatcaagcccagagtcttcccgcgcaactccatcccctcgagctttttcttctcccaccggccctgcttcatggaagcatcggcctggggaaggcgccgggccagcgccagcatcagcgccatggtatgttcggccacgctccaggcgttgcctcccggggtattcatcaccaccacgcccttctgcgtagcggcatcaaggtccacattgtcgacgcccgtgccggcgcggccgatcacgcgcagcttcgccgcgttggcgagcaatgccgccgtcgctttggtggcgctgcgcaccaccagggcgtcggcgtcgcggatttcttccgccacgttggcccccgccttcttcggcaggaaaaccacatcccaggattcctgctcgcgcaaaactttcacggcatgttctgaaacgctgtcagcaataaggattttcataggtcagttgtcagtagtccgtggtcagtggtccgttgccaaaccacctctcgactcgctttctgctcctcaggttttagaattgcgcggcggggccgcaactacctttgcactctccgttccctcaaaagatttaacccagagttcacggagcatctctgtggcctctgggttccatcttttcgagccacggaggacacagagaaaacctccccagcgccaagaaacctcgcatccagaacaatggtgggcgctggctcaatcaccaatcataatcacctgctatggggtgtttaatccaaaatccaaaatcccaattggcctcacgccacgtgcttcaggtaaacatcctgcacggcgcgcactccggcgccgagttccactttctggcccagcttcagcagggcgatttccagggcggcgaaaaatgcgaacagatccacgatatcgaaataacccagatgcgccaggcggaagatctggcccttcatggtgccctggccgttggcgatgaccgcgccgaagcgggtgcgcaattccttgacgatggcgccggaatccatgcccgccggcgcgcagatggcggtggcggcattggcgggtgaagattcggcgaaaagcttcagccccagcgcctgggccccggcgcgcgaggcttccgccaggagcgcggcattggcgatcaggttttcgcgcccgagcttcttgatgtattccagcgcttcatgcaagccgatcaccagcgtggtggcgggagtgtaagcagtctcacccttcgcctggttcttgcgttccttggcgtagtcaaagtaatagcgtggcagcttggacttggcaatcaagccccaagccttctcgctgacgctggcaaaggccaggccgggcggaatcatcacggctttctgcgaaccgccgatgacgatgtcgagcccccactcgtcgatgcgcaaatcggaggtgccgagcccggtgatggcgtcaaccaccaaagcggtttcgggataattcttcacggcctcgcccagcgcgcgcacatcgttcatcaccgcggtggaggtttccgtggcttggatgtacaccccgcggaagggcccgtcgctcgcgagcttctgcttcatcgcctcaatgttcacgggctggccgtagggagactccacggtcaccgcctcgacgccgtaggacttcgccaggcctgcccagcgctcgccgaatttccccgccgtgcccaccaacatgcgctcgccgggcgagagcagattggacaccgagccttccatggcgcccgtgccggaactggcgaaaataatcacatcgttctgggtgtcgtagtagtacttcagcaacgccagcgtttccatcatgatcttgcgaaacgcttccgtgcgatggtgaatgttggccacagccagcgtgcgcgcttgcgcttccatcagcaacggagtgggaccgggagtgaagagtctctctttgatgatgccgggcatgttcgttttcctttttgtagggttagtagcttcggaaaaacccaggctggctttggaaggattgccaaaattcctgagaggctgagccgaagcccatcaggataagtaagcgaccctcgattgtcaaattaaatccctttatggttgggataatttcgcggcgcatcctcagaataggttcatcgggccatcttttgatcgggtcatcggagcgtcttatgatcggtccatcggaccatcggttcatttagaaccaaccccgtgagcagccgatgagcgggttaagacaaaacgtcaggtttttccggcgcgggcgtaggggcggttcgcgaaccgccccccccagcccgtccggcggcggacgaaaaatcgcagcccatggcgcaagaagatgtgaaaaacaaacaatctcgcacagggacaccgagccgccgggattcggaaaaagcaactgccttgtagtcttttcggcctccgcggctttgcgcctcttcgcgatatgcttttgctcgttcaaggaacctttcgcagcttcgtaatccgtgggaaaatcgccggccgccccgtgccgagcctcggtcaaggcgaaagaaatcacgcccaatggcatcggcgttacaataggaactcgccgagcggccggcatctcttctgcgtggtgattcagttcccccatggcaagggttttccggtcacggcccggccgatgacgcgcaaaaaaagggcgatacaaccgatggaaaaaaccataaaaggacgaaggctaccggataccgactcggtggaagaattggccggcttctgggatcaccatgacctcacggacttccagcctgatctgggagaggtaagcgaacctgtgtttgtgcgcgctaaaggggcgtcggcgagcatcgagcttcggccggccgaggctcagcatctcaagagaattgcacgctccaagggtgtcagcgaaaccaccgttctaagacaatggattctggaaagacttcacgagttttcccccaaccagggaccgcctgacagggcgtcgcaggcgccggcgcggagccgtcgccagttgtaagaaacaatcgagccggagcaaacggggccgccaaagtcccttcgggcatttccgaccccaaagaataaaggtctgcgcctgccaggcgggaagcaagtcccggcttctcttctatccgctgagtgctccctggagcatcttgcgatactgatggaatgccttgcggcctgccgaggtgagcctcaggagcgtttgcggcactttcccgcgatacgtcttggtgatctcgacgtaccctgcttcctccaagcgcgccagatgacttgaaagcgtgcccttattgagcgcggtctcatgcagcagatagaggaaatcggcttgctcgatgcccgaaagcaaggcgacgatcatcaggcgtgcgggctcatggataacccgatcgagcgccgagatgttctttgcctgctcgttcattccgcctcctgctccgggggccgagtgcgccggaggtaaagacaaagggtaatcccaccggatacaaatagaatcaaccccaagaattccatggggagcatctccagccattggcgatccagcggtagcgtggaaatcgccaccggacctgccaccatcaccaccaggacaacccatctgtaggcctcatccagcctggttgcgaaagcgtagaagagcccccacatggctgatgccaccgccaccgtccctgaaaacgcgaagtggcgcagtaggaatatggccgcagagactccaacagcaccaccgatcgcgcccgcaatccaactctttgcttttgaggatcgatacttcacgaaccccgtgcggggataggtaatgcgcttctttagcgctttttggccgtatacggacaccagcataagcacgactaagctgagcacaaatccaccacgccagagccaaaccgagtttccaggcaggcttctccatcgcccctcccagagctgcaacaacagcatcatacccaaccactgaaatccgaagcccatctcccaaatcccatcgatatattggtagcgcatgggccggtgcgcgtaatcatcaacttgatcgaacatggctcacctccataccaactagtatgtgttgccaactagtctgtgtcaatagatttcttttaggacttggcgggctggcgctgacgatccctcttgaacgtttgcgatctggactctcttccggcaaagccgcggttagtccagtcctgaccgattgcttttcgcatgcccgacgccccagcggcaaccgcacgtcgttattctggaaggggcaggccgctgccgccgtctggtccgcgcaagtgtagcgcgaacccggtcggtccgcgggtttctgtcgtcaataggggacgaaccgttgaggcggagcgacagctcacacatttctccccgggaaatcgccccaactcgtcagggcgcccgcccttgcgccccatttatttatccatatccgccaatgcgagcttgccgagcaaaaccggatgtgagatgggcagggtcttatcaaatcccacgacggcatcttgcgtgaaccccgggaatccccatacgtttccgttgcgcaggtcaatcgcgactctgcccaacgcgccgccattaggggtggtcagcatgacggcagtgggcgcgaaatagaccgggtagcccccactggattgcgcttgtaccacaggtggagtcacgtagggacgcagggcgattacgcccaggaaaatcgcgatgaccagcagaaggaacttcacgatcccatcaattttcatgccgctctcctttgaaccggaatgttccgggaccggccggtctcggcacttcgccttcgggcatgggataccatttattagccgaaccgcgccggaaactcacgactatactcttttggaacgtgcagcgttttcctttatgcacacttgttgacttttctcatcgcgagagaattccgcagtcttcgccaacgcatagctggtgctgcggccgcccgccggattgcggacgaggatgccgccttggacgagcaagggtagcacctctgcggtgcgaggtccgcggcttttcccttgccccccggggacttcctttgccaaaagcggaaatctcaaagacgggcgcctgccgtcgtgcttgggtgcccgaggtaagggagggaccgcggacctcaaaggcgggggtctccacgcttgcttgcaatcctaacctatggacggcagtataggtggatggaggcaacgatggaagcatggtggcgtgatcttcgtgcggccttgaggaggctccgcaagagcccgggcttcgtgctcgcaaccgtggtttcgctgggcctcggcatcggcgccaataccgccgtcttcagcctattagacgccttgatgtttcgcccgctccccgtccgtgatccccagcggctggtaaggttgggatcgctcgacagccgcgggttgatccatgccgttcccgctccgatgttcgattggctgcgccaggacgggctcttcgagggcgtctgcggcgtgagcactccgctgaccaccgtggaggtgaacgatgcccccttgccgatgagcggtctggctctgacaggtggctgctacgaaatgttaggcgttcgtcccgcgctcggccgccttttcacgcgcgccgacgatgtgcccaccggtccccctgtggtcgtgctgggctacgatttttggcaacggcagtatggcggcgacccgaaggtcctcggccaaagcctccgcctggaaggcgttcctttcaccatcatcggcgttaccgagccccggttccaaggttttctcctcggattcccgccgagcgtctcttttccgattgcgcagcaagtcagcccgttgcgcgccagcccgccgactccccagactttctactggggctcggcttttgcccggctcaaggcgggggtgacggcggaagaggcgcaaacgcagttacgagtggactggcgccggcaactcgacgccgcgctgccgccgcaaatccagggccaagaacgaacggaggagctgaacgcgccactggttgttacttccggttctacggggctcgattactcgatgcggaatcgcttccggcgcccgctgggggcgctgctggccattagtgttttggtgctattgttgtcctgcattaatgtggcgaacctgctgctggcccggggactcgaacgccgacgggagattgccgtccggcgggcgctgggagccggacgctggcagattgtgcgcgaacttgtggcggagagtgcggttttggtggttgcggccattggcggcgggctgcttctcgcggcagcggggaaccgcgtgctgctgaccgtgctgggccgaacgtattccggctttgtgctgacggcaagtgctgactcacgcgtctggcttttcaccgcggcgtgcggactggcggcgctcttgttgttcggagtgctccccgcccgccagaccacagccgcccatctcaccgaggcgctcaaggccggatcaagatcctccctccccgcgcacacgcgcatgcggagaatcctgatttgcggccaagtggctttgactctggttctggtggtggcggcgggttttttgctggaaacgttccggcgtctgcgcggggaatcactgggctttcaaaccgaacaggtgttgaacgtgcaactcgtgccgttgcccggcggttatgcgcagggattcagccccgtgccctactatcgccagctcctggaccgtatgcagagcttgccgggcgtcgaggccgcaagtctgtcccatttctctccggtgttttccatctcctacgacgaagaaattcgttccacgctttcgcccgacgcgccggggattcacgccgccaccgaagaggtgagtgacggcttcctggccaccctgcgcattccgcttctccaaggccgtgactttcagcggacggattcaccccaaacgcagaagacagccatcattagcgagtccctcgccaaacggctctttccgggcggcgcggcactggggcggcatatcagcgtcggcgcccagaacgatacgcgcgacctggaaattatcggtatcgccgccgatgcacgcctcttcgatccccgcacccgcgatttcagctttgtctacatggactcctggcaacatccggatcacatgatgtggggtaatctgcaattgcgctaccggggagactcccaggcattgagcgcggcggtgcgacgcgaactgcgcaacgccggtcatgagtatccacttcacctgcgcacgatcgccgcccagcgcgataatgcgctcctgcaagagaggctgctggcgaatctgagcgcggcgttcgggggcctggcgctgacgctggcgggagtcggtcttttcggattgctgaacctgttggtgaccagccgccggagcgaaatcgccatccgcatggcgctgggagcggggcgtggggacgtaagcgggatgatcgtccgcgaaactctggcgctggtgggcggaggtatgctgctcgggctcccgctctccttcgccgccgtgcgcgttctctccaacttgctttacggcgaggcgacattgccgatggttccgcttgcgctctccatcgcactgttgtcgagcgtcgccgccctcgccacggttattccggttcgccgcgccacttcggtagatcccatggtggctttgagatgtgaatgataagtttggtgatggaaaaaaccacaagtaggggaaggctggcgggtaccaactctgtcgaagaattggccagcttccgggatcatcacgacctcacggacttcgaggacgcaatggaagcggcgaacgaaccggaaaccgtcccgactcgtcggtgtgccagcctacggagccagcgggctcgtgggtattaggcgaagccgcagtagccttaacttacttcggcgggtggacggccaggcgcaaaacgtacccgatgattgaacctgccggctcgcccattgcttttgccctataaagacgataaagcgattcgaggatcagataggcgggagccgccaaaacgaggatggtgatgcgggcaagtggcgccgtgaggcagagctgcaataccccaatgatcagaaagaggcccgccgttatcgcggtggaccttgttccctcgtattgatagagcagttgcaggcgaagctggtcccggcgggggtagacgccccagagcagcgcgaagctctgtgccaggtcgagccgatgggtaaaatcctccaccgccctttgccgatccggggtgcgcggacgggtgtactcgcgaatcggaacgccggcctgcggctcggcccgttccagttcatagacccagcgccgggccaggcccttgccctcctgacgccaacggatcggcttgtagcaggccccctcgaactctaccagggctgattccgctaaagtgatgtcaaaataccaggagtaaacatgcagggaattccggctcgggattcgcctcacctcatcttgtttcgtaaggagcgccgcggcaaggtctttcgtggcggctggggaggggccgcgtttccagccttgccacaaaaagtacggcagcgtcagcaagggtgacccgtgcggcaggtgggagatgctgatccagaatacgcgggcaaaggactccagggccaggtagaagacgacggcaacaaagcgtggatcctccgaagcgccgcgcagcgcaaaggccagggccatgccgaataaggctgaacctacagaaacccaggccatgctgaggcccgtcttcctctcccactcgcgctgcaacggatccggcgcaaatccggcgatggggaacagccagagaatcaggtagcgaagcccctgggctctggtgatgtcccggtgcgcgacggccgcgtccatctgcgactgcagagtgtaattgaccaggtggcggatggcgtattgcggatcccaccgccgcaggccataacgaaacgcataacccccttcgagcgtctcctccacgcccatcagctcgtacacttgatcgcggtacttgatggccgacccggggtggtccgcacggatcaagtcgccgggggaatgcggcacccatccctccttcggcagaactgcatacacccataaatcaaccggatctccgtccgcggcggggacaactcgatctggaaagaagtcaggcatcggcgctgccagcatcattcctgccactttacggcacaactccacccacgcttccgtcaggacgtcctggcaagtcgccagtatacactgactgtagcgcatagctcgtactgcggccgcctgcagggttgcggacaaggatgccgccttggacgagggcggtaatgtcgcgcagggcggtgtcgtgagaacagttcgcgagctttgcccatttggatgtggtgagctttccctcgaagccctcaaccaccccgcccttcgggcacccctcctcacctaaggaggggagtagaaaccggttaaggaccaggcgctgccgctcattcagaggagccttgccaagccgacgtcacaggagcaacatcgaagggcagctccggcagggtcgaggcaagaccggcggggtaggtggcgggcgctcacccacgtcgttctcccgaggttagtgcaggtcgtcggcggtaggatgctcgaggattcgccagagcgctgtatcaccatcgcggcgagccaggcggcgcacgcgctccagggcttgggcgtaagcagctttcatttcggcttccgagcgcggcttggtaatggccgcctccaattcccgtgtggtcttgaagggcgtggccggcgcttcgattctttcccccgtcacgtagagcaccagcccttcttcaaaccaacttggcacgccactggaacgaagccggtgcacgacgagatgcgtcaactcatgccgcaaggtttggttgaggatttgtttccgcgccaacagcgcgagcggttgcaaggcaatggactggccatcgctcgaagccgccacccatccgggttgtcccgtagcgctgatgaaatctgccaccgagccccaggtttccacgtgtacgcgcggtggcagaatctccgcgtgcgcgcccagttccgtgcgccattgttccaacgtatcgagcgtttgcttcacccacggttcctgggaggccgggtaaacaagctcgaagtgttcgcttgccgccatggggtcgggatcatccgcgggtggcaaagcaatttccgtcccggggaaataggtgctgaggattcgagcggttgaatatcccatgcgcgccatctgctcggcccccgcctggcaaagtcccaccccgtgacccaatccgtgccccgagaattcccaagagtctccctggcgctcgattgtatagaggttgctttggatctgcccccagcccaggcggcggtccagagcatagcggaactgattggcatcaacgttccaggtggcgccggcgacggcacgcaggaccagcgcccggcccgaggaatcacgcttctcgacggagagttccgcgagcggggcggcaatcggcagatgcaaggcttcccgcagaacctgctgcaaggtttcggcggatagggcatgactccacgatgcatgggtgctcgcaaggcaataagggtcgtgaatcgatatcagatagggttgggcgcggtcgggccagacgttccccgcggcttccgtcatccccccgcagcacgcggtgaagtaagggtccgctagcgccccatgatattgcagcacccggccgcgtgtggcgagagccgccgcatcaaggactttcgcggcctccacctcgcggtccggcggaaggcggaaaacctggcagtgcgtgagcgagcaaaaatcaaatccctgcccgcggtggcgcccctgccatcgaagcgcccaggtgcgggccagaatcgccatggcctggcgcgccgcgggagttcggagcacggaagcttccccccgaaggacgccggagacgtacaattccaaatccacttgcgtcacgacctgcaaaccttcgccggccaggttgacgcgcgcattccgcagcagaaacgtctgtggcggctcatttaccttggcgaatgtgggcgcaaggcgaaacggcgcggaggattccaccgtgagaagtgtgaaggttcggtccgtcgcatcgaggcggcagtgcacaaggtgatcggcggagcaggagacctttttggtgggtgccagaacccaacagggcccatcggttttggcgccgcagatgttcaggctttgtccggtggcttccagggtcaatgccttgaccacccgatgggaaaacaattccacccggaaatccgggctcgcggggagtgtcggaagcgctgccgccgccaaggccagggatgccaacagcagttttctcatggcgtgtggggcttttgtgcgaagtagcgtttaaggatccgcgctgccagcggcgcagcatcagcgccgcccgtgccgcgctgcaagaaaatcaccacggcgacttccggagcgtccacaggggcatagcccacgaaccacgcgtgcgtcacgtggcttccatccagggcgggggcggttccggttttgccaccgacgcttactccgggaacggcagcggcgcggcaggaaccctgatccacgcaatcgcgcaacccttccgtcagcaccgccagggtgctcatacgcagagggaccacgcgctcaaggctcggcgctttgtgttggccgggcatgatgaggcggaaaaccctgccttgcatggcgatggcggagtacgccaatagcacttgcgccggcgtcgccgtcaccccctgctcgcccagcgcggcgagggcctttccccgaggtttatccgggatgagaacttccccgggcgccgcctcctctccggcagcgccgaaaccaaacactccataccagtgggtcagggcggaagaggagagccgcgtgctcaactcggaaaagaaataattacaagagttggccagagcccccgacagatcgaacggtgcgaccgcaggcggatgggagcaatgatacgcctctcccagcagccgggggacgcggcggcacatgatctcttcctcgggtgaaatgacgccctcctcgagcgcggcggcgctcaccaccaatttcgccgtcgatccgggagtgtaagcttctttgaaggcgctctgagagttccaaacggcgagaatctgcccggtacggggattggagacgatgaccgcacccgcctttccttgcatcaactggctgacgaaggttggcaaagcctccgctgcgcgcaggcccggcccgttggcgaaagcggcaaaaaggagggctagacttccacccaatttacagagttggaacgccaccgagatgcgccgcatgggcattcaacgtggcatatcaagcggaggaagtcaatcgtagacactaccacctgactttcccacggttgcaaccgctggcgagagtgcggtccctgacttcagcctttcttacttcccggattggacgatgcttctggccgcacgggtttgttgcgggattttcttccccgcggctttctaacacgatcctgtaccagcacgcgttggcaatcggagcaaacaatgtgacagccactgggtgacgacacaatccgggatgatccgcagttagggcaaaccgattgagaaaccattttccagaggattctagcacaagttggaagccgagggttttgaaagatcataatttcattcggatattaacaaattattatttttatatatcataatcaccataggcggtggacggagtcctccagcggggggctgttcccggcgggcaaaagtcattaaattgagcgatactgtacatttgccgctggcagcggagtgcccgcgggtctatgaccgcccctatagggcattgcgcaaaaactatgtcgctgggtacagaaagtaagaggcccggaagcgcgggccgcgaatgatgagggcatgacatcccgcgagcatcagcacgccgtgtatagccgccggtttgccggaatcgaacagcgccgggccgaggtgtggcgcgtcctcgcccgccattacttcgaccgttgggtaatgcccacgaacaccgtcctggatgtgggcgccggatactgcgagttcatcaatagcatcgtggcggcgcacaagtatgccctggactcaaaccttgccaccgcggataaagccgcccccggcgttaccgtgctttctcaggaggccacccaggcgtggcccctgccctcggagtcgatcgacgtggtattcagcagcaacttttttgagcacctcaccagcaaacgggatcttgcccactgtctcgcggaggcgtaccgggtgctgcgcccacaagggttgttgatggcggtggggccgaacatccggttttgctacgacgcctactgggattttgtggatcaccatttgcctctcagcgatcgctcgatgctggaagcgttggaaattgccggatttcgcagggaacgggtcataccgcgcttccttccttttaccatgagcggccgagtgcctcaccgcgggttcctggtccgcctgtacttgatgtttcccctggcgcagcggctgtggggaaagcagttcctggtgattgcgcggaagccttaacgatgagttttaggatgtctcctcaatccgcccgacgggtcgcctggaccgcctgtttcattttggtttttatttctgcctttttcctcagcgggacgcggcaaccgccgatggagcttgacccctcctggcacgcggcgcttgaatacgccaccgcgcatcatctgcaattcggcacccagatcgtctttaccttcggaccgttgggattccttgccacgcggaccagcctgggacatctcctggccgcgcgcgttgcctttgctttcttctggagcgcgatggttgccctggcggcgacggcgctggcaaaacgtttggcgggatgggtccgctacgcgtttctcgcttggctggtggtctgcacactttccgccgggttcgaccaaaccgctttcttcgtgatggcgtgcggcgcattactcctgctcgccgataaccccaagcagcggtggcaagcgcccatctatgtcttcactttcatcatcctgtctctcatcaaaagctcgttcctgaccgcagcaatcggcagccttgccctcgttgccttttgctggacctggcagcgaaaaacccgcaaggcggtggtgctggcgctggccgctccggccggattcgtggcttgctggatggccttggggcagtcgccttcccatcttgccccgtggttccggcatgccctggagttgcagtcaggctacagcgcggccatgaacctggctcccaaaaccgccgtcctctgcgctgccctggcggcactggctttgtttgtgggggccttcatcgccaccttggtgcgggcgaagggcggcgttcccacttgggggattctgatcacacttgcgcaatacgtttttcttgcctggaagggaggcttcacgcgtcccggggactggcacacctttatatttctctggtttctgccgctgggcgtggcattttgtttcctcgtggacctgtcgacggcgctcaccgctgctcaccgctgggggttgaacggtaccctcgccgccagcatggcgctctgcctggtggcggcgcacttgcaaattccggggctcgcttggcgtcaggtagccgattggcagcatcacgttaccaccaacgccaggatgatcgtggccattttaggggggcgctcggatgatctctatgctgattgccgcgccgcccggaatgatcgcatgctcattctcgaccgcgccaaagacgtgatcggtaacgaatccgtggacgttatgaactacctgctgctggcgcccgtggcgaatgagatgaattaccagccgcgccccgtcattcaagggtttgtggcttacaccccggcccttcagagcctcaatgaggactatcttcgcagcgccgggcggccgcattttgtgatgctctgccagcaagccacggacggccgctttcccacgctggaggattccgccgcgctgaattacgtgctcaataattacgtccccgtggcgcgggacgggcgcttcctgattttgcagcagcaaaccgcggaagacccggcattccagcttgtccacgaggaaaccctgcgcttcggtcagagacttgatctgcgcccctgggggcaaggacccttgttcatgtcggtcgagatcacaccgaccttgatgggaagggccgcaactctcctttatcagcagcatccgctctacctgcgcatggcgaggggtcagatcgcagaacaataccgcattgttccttccatggcggagcggccgttcctggtgaatcctttgctgaatagcaactacgatgtcatgaatctttatgcttcctatcctggcaaggaacttgacagcgtgaccttcgagcgccctgggcaggggtcctttgaatttcgcgatcacctcaccgtgcggctctattccgcccctggttttcttcgagctgctcgggggatttctgttccccgtatgctcgccgatgtgcagggacgtgttttttggccggagccagaatcggtggaaagccccggcctcgcgccggtggtgattttccacgggtctcctgccttgagggtgcgcgcccccagccagatcgtggtggaaatcccggcggacacgtcgttattctcgggttactttggcatgtctgaggaagcctataccggcaatggtaatacaccgggtgtgaggatcgcaattgccgtccgggatcggtccggccagagccgattggcgcttgaccgcctccttcaacccttgtcgcgagccgaagaccgcggccgattctccttccgcgttccgattgacagtgcccgcgatcgcaccatcacgttgacaacggaacctgacccttccgccagaggcgaaggcagttggtcagtctggtcactgtgtagattcaagtcattatcggcgcgatgaagggcgccgcaggcgggtggaggtcgcgcggaaagaacattgctaggaccaatccggttcacttgtattcaccggcggtcaagcgtatcttatgagccggcgggaaagtcaaaacggaatttccggtcaattctgcttaaaggagttctgagcatgggcgggaggatgaaagccgtttcgttgagggcccttttgacggaagttaacaaagaactctggctcatcctatccctggtggccattgccgccatcctaaacttcctcgtcgctccgcaccgcatccttttaggtttgtatacactgcccaccttgttttccgcctatttctatggccgccgccacgcaactctgacggctgtcgccagcgtgctggtagtcattctgctggtgcattccaattcgtctttgttcgcccaagccaatagaactcctctcccgggggaaaagtggtacgacctcgcgctttgggccggcatcttgatcatcactgcctacgctatgggtgcgctttacgatcacaaagaagcccgattgcgcgaactgcgggagacctaccatggcatcctgctcatcttgcgccagttcatatccaaggacaagtacacgcaaaaccattgttatcgagtctcggtatatgcgaccgcaatcgccgcccgacttgggcttgatcccgagcggatcgaggacgtgcgcgccgccgcgtttcttcatgacattgggaaactcgacattagccgccagattctttacaaggcagcgagtttgagcgaggcggaatacaaagaggcacaacgacacgtgcaggaaggcgtcgagattctgggcaccgtcggcggctcgcttcgccgggtcatccccattgttctctgccaccacgacaaattcgacggctccggctaccaccctacccggggtgagagtattcccttggaatcacgaatcatttccgtggccgatgtgtacgactcccttaccagcgaccgcccttaccggaaggccctggcggaactcgatgccaaggacgttatcctcaaaggttcaggaacggaatttgaccccaaggtggttgacggattcctacaggcgtttcgagggggagagatggaagtccacgagttagtggtctgaacatctgatctcacctgaatagctttcaagttccccgcttcaaaacgggattcgagattactgacttctgcatcatacggtaaccgataaaccccctcacccccaacccctctcccccaagggggcgaggggagttagttgcataaccacatcactcaactctcccctcgcccccttgggggagaggggttgggggtgagggggtcttgtcactctgatttgcagtacgcaataggttactgcgcccgtcggggccagcgtgaggcttgacaccgcgctcaaggcaggccatcgtatgcacagacttctgacctttgttttcgggtggtgagatgatggaccggcgaacattcctggtaagggatatacccgcggcgacgatcgggttggcagcggcgtggaaatcctctttcgcagcgattgcaacaggagacaaacccatgagcgcttcctacttcgagttcttctacattcacatgcagaacggcagccaaacggcgcgcatctcaaagtggctggaaagtgggctcatgccgatttgccaaaaacacggctttggccccatgggattcttcaatgtcactgtgggcccgagccttcctacaacgttgatcatcttctcttatcccagcctgacggaaatggagacgcagtggggaaagctcaactccgaccctgactacgccgccgtggtggcggaagtggagaaggatgagccggctttttaccgcaccgaggcgatgttgctgcgctcgactccgttctgcccgccctttgtggcgacgccggcaggtgacccgccccacaagctctacgaattgcgcatctacgaatcacctaccaatcgccagctcggatacctgcacgaccgcttcggcagggatggagagatcgatatcttccacaagagtggtatttatcccatcctctatgcggacacggtctttgggcccaaccagcccaatatggcttacctgattccgtttgaaagtgaaactcaccgcgagaaggcctgggcggcgttcggcaacgatcctgattgggtcaagatccgggacgaatcggtgcggcgcggcggggatattgtgcgcaacattactaatatgcttctttcgcccgcgagcttttcgatgatccggtgagatcccggctgggcaccgcgcccgcttaaacaaggcccaccggttcgactcgaagtccatgaccgcgcgccgctctgcactgtcgttcgtctgcggagacgaacaagtccgctgcccactctgccgcacaggctatgtgcaaggcatcagaggagcgcagttgccatcgctccagcaaatcgacagcgcgcgcgacaacctggtccgtaatattaataacgaccgaggcttccacatcctggatcagcgcccgcttgttttgggcgtattgagacggggagagctttccttcgcgtcggagcctgcacatcccagaaacaacctcagatagacaaattaccgagaggccgagcgacgatgcggcagacaagatctctcccactcggtcgctccccacttcgttgacgtaacgcttggcgagggcagaggaatccaagaatacgttcaacgggccgaccgcctttcctcgagcacagctctgctgagtgatgcccccggtatgaccatacgcggacccgggcgcttccaagcaggctcgggttggtctcgccccgccggaacgattttagcgatggccctaccgtggcgcactacacaaatgctctcgcctccctccacgcgatccaagaccgcggaggcgttcttccgaaactcggtgaatgtaagggtcttcattttgcgggcctccaaagaaccaaggaacattgtacactaatgtacagaaaggtgcaatctacattcgtgtcgtgcgcagcaggtaacggcacttgcaggcggcaccacacgtgtacgaaaatcgacgttgagaaggcgggggaaacgtgaatcatgtggtgccgggcttaagcgcggcgctacatttgcccggtgtcactttcccttgcgcgccataatctggcggatgggttcgttgtcggcatagacgcgccactcggcgacgagcgaaccgcgagtaaccgcgcgccaggcggcgggggtcgaccacttgttctcaggccgcagcacgccgtcggtcgaataggtcccttgcgccgtccccagcatgactaccaccgcgccatccacgaaggtttcggcgatcacgatgttgtaatcaggaaccatgcggatgtaactttcccaggctgccttcaaccgctgcttgccctccattttcgttcccaatgaatcgatgaagacatgatcctctgtcatcagggccgcaatctcttcggcgctctggtgatttatagcgttcgcgaaggcatgggcgagatgcttgacggattcagggttgggtgacgtcatatcggccatttctgtcacagcctcgtgagccgggagcgctcacagtgcaggatttggaaagcgcgcgagcggcgacccatcgtcttcgcggtccgcgccgcgcaggaaatcgaaatcacaaccttcgttggcttgcaggatgtggtcgaggaaaagtctgccgtaaccgcgcgtgtagtgcggggcgggcggtttccattgtgaaagccgcgtcttgatttccgcctcggcaacacgcaactcgagtcgccgcgccggcacgtccagctcaatttcatcgccatcgtgaacgatcgccaggggcccgcccaccgccgcttccggagcaatgtggacgacgatggtgccgaagctggtgccgctgatgcgcgcgtcgctcaagcgcaccatgtctttcaccccggctttgagcagttttgccgggatgggcaggtggccccattccggcattcccggagcgcccttgggcccggcgtttttcaacaccatcacggagttttcatcgacgggcaaatcgggatcatcgaggcgcgccagcaaatcctggttgttctggaaaaccacggcgcgtccgcggtgcttcatgaggtgcggagaaaccgcggattgcttgatcaccgcacccgacggggcgagattcccgttcaggaccacgacgccgccttggggaaacagaggttcgtccagaggcctgatgacctcgcgattaaagcacgccgcgcgcttcaggttttcacccatggtcttgccgctggcggtcagcgcctgcaaatgcagcagggggctgatttccttcagcacggcgggcacaccgcccgcataactgaattcttccatcaggaatcttcccgaaggcttcacgttggcgatgaagggtgtggtactggcgatctcatcgaaggaggaaagcggcaggttaatccccagccgcccggcaatggccaccaggtgcacaatggcatttgtcgatcctcccagcgccatgagcagccgggtggcgttctccagagccgcggcggtcatgatgtgggagggccgcagaccttcccggaccatatcgacgatgcgctttccgctctgctcggcaatcatcatgcggcgcgagtcaacggcgggaatgtccgccgcgccgggaagggtcatgcccaagccctcggcgaggctggccatggttgaggcggtacccatcacatagcagtggccggagctgcgcgccacgcaactctcaatttcacaccacgcttcttctcccaggctgccggcgcgcacctcttcccacattttgcggacatccgtgccggcggcgagctcgcggtcgtgccacatgccgctcagcatgggtccgcccggcaccatgatggcgggcacatcgacgctggcggcgcccatcaactgcgcgggcgtggtcttgtcgcacccgcacaatagcaccacgccatccagcggataagcgcgaatgcattcctctacttccatcgccatcaggttgcggtaaagcatggtggtgggcttcatcagcatttcgccgagcgagatggtgttgaattccagagggaaaccgccggcttcccacacgccacgcttaacggcttccgccacggtgcgcagatgggcgttgcagttgttgagttcgctccaggaattgcagatgccgataagcggcttgccctcgaagacgcgctcgctgaagccttcggaccgaagccaggcgcgatgcgccaagccccagcgatcgcgcttgcccaaccaatcgcggctgcgaagcttcggggatttttctggggatgagggattcatcttcgggatccttttcgcgacggggcaattactcagccgaagagatggttataatcagcgtgagtgccaatccaaaaccagagcacgccatcagacgcatccacacccacagctcgatggtgctggccaacccgcacggaccagaactttccgaccctcttgaaatggagggatgcgtgtctagggtttcctttcagcaggacaaaagctctatcagcattctcttggacggaggtggggagcgcccgatagcaagccaagaagtcgggagaggcgtggtggttcacagctttgtagagcgcccggcatcgtggtcacgaagcgcgcgctccgccatggcgtcgagtttcccactcattatgtcagcctcaaactcctggtcccaggggtcggcgtcaaacttcgtgaaccactcgcgaaatgccgtaagctcctcgggagagagttcctgtatctggctttcaaggtctttcactttgctcataagacgtccctcttttgtgagtatatcacccctccctcccgtcggtgaccaacgacaactgcaatttcacgccttggccaaatggaaaatcggctccacgccttgggcgcgcgccatcagggttttctcttcctccggcttgatgggctcgaacttctgggccaagtccatggcgaggcggaagtatctctcatcgccgggaggcacggcggcggtgatgggttgcgacagggtccagcgcaagccgagtgaagcctcatccggcaaggcggcgggctgataccagcacttgggattggggtgatccttcctctgcgcttccggccaagttgtcttcgccatgcctttcaaggccaggaggcccatgcctttttcgcgcgcccttgcgagcacttgcggcccgaagttggcttgcgagaaaaggacgaaattgatggggaagaggatagtgtcaaattcatagcgatcgagcatggagagcgcattttccaccgagtgcgcggagaagccgatgaagcggattttgcccgcctgccgcgccgcctggaatgtttccatggcgccgctggggccaaagattttctcgacgtcctccttcgtggtcacggcgtgaaattggtaaaggtcaacatgatccgtgcgcagcttgcgcagcgaatcctcaagctcgttggccgcgccgtctttatcgcgcatgagcgttttgcaggcgaggaaggatcgctgccggtagggcgccaatgccggtcccaatttctgctgcgcattgccgtattgtggcgccacgtcaaagtaattaatgccgcggtcgaaggcttcggccacaatgttattggcgaaagtctgctccgtatccatcaccacgactccacccaaggcaatgagggaaagatctatgccggtcttccccaggcggcgtttgggaatgggaggtaaattcgaggtctcgctcgcctgtgcagtggaatcaaggatcttctttgacgccgccaatccggctgccgctacggttccgcttcgaagaaaatctcgtcgtcgcatgggttacctccccgtgagggcagatccctcactttcaaaattgtcagcaaagccgaaatccgactccctgcctgggaaggcttccgcataaacgccattgggatgatctgccctgtcgcgccttccccactctgccttcgtcatttgtagcaccgcagggctcctgcgtcaacgcgccaccggccatggaatacgcaaagaactagccggaacaaaaccctagtttcggcagaaggatccagtggcggcgtcgggattcaaggcgcagggggcgccgtgggctttggctcctgcaatttctcctgcgtctcgaccttgaagagctgataatccgtgtaccggtgacgattcacatagatgaagtccccctggagcagggtaacctccacctcttgcggaagccagaaagccgaggggaggtcctgaaacttgaccccggcaaaagacaccaccgtcgtcatccggttgagtgccgcccccggctggggcgcgagcagatccgtccgcatccggagaatctggtatccgttggcatcaatccaggcgacgccctggaggagtagcggtatcgatattgggccggtcatcaggcggccccttaccgcggcggggtcaatgtgttcggcgaacgccaccacctcggtgcggcggccgtcaatcaactgctggccaaggtaacgaaagtcagacaggggctgctcctgcaggccaaaaaagaagggcatcgaggcaaagcccgtggtcttcatgacgttctcaatcaggttgtcagagcgctcttcccgcccatgcagatcggtgcggtactcgaccagattgtcagcgttatccttctgctgagccagcatcaaatagtgaaactgctgcacgatgcgatcgtgcgtcgcccataacttatgctctcgagtcgcttcgacggtctcgagcgaagtggtgctgacgaagttcttgaggaacgtctgtaaggtttcgcccacacaacgcaggacttccggcagccgcgactggtcaggggtgggctgaagtcccttgagctccgggatctcgtgaagggttcttttcagggaccaattcatgatggtattggtccggtgataggcctcgaattcggaatgataggcaatatccacggtgcaattcaggccgtaaacctggccgctttccgtatcccggaccacggcgcgcacgcgataagtgccggctttgacgtcgaagtgggttcgggtggtaaggccggcgtgcaagtgtttttccaggtccgcgtcccgccaacgcaaggggagaatgttttgctgggcggtcaccatgttgccgtcgccatcgaagagggccgtgacgaaagtcaggtcgtcgaggttgaaatcctcctgcttgcgaaaacgaaactggtgcaagtcgagctgctccacaacggtgagctgtgcctcggacgggttcttcataaggtactgggtgtcgaccttgacgggcgcatccggcgtctcgtcctgggagaagacggcctcctgaagctcttccttttcccgcgccgcgggatcctccgctttcctgggagcgtagtagccctggcgcgcctggagcgtcaggcctggacgagaaaccagcttgaccttgaggggatggaaggcgccgtcgtgtttcaggtcttgcggcgagaaagtcagaacgtaatacgcatcgggaagcgccgccgcccgccggaagccctcctccaggtcattgctgttctggaagaagatgccgcccgtatcctgggcgagtgcctgcattccggagctctccagcctggcactatcattcaacaattggctctttcgtcctgccacctcggcctgcttggtgttggccacgtttgcttgcgaggcgtccaccaccccggcggaggtgtacaagccgcgggcatccagcgcgttcaagacgacgctggcgcgcagggcgcgatcgatgatttcgtcgagttcgtagtgcagggcttcggtcaggaatccgctggagacgatcaccacgacgcgctggccaggaagcagagacatgcggcgtacgagggaatcgaccccctccaccgccgcacgtgactccgcttccgcctcggagttgacctgggaggcggtggtctgcgccatgtcttgagcctgtcggaggaagcctgggttgtcgccataggcgcaatgccagaattcgagggtggcaatttccagggcattccggtcatgctgtaccgcaatcaaatacgcttcatagggcggaatcgttgcgcaagactcatcctttccggccatcggacggggacgaagctggacgagcgcctgatgcaccttggcgaagtcatcggtgaaatccaatgggttctggccggaggccgtaaacacccccacgcggtccccgggttggagcgaaactgccaggtagtggtccgcagcgtccctcgaacgcaccagactttcgaaggacgtgtgcacgtcgtcgatgtacagcgccagatagcggaggggaacggtggctggaatcacagcttcctgagtagcgcccaattcggcggagggcgacttctccggcggtttcaagccgggcttgggggcgggcttctccacagagaattgcaggatggcttggggtttgccgcgatcgaggagctcgaaatcctccttgcgaaggttgtccaccgccgcgcccttggcatcccgcaccactacccggaccaccaccaggttgcgctcggcctggagcttgaaggtaggccccacctcgcgcctgggaacctcccttgcgctctccttttgggctctcaggatgcagggtacaagggcagtgcaagcggcaaggaagatgacgaccctccgcaagggggagcgcagtctgggccgacctgcggggctacgcgaagacaacatagccggaattcccattcctgccttccttcgtgacggataacatccaaactataacactcccgagattcgtgggagctcgaaagcaaagccaccagggtttgacaacgccgcgcggaccggagaagagggcttgttttcagggcagatgtcatgacccttcggctcgccacgagatatgaaaagggtccgggggtcaccctggaacgagttcagaaataaggaccccccttatgtgaagagcgtccagcctaacttcgttttactgactcgcccacaaatcgggtagactttcccctcgctcgattgcccctgagcggggtagaaatacgatgagggattggcaaatcctccgcatgaatcaagctgcctcaacacgagttttttacggttggtgggtggtcctggcggcgtttatgaacctgtttttcgccgtaggactggtcttctacggacttcctgttttttacacgtcgatggttgattcccttcatttcactcgcagccaagtagcgcaaggactgttcctcggcttcgtcatcgttgcgccggcttttggattcatgggggcgatcctcgaccgcataggcgcgcgacgggtcctgcgcgtcggcattctgctggtcaccttgtcattggtcctgatgggcgggatgacgcgcctggggcagtactacgtcttgtgcattgtgtatgtggtgggttatgtcctggccggccccatctccaaccaggttctggtttccaattggttccaggcgaaacgtggacgcgccatgggctacgcctatctaggactgggattaggcggcgtggcggcgccggttttggcggtgcacatgatggaaggactgggatggcggcgcgccttcgtcattattggcgccatgatcggcgtcgtgctcttccccattgctcaatggctgacgcgctccgctccggaagaattgggactggttgcggacggggttgagcccacaccggtactggggggaacggggccggaaagagcaggccaaacaccctcattttcattgatggcggcggtccgaaccgccaatttctggctcatcctcgcgggcagcacgctcaccatcggcgccattggtacggtgattcaacaattcgtcttgttccttcgcgatacggggtacaccacggttcaggcctcgcgcgtttccagtggattgctcttggcgggattggcgggacgcgtggcggtgggccacctggtggatcgctacaacaaaaagaatgtcatggcgttgttctatctgatcctggcattagccatccccctgctatttctggcgcgccagcctgccgcgctttggactttcgcagtggtctttggatttgccatgggagcggactatctgcttattccgttagtggcggccgagtgctttggcctggcggcgctgggaaagctgttgagccttatcatcatggccgattccctgggacagttctttggacccgtgctggcggggaagatcttcgaagccacccatagttatgaccttgcctgggacattatcaccacggcaggcattctgggggctgcggcgatctacgcggtgcggacgcgaagaacagtggctaggagtaagtggtgagtggctggcgcggatcgcatccgcggcttcaccatttgccccgcagcgaccagcggcagtgcctggtggaatgacccgatgacccgatggccagataaccccatcctcacatcctcgcccttccgttgcgccgggtggccagtttcacttataatgcctttggatccgaataaatcaggatttgtgctatgccctcgcccatcgtccaaaagcttcaggaagagattctagcgctggagcacgaactgaactccgagctgcccaaggagctgaagcgcgcccgggccctgggtgacctgagcgaaaacgccgagtaccacatggcgaagcagcgtcaggattacgttagcgcgcgcctgatgcatctcaagaaccgtctggcggacctctcgctcatcaacatgaacaacattccgaaggaccgcattgccttcggctcgagagtgactctctacgacgtcgaccgcgatgtagagattgagtaccggttggtgaccagcgaggaagccgacgtcagcaaggggctgatctctaccacctcccccattggccggggcttgatgggcaagaaatcgggtgacaccatcaacgtgactacgccgaacggctcccgagaattcgagatccgcgccgtcctgaccattcacgagcaggcgtaacggcctccagcggacttgctttccccctggagcgcggagaccttccatggtgacgcgaaaaatcggcgagacccttcggtacgtccttgacgccattgtccggggctttgccgccagcggcattaaccccaattttctcaccttcattggattcgccatcaattgcctggcggcttacctgtttgcctacggattttttgcctgggctggcgccactatcttcctggccggcatcttcgacatgaccgacggccgcgtggcgcgcctctccaagcgcgtgaccgcctttggcggtttttacgattcggtcatggaccgctactcggacctctgcctgctgattggattgctgatctactacgggcgcatcaatcgctattcttacgtttgcctggtggccgtcgccatgattggttcggtcatgatcagttacactcgcgcccgcgccgagaacctgattcccacctgcaaggtggggtttatggagaggccggagcgcgtggtgttgatcattattggcgcgctgtttgaccgcatggcgccggtgctttggctcatcgccgtgctgtccaacgtcacggtgatccatcgcattgtttacacgcgccaagaggcgcgaaagctggcctcccaacaggccgcatcctaacctccgctgcccttcctccactgggtcagggttgcccgcagctacgagcatggtgaccgcccatcaattcgaaatcccggccggcaacatggtggaaacccagcttcgcccgcgcggcatccgcgacgagcgggtgctcgaagccatgcggctggttccccgtcacgagtttgtttcggcggaattattgaacgctgcttacgacgaccgccctttgcccatcggtgagcgcgagacgatttcccagccttacatggtggcggccatgacgcaggcggcgcgcgtccggcccggggacaaagcattggagatcggcggcggcagcggctaccaagcggcaattctcgcccatgtgggcgcaatggtttacatggtggaaatcaatccccagctcgcggagaaagcgcgcgaacgcctggagcggctgggatatgagaatgtcgaggtgttcgcaggcgatggaagtgagggcctgggtgcccacgcgccctacgatgtgatcatcgtgagcgcggctgcgcccagtgtgtcgccggtcctgctcggccaactggcggaagctggacgcttggtgattccggtgggaaatttgcaatatcaggagctcttgttgctttgccgcgagggcggagaaataatcacccaccacctcgatccgtgccagtttgtgcctctgattggaaagggtggctggtcgaaggaagaagccaggggctagaaattagaagtgagaagccagcagagcgtgagtggccaacggtaaaaagaatccgccgagggcaaattgaaacgctccaatgtccgccgttttctgactcccacctcccagcttctaacttccagcttctaacttctcacccctaactcctaactcctgatatagttccgcttcatgcccgaaccatatctcagcatcgtggttcccgcttacaacgaggccggccgcatcgtcggctcgctggaggcggttcagaattacgtgcggggaaaaaacttctccgtcgagaccattgtggtggacgacggctcgacggacaacacggtggaagtcgcgtctgcccacgcgggaattcgcgtgctgcgcaacggcggcaatcgcggcaaaggattctccgttcgccacggagttctgaaagcgcgcggtgagctgatcctctttaccgacgctgatctctccgctcccatcgaggaagcggacaaactgctggcggcgatggagtccacccacgccgatgcggtggtgggttcgcgggcgctcgagcgcaagctgatcggcgctcaccagtcaccgtttcgcgaatggggcggccgattcttcaacctgctggtccggattttcaccggcctcagaatccacgacacccagtgcggcttcaaactcttccggcgcgaatccacgcgccgcgcctttgaactccagcgcgtggaacgcttcggattcgacccggaaatcctcttcctgatcgagcgcttggggggcaaagtggtggaggtcccggtgcgctggaatcacaaccctgccaccaaggtgcactatctgcgggattccctgcgcatgactctcgacttggtggttctccgctggcgggcttggacgggccagtacgagaaggcagtaggcagtgggcagtaagcagcgaagaggagattgccgaacagttgagcgggcactggcgggaagatcacttgttcagctttcggcagggtctgaagatgcatgcggcgacgcaggagcggatcaccgcctatgagcaagagatcgtgcggaaattgagggaaatgacgccggaggaacgcgccggacaagctgcccggcggtgaagaatccccacaaggcaaactccatccgcgagcgcggagaagaaccgaggcggcaggcttggtacaggatgagcggtgtggacatcacccaaatcgacgcgatgggtgtggaaaccgtcgcagtcgtactcagtgaatacgggccggacttgagctgctttcccagcgagaagcagtttatctcccacgccatgctcgcgccgcatgtccccaagagcggcggcaaggcggtgaaaaaaaagaagcgatacagcgccggcacgcgcgtggccgcgcccttgcgcatggccgccctggagctgcgccatagccccacggctttaggagcattctaccggagcctggcgcgtcgcgtcggggcagacgtggccgtcttcgccaccgccaggaaattggcgaccttattttaccgccgcctccgctggggacatctgtacgtcgatgaagattcgcaagccttcgaagaacgataccggcagcagcgcatcagaagcctgacggctagggccaaagaactcggttatcacctcgtgccggcaacaatctgatgcccgtagaaacgagaaagtcacaggtcagaaggcagcgtcggtggtgaatccccgcaggtctttaccgctcaggcgctgagatgcagaattggtgctaggtgttaggttttactggtacctggaacctggaacctaacacctcctttgctctgcgcctccgcccatctgcgatgagaaggacctcaagatgctttgggctggccgtggcaatattatgcgtttcaagctcatcagttgcgaaatctttttccgcgagttttgtgcctgcctggcgcgctcgcctcacattgtggatgtcgagtttctccccaagggcctgcacgacatcggatccaaggagatgcggtcgcgcttgcaggccgttatcgaccgcgtagaggagcgccagtacgacgccttgctgctgggttacgggctttgcaacaacggcatcgtgggcctcgccaccaagtccattcccatggtggtcccgcgcgggcacgattgcatcacgcttttcctgggcagcgcggcacgctacatggactatttccaaagtcatcccggcgtgtatttcaaaaccaccggctggattgagcgcggtgaggcggacggcgagctgggccaactggctctgggcaaaaagctgggactgcaacaaagttacgaagaaatggtggcgaagtacggggaggacaacgcccgatacctgtgggaagagttggggagaaacctcgctcggcactatggccaaatcacctttatcgagatgggcatcgagcccgacggcagctttgagcagcactcgcgcgacgacgcggcccagcgcggctggactttcgagaagatcccgggcgacatcaacctgatccaacgcctggtgaacggcgaatgggacccgaaggaattcctggtggttccacccggccaccgcattgtggcgagctacgacgagggcatcataaaagcagtggcaagtgaagagtgacgagtgatgagccagcaaggaccgaaattcgaaactcgccgcgatattcgattgatgaaagacgatctcgactcccaatcggcaatcggcgatcgacaatcggcaattccatgaccggccgcgaacgcattctcgcattgctcgatggcaagcccgtggacagcttgcccttcatgcccatcaccatgatgttcgcatgcgatcgcattggcgcgcagtaccgggattacgccaccgactgccagatgctggtggaagggcagacccggaccgcggctgaattcgatttcgattacgtcagcaccatatccgacccggcgtgcgaagcgtcagactgcggtgcgcccgtcaagtacttccccaatcagccgcccgccctcgacgaagcggacgctctgctcgcagacaaaggcaagatgcgcggcctggaagtgccggacccccacaccagcccgcgcatgggcaaccgcttacgggcgctggggctctttcgacaaggcgtgtgcaaggaaaagctgattgaaggttggatcgaaggccccattgccgaggctgccgacctgcgcgggatcaacaacctgatgatggatttcttcgacgacccgggattcgtcaccgagctattcgagtttgtcctcaggctcgagctcacttttgccaaggcgcaggtggcgagcggtgcggagttgatcggcgtgggcgacgcggcagcctcgctggtcggtcccaagatctatcgtgagtttgtgtggccttacgaaaagcgcatgatggacggtctgcgcgctctgggggtacgaacgcgcttgcacgtgtgcggcaatacccggcccattctgggcttaatgggacaattgggttgtgacatcattgatctggattatctggctcccatggccgaggggcgcgcggcgatggggccgggccaggtgctgctggggaatatcgatcccgtgcgcgtgctgcgcaatggaacgcccgaggaggtttacgccgccgtggccgaatgccaccaccaaaccggcgaccgattcatcgtgagcgccggttgcgaagtggtgcgcgatactcccccggataatcttcgcgccatgctgcgctatgcgcgggaacacgcggtggataattgatgattgccgacggacgattgccgatttcatccaattgtcaatcggcaatcgaaaatcggcaatccccgacaggaagtgctgttgactgagataccgacataccgcatcgttctaaggcccgtgcaggtggagctgaccgcgcccgcgggatccctcttgcgtgacttgctgttcgcacaaggcgtagagttcccgtgcggcggacagggccgttgccggggctgtcgggtgcgcgtgctggaagggcgggcatccgtcaacgacgcgcaacgcgagcgcctgagcgcggaggaacttgccaacgggtggcgtctggcctgccagtgcgcgctcgaagatgatttggtgatcgagctgcgccaatgggacgccgccatcctggtggatgagacgccctttgctttcgagccgcgtccgggcctgggcgtggcagttgacctgggaaccaccacgctggtcgcgcagttgcttgacctcaccaccggccgcgtgttggcggtgcgcacggcgctgaactcccaggcgcgctttggcgccgacgtcatgagccgcgtgcagtttgccttgacgcaaggcggcgcgcaacagctccgcggtttgattcgccggcagattggcagcatgatcgagcaattggtgttttccgctcaggttgcggagggcgaaatcgcggatgtgatcgtggtgggtaacaccgtgatgcaccacctattctgcgggctggatgttgagccgctttcgcgataccctttcgagtcggggcagctcggcctccagactttctgcggtcaagatttggggtggaagctctccggcggtgcgcgcgtgcgttttcttccttgcctgggtggattcgtgggcagcgatattctggccggcattctggccacgaacctccttgaacgcgaggggctgaacgggctggtggatttgggcaccaatggagagatcgtgatcggcaatcgccagtgcttgctgtgcgcctcgacggcggccggaccggctttcgagggggcgcggatttccatgggcatgcgcgcctcaacgggagcgatctccgaggtaagggtggaaggccacgctatccactgccgcgtcctgggcaatgttctgcctcagggtttgtgtggaagcggattggtggatgcggtggcggcgggcttggagctggggcggattgagccctccggacgtttctcggacggcgccggcgcgtgggaactggcggcgcccgtggtgctgacgcagaacgacattcgcgagctacaactcgccaagggcgccatcgccgctggaattcgcttgcttcaggaacggttcggcgcctcgtccggcgaccttaaaaaactctatcttgcgggggcttttggcaattatattaatcgcgccagcgctcagcgcatcggcttgatcagcttcccggcggaaaccgtcgaggcggccgggaacaccgccctaatgggagcaaaagtggcgctctttcgcccgaagggagaagacggctcctttgcccgcctgcgccggcaaaccgagcacgtggcgctgaacgccgatcgaggttttcaagaagcctttgtggaggaaatggcatttccaaacatgggtgctcgggtctggggactgggtactgagaaaaccccggaactcccggaacccagcacctagaacctagaaagggagatttgtatgacactctttgaagaacttcaacaggccatcattgatggaaaagctccggtggccaaggaactgacggagaagatgctgaaggagggaactcggcctggcgagttttttgtcaaagcgatcatccccgccatggacgaggtgggacgccgcatgcgggaatgcgagttcttcattcccgaggttttgatcgcggcgcgggcggcgcgtgcctccagtgacattctgcggccgctgctggtgggcgacgaagccatcaaatctgccggcaccgtcgtgtgcggcacgataaaaggcgatctgcatgatatcggcaagaacatcgtggccatgatgctggaaagtgcgggcttcaaaattgttgacctgggcgtcgatgtcagcgcggagaaaatcgtcaatgcggttcgccagcaccaggccaatcttgtggcgatgtcggcgctgctcaccaccaccatggtgaacatgaagggtgcggtggaagcactggtggccgcgggcctgcgcgagaaggtgaaaatcatggtgggcggagcgcccgtcaccgatgcctgggcccattccatcggcgccgatggctacggcaaagatgctccggcggccgtggagttggcgcggcagcttgtggcagtctagacggtgcgccacagcccttgaaagctgcagcgtggaggtggggactcaatcatgatgagctcacgggagcgagttcgcctcgccctggaccaccaggaaccggaccgcgtgcctttggacctcggcgccagcccggtgacggggatgcaggtcgacacggtgtacaaacttcgccaggcgctgggccttgatgcgcccggcgctccagtgagagtaatggaaccctaccagatgctgggggaaatccaacccgatcttatggacgccctcggcatcgacgtaatcggtctggcaaagccttccaccatgttcggcttcaaaaacgaaggatggaaaccctggaccacctttgacggcacgccggtgctcgttccggaaggcttcaacaccgacccggacgagaacggcgacatcctgatgtatcccgagggggacaagtccgtgcctcccagcggccgcatgcccaaaggcgggttctattttgactcgatttcccgtcaaattcccctggatgacgaccacctgaagctcgaagacaacctggaggagttcactgcggtttccgacgaggacctggcgtatttgggccgcgaggcggaaaggctgtggactgaaaccgataaagccgtactggcgaatttcggcgggacggccttcggcgatattgcgctcgtccccggcccttggttgaagcatcccaagggcatccgcgacgttgaggagtggtacgtcagcacggcgacgcgtcgcgacttcatctacaagattttcgagcgtcagtgcgaaatcggcatcaagaatctcgagaagattcacgccgcagtgggcgagcgcgttacggtggtcatgctttcgggaacggacttcggccagcagaacggtccgtttatctcgcccaaggcttatcgcgacctctatcagcctttcaataaggccgtcaatgactgggtgcacaagaacacgacgtggaagaccttcattcactcctgcggatcgatccgcgccttgctccctgacttcattgccgcgggctttgacattctcaacccggtgcaatgctccgcctcgtgcatggcgccggaagaattaaagcaggagttcggggatcgtgtgactttctggggcgggggcgtcgatacccagaaaacgctgccgttcggcacggtcaatgatgttcgccatgaggtgagttcacgcatcaaggttttcggaaagggcggaggttacgtcttcaactccattcacaacgtgcaggcacgcgtgccgattgcgaacgtcgtggcgatgtacgagaccgtgcgcgactgcggcacgtactgagcctcagaattctgctgccataagtgatggcagaaggcatggcttaacgcctgacaatttaggatggacaaaacggggcggatcatcattcccaaacgccgcagggaaaagctggggctaaacaggttgcagaaaaaagcttccatcctgtcatttccgccaatctaactatggttagatggcaaatgcccaccacttccaggatctggtcgcacgattggcacgtaacacattcaatctaaatggcttactcgcaattttttccgcccggcggagaatcaagcccagcattatcatgaacttagcgggttcttccggaacggatttaaccctcaggcgacctacgccaggcattcatattgctttgccacccaaggagggaactcccatccagttcttccgcagcctatttagcccgaaatggaattcgaggcagtggagcggcccggcgttgttttgctgcgacccgcccagcatcagccgtcaatgatcccggcagacgggtacgggtcgtaacgccggcttccagccggcaccggagccgccaagatggcggcgctacgcccaaatcaggacagcaccggcggacggactgtgggtccatcaaggggcctcggtggtataatctatgaaggagcggttctgcgggcgcaatctcgcacttaaatctatctcatggctgaccaaccgacacccttacctgcaggcccgcaatattacgaggttgcccctcgccgctactggcctttcgtcacgttcatccttcttgccgtgaatttcctctttttcgctttggaaaaatgggctggggggtgggataacctcccggttctcctcaaccttggcgctgcttacggaccctatctgcgccgcggtgagtacttccgtctggtcatgccgatattcctccacgggggctggcttcacattctgggaaacagctattgcctctatatcctgggacctatcctggaacgcgtgtatggctatggccgctacgccacgatttacgtcgccgccggcatgggtggcgccttactttccatggaggtctcgagaaacgtctcggtgggagcttccggagccattttcggaattgccggcgcgatgctggtcaccggctacgttcaccgcgacgtaattccccggcgctggggccgtgctttcgggcggggaatgattcctttcatcgccttgaacctggccttgggtttctcgatgcacggcatcgataactggggccatttgggcggattagcaatgggggcgctgctggctttcctcattacgcctccccggcacgacgtacagtatggcgaaattgctgaacctccctcgcaggccatcgttgctcttccgctcgcggtggtgatccttgccatggccgcgatggcaaaccattaccggacccttcaggccatggaccggcttctggtacagggtgaacggtacgaagctgcccaccagtacgaccgcgaattccagagtttccagcaagcggtccggctggcgcctcgcgaggagcagccgcatgaggagttgggcgggtattacctgacacaaaagaaatacggcccggccattcaggaatttcaggaagcggttcgcttgaccgagggagatgaccagcaaaagcttgaacttggattggcttaccagttgaacggcgatctccagaaggcgcagcagatctttgatgggctcgacaaagaaccccaaaccgccaagggaagaagagcgctcgccgggaaccatgcgcttctggcggacctttatgccaaacagaagctttacgctaacgccatcaaaagctaccagcaagccttgagcctggagccggacttggcggaagctcataacaacctggcatggctctatgccacgtgcgatgacccgaagtttcgcgaccccaaggccgccctggaccacgctcagcgcgccgtggatcttagcgaatggaaagaggggaacttcatcgatacgctggcggaagcgcactttgccaatggggactatcagcaagcggtggagattcagaagaaagctctggccctcgagcccaacaacgaggagctgcaagagcatatggcgcgctatcgtaaagccgcgggaatatgagcataggatggcgtgcgctgctcccccccccaacaggagcttttcaagcactcgaccgcaaccaccagtttgaccgcgaaccggctctaggaaacgtgcttgtgtcctgagttagaagttcgttgcttattcgagaaccccctcacccccggcccccataggcgttaaattaagactggcgttgcgctcccagccgcggagcggcgaaagatcgtagcccacggcgtaagccgtgggtggagggagtaaccttgaaggtgagccccggaggggcgaaagaatcccccgtggccacggggattccgggccttttctgtcgccccgctggggctgcgctcgcaacctcggggctccacccacggcttacgccgtgggctaccctcttacggccctccgggcctgggaggaggtgcaaagatcattcccacagcaccaaagtgcttattctaacgcctatgcccccggtccctcgcccccttgggggagaagctgtgaagaaattccggaacgagcgaaaccatctcgcgcagagacgcggaggcgcagaggcgaaaaagagaataaggcagttacttattctgtatctctgcgcctccgcgtctctgcgcgagatggtcgattttttcacagcttcggagagggtggctcggcgaggcgttttcatcagccggggcgagaagggggccccacgttctgcttgtcgtgggggtgaggggtcacttccgccgcagcaagtagcgcggtcatgctttccaatgtccgcggcttttcgtcttgcggacgcccgcgagggcgcgtagattatcgccctgtggcgttggcgccggccgtttctctacgcgcgcttcctgttcgttacggtgaaactcctgccggggagaacgcgcttggacgaagaaggtctggccaattccctcttccgcctgcgggtgaaggccatcacgagatgccgggttgccctacccggtgttccacagggtgaatggggaacgaggggacggtagcgcagggcccgctctccggccctgcggctcttcaacttcgtggtggtgtggccggtgcagcggtgggtggtcggggggacgccatgcggggtgacgaaagaccgttttcccattgtgcacccacactgctggaaaagccgcagggccggagagcgggccctgcgctaccttcgaacgtgtcgattgggtgatcgtgggcggcgaatccggcaccggcgcccgcaccatggacccggcgtgggtttgggtaatccgcgaccagtgcctggacgcacgcgttcccttcttccgccccctagtacttcctacggagcaaaagtaacctgctggtagggttcgcccttgtgacgtcggctgacctcgatcgtcactttgcggtcaagccgtttcagaaagtccagcagcttgtcagttgtgaagcggctgaagtgcccgttcatcaggtgcgatacatcgggctgggcaatgcccaatacatccgcgatttcgcgctgtttcaactgcttgtcctcaaggattttgtagacatggaatccgatctgcgctcgggccagaagctggtcggcatctttgcggcccaaatccttgaacacgttcccggaacccgcttcgaactcaatgggttttcgcctttccgtactcatttgccaactcctgtgcttcggtgtatcgcttcttgatgaggtcaacgtcccgcttcggcgtttcgatgcctttcttggacttcttctgaaaggcatgcaaaacataaatccgactcccgatgtgtgtcgccagcacgacacggaaagcatcagaggaatatcgcagggcaatctcaacaacgccgctgccgacacccttgaagggtttggcgtccttcggcataccgccaaactgcatgagctggatctcgtccccgaggagtttttgtgcaccatccggaaaatcccgcacgtttctcagggagtctcccagccagacaagaggccgtaggaccggtggttttagcctgtccaaacctcacctcaacaatatataggaaatttactataatgtcaaagccccgtggggtgacgccgctgctttccccgtctgccactctcctgcgtcatcaaaaccgggtggaaagcgggggccaccctctgctggaactctgcttcacgccgtcaaatacaagcgggtagtcattgcgtattaattagtatgttgactttatcatattacgaaccgccgaggaagccaaactgcggctacctctgtgctacccgctcctcaatcaaattgaatgcccccacgatttccgccactaggcgaccttctggctttcccatgggatgctttgccacaacgatttggacccgatggctcggttcgaaatcggccgtgccaacccattccacgaatttcttctcctccacatctttccattgggccgtctgaaaccgggttaggaaatgttttgcccggccccagccggtcaggaacagagcgcgtttgggtttccaccacaggaattcctcccgaagaatctgtacgcagaattcaaattggacatcgcatagacgaacgctggggttccagcccttagcgggagcaattttgtacaagttcgtccacattaaatgcgagggccaatcgctttttagcacatctgcaatccccatattatccattacagatcgcacaacccgccagaatgcagtccttcccatattaccgcgccctcctgcccagcagtctgtgacccacagcaatgggcaggggcggtcggtttcaagaagactctccaccaaggtcttctccagaactgcttgatgattcttctcgtcgcacatttcctcggcggtccaaccttcgttcagccattgatttggagacctgccaataacagctaattcgcccgtagctaaccggccctgcatacccaagaagcccgtaaggggctcgttcaatttctccgaatcgtcgccgacgtatttcagaaggtcgggaaaaatccgtttctcatttgcgcgctgctcagaatctggcatgcttgtctacgtctccattccgctttggcttcgtttcaccaccaaacccgagccttcgcaccgcatgtatgggtcctccccccaatcattgcaccaagcgcaacggcaaggggacggaggggacaaacaccaacttcccaccctgggtgacgccccgcgcagatgccggccgcgagttgttatgcgccaatttcgcgcacttcgccctttttcacgaggggtagcgtttccagcaaggcgggtcatcccagcaagaggtcgcattcgccgtgcgagccaatccagaaccacactacggttgacccttccatgactcccagcgcgcggtagcccagcccgattcgcaccgagtaaatgttggcttcctcatccactttcttgaagcgcagactggggtggcgtggatcgcggcggaacaaccggtaagcacgttgcgcctgccggcgtacgtcgtttggaagtgaagtgaaggcttggcggaaggcgcgcgtggtgcgcgacgggatcacagaagctcgtccagcgggcgcgcggcgccgcagcgatgctcgtccagcgcctcggcggccagcttgcgcaacttagcgggattcttgcgcagcgtcctgccccacgcttcttcatcctcgagcgtggcaagaatctgggaggcgatggcgttctgctcgtcttcagtgagcttgccgaccttccgcagcgcatcctcaagtaattgcgtcataggttcaccttaccaaacgttattcgcaggcgcaagcccgccaaacgtcgctgacttccaacccatctgccagaccgtcagcacgtcgtgcccggcaaagtcatgagccaggcgctcgtcaacacattcatccagcaggatcttcacttgacctcggcgaggactttgcctttcgcgatctccagcaacaccaccacctgccggcgcgtgacggtgggaaagtggaaatcatcaatcgtgtccccggcctccaggtactcgaagagggtttggacgggcacgcgggtaccggcgaagaccggggcgcctcccatgatgtctggcgaaatggatatcagatgatcgcccatgggaaggagtctaagggcaaaagcggtctgcttgcaagcggaacagtatcgagctcgacgatacgggccacgtcaagggtttggacctcgacttcaaggggaaggatgctttggcaaggcgaatccaccagcttgcccgcacgcgcataaaacccgctccgccggtggaagtcgtcttcgaggaaattcgaggaatgacggtgggcagaatctccgtggcgcgcggcgaaaagccgctgtacacgctggacaatgtggtttacctgcggcgagggtcttccgacgttcaggcccagcccgaagaaataatctccctggtcacccaattcgccttttagaatactggccccggcgatttcgatttttgattccgtaaaatctttacgggtactttatgtttgtcgcctatgcgcggatgtggcgcacgccggtcccgggcgaatcgtcggccacccggaaactatcccgaaatggacctctggaaacttgaaggccacttcaacccaaacagcttaagttagcgcttatgggggggagagggtggctcggcgaggcgttttcatcagccgaggcgagaagggggccccacgttctgcttgtcgtgggggtgaggggatcccatgttctgcaggtcgcgggggtgaggggtcttttcccgacggcggcggtcaggcccctttgcggggcccgtccgtcaggtgacggataaagcctccggctttgccggaggataatcactctgagcctgctaatagcctgccctctcacagcaccgcggtttcgtggatcaggcggccttcggcaaagcgcgccaggttaagagcgcgggcgtcaatcaggtcggattggccgtgcagaatcaaatccgccagaaccttgccggtggcgggtgaatgcatcacgccgtggccgctgaagccgttggcgagatacaagccggggacctcggggacaggtcccaggatggggtaatggtcgggagtcatttcgtagaggccggcccaggcgcgcttggggttcacttccagcgcctcaaagcagggaacgcgctcaaccgcacgcagaagaatcttctcgacgaaccccggatcgaattgggttttgaatcccggcgtttcctcgggatcattccaggcgagcaggattcccagaccctcggggcggaagtgaaaacccgtagccatatcgatggtcatgggggcctcgcgcgcgatgagcggaaaaggttcggtggggaccaacatgcggcgcaggggttcgacgggcaattgcaatccggccaaggctgcaacttgtgccgcccaaggaccggcggcattcaccaccgtgcgcgtggtcaccgggccacgcgtggttcggacgcccgcgatgccctgcgcgtcctgcaaaatcgccgtgacttccgcgcccttccacagacgcacgcccttttcggtggcgcgctgcatgaagccggtcatgacgctgtgcgggtccacaaatccatcggtggaactgaaactcccgccccggatgtcgtccgcgcgcaaatgcggcatgtggcgaaggacttcggcgggcgagagcaattccgccgtcttcactccacacgccacttgcaattggtgattggtttgcaaataagccatgtgcttttcgcttgtcgccacgaacaggtagccctgcggacgatagccgccggggcagcccgtggcctcctcgaagcgggcaaagaaattgagcgcatagagcgacaggcgaatgttgatctcggtggagaactgcgcgcgcacgcctcccatgcttttgcctgtggagccgcgccccaggtgaggctcgcgctcgagcaccatgacgttggcgccgccggcctcggcaaggtgataggcgatgctcgcgcccacaatccctccgcccacaatcaccacatcggctgtttccgccacgcgccgcctccatgggtgagaatcgaatcgcttgtgctggcggatatcttaacttgcctgaggtccaaaacaaatgggtgcatgacatagaactgaaagccggcccctcggtggtagggaagctgtgaagaaatcccggaacgagcaaaagcatctcgcgcagagacggggaggcgcagaggcgaaaaagagaataaagcagttatctattctgtatctctgcgcctctgcgtctctgcgcgagattgtcgatcttttcacagcttcgtagggcgggcgggacgctctacatcccctttttcactttcatgttgccaccccgcacctccctgttgcatccgcgtgcacatcgggtcagaataggaccgctgaaggagaacgatatactgccattttattgaggtggaaatatgagaacattcggaagccttttgggtttggtgatcgtgttggcgattgtctggttcgtgatgaagtcccagatgccgaaggaccccacgggcacgggcttgcagtctccccgggaggtgattgacgtggtgggcgtcaagggcgacctgctggccatcgcccaggccgagaggatgcacctggcaagccaagggtcctatgcctcggttgacgagctccagcaggacggtgcgattaacttttccggcacgaaccggcgcggctacaatttcaccgcggaagtggacgatggccaacacttcaagattacggcccggcccacggacgccgccaaagccgcttggccgaccctggatatcgacgaaacgatgcaggtgacacaacaatgaaaagcgtccttagtccgtggtcctttgtctgtggtcagccgtcagtcaccggtaaagcggcatgggaggaagacgagctgatcggcgacgaatgattattgaaggctgacgacggagagctgacaacggacgacggacaaaggacaaatggccaaggactaatgactatggagcccccatgcgaatagaagcgcgagcgcccgcacgagttgatttggcgggcggaaccgtggacatctggccgctttacctttttcatcctggtgcgcaaacggttaacattgccatacgatgttatgcctcatgcgtgatcgacacccgcgccgacccgcgcattgtactcgtctcgcaggaccagggactgaaggaaagctgggacaacctcaccgcgctttctctcggcaaatcgcagttgcccttgctgcgggaactggtgatgtttttcgagcctcggcgcggattgaacatcaagaccagttcgcaggtgcccgccggcgccggcttgggaggctcctcggcgctgaatatcgccctgtgcggggccctggcgagagttaccggcaagcgctgcacacgcgggacgatcctggagattgccaagaacgtagaggccattgtcatccgcgtgcccacgggctggcaggactacttcccggcgctttacggcggcgccaatgccatccatttggagcgcgacggcgtgaagcccgagcgcctgcctctgcccttcagcgacgtggaaaagcgctttgtactttgctacacgggccaaccgcgcagttccgccatcaacaactgggaggtcatgaaatcccatatcgataacaacgagcgcgtcctcaagaattttgatcaaatcaccaccatcgccggccagatgcgggaagcgctgctggcccgcgattggaacgatgtggcggagctgctggcgctggagtgggaaaaccgcaaacgcaatttcaaaggcatctccactcccaaaatcgaccgcatgatcgaacaaacccgcaagcaaggaaccgtggctgccaaagtttgcggggcggggggcggcggatgcgtggtctttatggtccgcccgggcgccaaggcggcggtggagaacacgcttatccagatgggcgggcagattatcaacttcgccatttccagcaccgggctggaagttcgcgccgaccaaattgagcggactcgggaaacgccatgaactcgaccggaatattcatatacgatggccgcctgcgccccatctggcggttctttctttccgtcgctcttctgtacgctgctcttgtgctctcgggagcgatgctggaagcgatctttctcatcggcaaagttcatccgagtttctttgcgacgttcttctggcaatccttcgcgggcctgttggcggtcattcccgcatccaagctgatgacggaggtatttgagcggcgtcccctgggttccatcgggttggcgtttcacccgcggtggtggagggaactgggccgcggcctggcagtgggcgccgccatgctattcggcgcggtcgtgctggagtgggtttgcggtttcgctcatttcacctttgcgccacaccccatgctgcgggcaggatccctcacctttatgttgtttgccgtggcggcgcccttggaggaagccctttttcgcgggtacccctttcagcgcttgatggagtccattactcccgtgggggccatcgccgtaacttccgctttgttcggtcttgtccatcttggcaacccgcaccggacgtggatctccaccctcaacaccgggctggtgggcatccccttcgccattgcctatttgcggacgcgctccctgtggatgcccatcgggatgcatttcatttggaatttcctcatgggctttttcctgggccttcccgtcagcggcattaacgttccctccagccttcttagcgcgcaggtgcagggttccatttggctgactggcggcgagtatggcccggaaggcggcttgctggtgacgggagtaatcttgctcggaaccatgtacgtgtcgtacgcgaaaagcatctatacgagtgcggaaatgaaggccctggtttttgctccggtgacgtcaagctggccccagccgccgctcacaatcctctcagctcctcccgagggagaggcgaaaagagattgattcccatgtccgcctgcggttttgagacccatgcccgctccaagaaatccacccgaagcaggctcgggcggagcttgtgggtggcccttgctttcctcatcattccgttgggactcgccagggaaggcatggattccaaaacccgcattgagatcctccgcggcctcctgcgagagctggcggtgaccaaggttcccctgcctctggggaaaaggggcgtgcgcatcgatgcgcagggaaagctggaccaggaagacgcgcaaaaggaaatgcacaacaacggtatggccatgaaagcgggcacgcccgcggctatcaccaagatccaattcaagtcgaaccagattgttttcgagctcaacgggggcggaaggtctgggaagaagtggtaccagcacatcgagatcggcgtcgggggggcaaccacccccattggttcgcaagaaacgccggccaccgccttcgggtcctccatcacagtggattttggcaaggcccttcccgaccttaccgtccctcagttgaaaacaattctgtcgggcgttctcgatttcgagcgtcactcgcccacggtgttgtactcgccgaatctcccccccgaggtcaaggaggccatcaagaaccacaacgtcatcgtgggaatggaccgcgacgcagtgctttcggctaaaggcaccccggaccggcgcgtgcgcgaggttcgcaacggcgcagagcaggaaaattggatatacggaacccctccccacgtgcttttcgtcaccttcgacggcgatcaagtggtggccgtgaagcagtattgagcgttccaaatgccgccttgggttcttagtttttgcaccccaggcgaggaggtggctcgctcattttcatcaagcgacggtcactctgtgcgccattattaaaactgacatatagtcaattatagaatttataagttgacattcagtcgtgtaggatatagatttgacgcattaatgcggatttttgccccagtggagggttctccatgcttctacccgtcagtgttaccaggcaatcgcatactgcaaataagcgcaccgtgctttgctgcggatgtgttggcgttttatttcttgccattataggacttggtgttcttcagccggtacaagccgcggagaatcttcttcctactcgtggggttcagttcgcgcccacgaggcttcagcccaaacttgctggacgcaagctggcggccgcactggctggcccggtgagcgccggcccgcaggcaagcacgctttccgcgccggaggggggacaagacacactggttaccctgcggggcaacactcgtccggaagcgaatgcagctaacgatcgcgggcgagtctccgatggcctgacgctcaaccacatgatgctgcagttgcagcggactccggagcgggagcaagcactgcaacaattcatccgtgatatccacgatcccgcgtcgccgctttttcaccattggatcacggcggaggaattcgggcagaggtacggtgtggctccggctgacgtcgccagactgacggcttggctcgagtcgcaggggttcaaggtcaacctggtctatcccaatcaaatggttgttgatttcactggctcggcaggccagattcgccaagccttccacacggagattcataacttgttggtgaagggccatccgcacatcgccaatatgagcgacccgcagattccggccgacctggcctccacggtggcgggcgtcgtttccctgaatgacttccggcctcacccgacgtttgtgccgcggcctaattatactttcacttttgatggcactgtctaccacgagattgtgccggcggacttgtggatgatctacaacttcaacccggtctttgcggcgggctattcgggccagggccaaacgattgtagtgatagaggataccgatgtttactccacggatgactggtatactttccgctccgttctgggcattgcctcagcgtaccctcttggcaccatgacgcaggtccacccccccagtggttccttgaataactgtgctgatcccggcgtcaacggtgccgatgaagaggcgaccttggatgtggaatgggcgagcgcgggggctcccagcgcggctatcgagctggcatcctgctcggacacagaaaccaacttcggcggttttattgccctccagaacattcttaacgccagcggcacgccgccggcgatcatcagcatcagctacggtgaatccgaatcagcgctgggcgctgccaataatcagtctgttagctcgctgtatcagcaggcggtaacggagggcgtcaccgtcttcgtgagctcgggcgactcaggcgcggccagttccgacgaccaagatccttatgccgaatacggaatcaatgtcagtgggtacacctccacaccctacgacgtatcggtgggcggcaccgactttgccgatacttatcaaggcgccaacgacatctattggaactctaccaacaatgccaccaactacgggtcggccctttcgtatattcctgagattccctggaacagctcttgcgccagcgtgctgttcgctgatttcctgggagtcgagcccacctttggcgccggcggactttgcaataatacctccgatcttaacgcctacggcctcctcaacaccgcagcgggtagcggcgggcccagcgcttgcgccaccggcgcgcccgatatccccggcgtggtgggtggcacctgtgcgggatatgccaagccctcgtggcagtcggggttgatgggcaatcccagcgacggcgtgcgcgacattcccgatgtttccctcttcgctgccaacggaatctgggggcacttctacgtggaatgcttttctgatcccaacaacaatggcaagagttgcagcggcgctcccagcgggtggaacgggggtggcgggacatcgtttgccgcaccgatcatggcggggattcaggcgctcgtcaatcaggcttccgggagccggtggggcaaccccaatcctgcctattacgagctggcggcggaggagtacggctccgttggcagcacgtcctgtaaatccgctcgcggcaacgcggtgggcagcaattgtatcttctacgacgtaacccagattccgcttgtccacggaggaacgggcacggggggcgatagcgacgtgccttgctcagggataaattgttatgcgccctcgggcacctatggagcgctttccaccgccccccagaccctgagttcggtgtcggcaaccaacctcgggagcggctacaccagcgctcctacctgcaccctgagcgggggcgggggatcaggggcagcctgcagcgccagcgttaccggcgtggttgcgacgattgatctcaccaacggcgggttcggttatacgacagagcccacctgcaccctgtcgggcggaggaggaacgggtgcgacctgtgcggcgatgatatgtgctaattacgaggtttgcgaattggctgtcaccaattttgggagcggctacacctccaaccccgcctgcacgctcggcggcggcggcgggacaggcgcaacctgcaccgccaccgaagtcacgggaatcgcggccagtcttaccgcccccggcagcggctacaccagcctgccccactgcgttctcagcggaggtgggggaacgggcggaacgtgcgctgccatgacggacaacaccagcacctactatctacgcgcgttcgacgctgcgaccgggtgggacttcaccaccgggatcgggacggtcaatgtctcgaacctggtagccagcttcactacttccgcctcggcgtccttgtccccgctcagcctctcatttccacccctgccgatcgatgaaagcagcaccccgctgagcgtgacggtgagcaatgccgggaccgccaacctcgtcatcttaagcgacgctattagcggtacgaacgccagcgactttgccattagcgccgacacctgcacgggagccacgctcactgccagcggcacctgcacggtcagcgtgacctttactccgtcggcggaggggagctttagcgcctcgctgaatatcacggacattgcccctcacagcccgcagaaggtgcttttgaccggaaccggattgggggccggcgtgggtttgtcgccctcttccctcaccttcccagagcaaattcctggcaccagcagccccgcgcaacccgtgacgctgtccaacggcggcaacgtccctttgagcgtcagcattgccatcacggggaccaacagtggtgactttgcccagaccaacaactgcggatcatccgtgccggccggaagcctctgcgccatcaatgttatcttcacacctggggcgccgggaagcagaagcgccaccctcacgattacggacaatgccctgaacagcccgcaaacggtcgccttgaccggcattggcgcaagtgccgtgcccgtcatcaaccaacccctcgtgcccaccagcgtcacccccggcgggcagggattcactttcaccgtcaacggcacgggctttgtcaacggcgccacgattaattggaatggcacagcgctggcgacgacttttgtgagtagtcaacagcttacggccactgtgccggcggcaaacatcgccttgatcggtacggcttggattaccgtgggcaatcccggttcggtcgtgacttcgaacatgattccgttcttggttacggctcccaccccgacggcagctttcaccaaggcgagcggctcgcccctagcggcgggaacggatcctgtatcaattgcggtgggggacttcaacggggatgggaaattggatttggcggtggcgaataaaggcagcaacaacttgaagatcttactgggaaacggcgatagcaccttcacgcccacctccgcatctccggccgcgggcgccacgccttatggactcgtggtcggggacttcaacggggatggaaaattggacttggcggtggcgaatcctggcagcaacagcgtgaccatcttactgggaaatggcgacggcacattcacacccccctccgcatctccggccgctggaaccacgcctcacgaactggcggtgggagacttcaacggggatgggaagttggacctggcggtggcgaattccggcagcaacaccgtgacgatcttgttgggaaatggtgatggcacgttcacgcccagcgctgcgtctccggccactggatctttgccttttggaattgcggtgggggacttcaacggggatgggaaattggacttggcggtgacgaatcaaaccgacagcacggtgaccctcttactgggtaatggcgatggcaccttcacgcccgccgctacgtctcccgccacaggatcttcgccttctggaattgcggtgggggacttcaacggggacgggaagttggacttggcggtggtgaattccggcagcaacaccgtgacgatcttgttgggaaatggtgatggcacgttcacgcccagcgctgcgtctccggccactggatctttgccttttggaattgcggtgggggacttcaacggggatgggaaattggacttggcggtgacgaatcaaaccgacagcacggtgaccctcttactgggcaatggcgatggcacgtttacgcccgccgcctcatccccggccacgggagcccagcccatgggagttgcggcggggaacttcaatggagatggcaggctcggtctggccaccgccaacgggggctcgaacaacgtctcagtattaatccagtttcccatggccagcgtcaccccgcccagcctgtcgctgggcaatcaacccgtagggaccaccagcggggccagcccagtgacggtgagcaacaccggcacggcgcctttgaccttcacgggcattgcggtgacgggggactttgcggcagcgggcggcaccacctgcagcaccagtgcgccgcttgccggcgatagtaattgcgtgatcaatgtgacgttcacgccctcggctacgggcggccgctcgggcaacctcacgctcaccgacaacgccggcagcagtcctcaagtggtggatttgagcggcaccggcactgcccccactgccgacctgagcacttcaagtgtcagctttggcagtcaagcgctggagactacgagcccagccggcgcggtgacggtaacggacaacggcacggctcccctgactttcacgaacattgtggtgacaggagactttgccgtggcggccagcggcaccacctgcagcaccacggcaccggttgccgccggcggcgggagttgcgtgcttgatgtgacgttcacgcccacggccgacggcgcgcgctccggcagccttacgctcatcgacaacgccaacagcagtccgcagaccgtcagcttgagcggaaccggtactgggcccgaggttagcttgtcctccccgctacctttctcggctccatctataggcgtcacgaccagttcccagactgtcacactcactaacacgggcaacagcagcctgactttcagcgcgattgcggtcaccggcccctttgccatcgtcagctccgggaccacctgctcgacctccgcccccgtcgccgccaccgcgacctgcacggtggcgatcacgtttacgccgacggcccgaggcatgtcgtcgggcagcctgcagttcagcgacaatgcgtacaacagccctcagaccgtggcactgatcggcacggtcccggacttcgccctggggccaccatccggttcttccacctcggctaccgttgcgcccggccagcctgcgacttacactttaagtatgagtggtatagggggattcaccggggcggtgaccttcgcctgcacaggagctcccgccggagcaacctgcacggtttggccggtcacggcaacagcggcgaactctgcgaccaatatcaccgtcacggtttccaccaccgcgccttcgctgagtgcgccgcgctccgggccccttccccaggttccgcccctgccgccgggccttagggttctgttgatgcttgccttggttctagggataatggcatgggccattcatcgccggaaccaacccggctcgagcccatggcggtccgccatgctcccgctcgctttgggattgttgctggctctggcgctggcaggatgtggcagtggaggtggcggaggtgggaccagcaacgttacgccgaccccgtctaaccccgtaacccccgttggaacctccacgctgacggtgacgggaactgccggcgcaggatcttctgccttgagccatagtgttgcacttatgctgacagtgagttaatctgaaaacataaggagaacttcttatgaagaggcttgctagcaacgctcggtgccttcttataattgccttcctggtgatcatgggactttttctggtggcctgcggcgcgggtggcagcaccaaattgccccccacttctccggctccgaccataaccagcgccgacagtgccgtgtttagcgtggggacggggggctcattcaccgtgaccaccacgggaactcccatcccgaccatcacggagaccggggcacccgcgacatttacctggcatgacaattccaacgggacaggcacgctgagtggcacgcccaccaccagcggtacgttctccgtgacgttcacggcttccaatggcgtcggcacatccgcggtccagaccttcacgctgatcgtggcccaagcaagcaacctgattctgcctattaccaacggtctcactctcgcgacggcaagttctcactgggttttagtcgacaattgtcaagtagctggcggtattgtgcctatgaaccaatttgccttcgaacttacttacagcgacgcaggattcaaggctaatttcatcgatcccaacggggctagccacacctccaccgggacctggacggctaatgctgactcgagcggtcttttaagtaccctcttagtcacgacggcgcaacccatcaccaatccgggcatgtaccccactagctggaccgttagtagcatggacagcgttacgggttcaactctttcgtctcagtccgcagccatagtgaactggtataccgctaacagcgctgcttttctaaccagccctggtatcgctggttccaccgagggttgtagctttacgcttgcaggcggcgggatctagccggcggcagtatcgaccgcgcttaacttcgagctctaggcactcggctttccgccctacaattcgggtgtgcgccgcgctttctccgttatgaggtgaatatgagacgaccccttctcgcgctatgggtggtgtgggtgttggcgggggttccccaaaaagtcgccgggcaggatttcgtgaccacggccatgtccgggctccctgcggagaccctgcgggtggagtattccagccctgccaagttgcgcgccatccctgattaccagaaccttaagagtagattcctggggccgcgcttgcagcagttggagtcggcgctcggccagatcggaatgagcgaggacgatatcgatgacttgctgacaggatggaaaccgggcgcgaaggaaatggatctttacggttatgcctccggacgctttgacaaggcgggggtggcgggccgggcggcggcgcagaacctcacgcccactccccttgccggagagcaggcctactgcctgcgagccggcttggcggctacgtgcgttgtcattctggaggattccctcggagcgttcgggccgctctcgtccgtgacggcgatgctggacgcgcacgccggacaggcgcccagcttgaataccgacccacatttcaccagcctgatcggcagcgttaacaagggcgcgcccatttggggaatcgccttggggggagccgtcggcgattggtttggcgcatggttgtcaaatcaaaacaacctgaagttggattggggacaggttttccagaaagtggattccttgacctattccattgaattgtcggacaaggtcaacatggatctgaaactcaactgcgccacagcgtcggacgcggccaccctgcggcaggtcttggatggcatcaaggtggcgcaacaggttgcctggcaattgcagaatcccggtcaagcgaacccctacaccgccatgaatgtcgacgcccatgaccagcagattagccttaaaatcaccatggattactcggcattggcgcttgcgggcggcggcaactctccgcagaattaagcgcccagccgcccatctgacccaactccccacaaaagacgaattgaaagtttccggtgatgccgttacaatataggattgctcttgaggcaaataaggagtcttatgaaggacaagattcacccgaactaccatgaggtcaatgtggtctgcgcgtgtggcaacgctttcaagacgcgctcgactttcaagagcgacctcctgcacctggacatctgctccaagtgccatcctttctttacgggcaagcagaagcttgtagacgccgccgggcgcgtggaacgcttccagcggaagtatgccggctttaagaaagctacgcctgcggcggtcggcacgaaggcttagtgggctgttgtggcgctgagcttgagctcaatatgtgccgacctgaaggtcagcgctacaggccaatgcgtcttccaggcgcaatactcgcagcagggcactaaacaaattggcttaacgggagccggatggcaacacctccacccctcgatccctacatcgacaagcccaaagtttatctgctgggacgccagcacgtcgccgacaacgaactggcgcgcttcctggcggatgaggggatggtgttctccaccgacgcccccgcggccgccgaggccctggcggaaatcgccgggcgtgtttgctacatgtcgtttggcaagggaagaaagagcaatcgcgagtacctggagaacatcctggtttccaaacacggcagcgtgctggagcacgccgtgtggtgcctgctcttcacgggcgtcagccgcgccctcacccatgaactggtgcgccaccgcgccggcttcggatattcgcaactttcccaacgctacgtggatgagagcgacgcgcgctacgtggtgccgccgctctatcaggagaatcccgagttgcgggcgaaatggcagcagaccatcgaatcgctgcgccaggcgtatgatgaactcgccgaagccacggcgcaatacgtgcagcagaagcatccggaaatggccccccgcgaccggcgcaagtgggcgcgccaggcagcccgctccattcttcccaatgccaccgaaaccaagattttcgtgacgggaaattcccgcgcctggcggcatttcctcgagctgcgcggcagcatccacgccgacacggaaatccgcttgctggcggttgaggttttccgcgtcttcaagaaggaatcgcccaatattttccaggatatcgagcttgtggatgagcccgatggcatgccctccgtccgcgtcactcactccaaagtctagcgaggcccgcccgtgagcttgcctacggaagaaccgcaatcctcgattccggcgttcgccagcctgctcggcggggcgatcctgacgtttctctttctgattgtggccatttcagaattcggctgggcactgggattgcccattcatgggttggtgttgcccgccgccctggtggggtcatgtggggtgaccgggtggggagcacgaatctacttccgccgccctttccgcgtgaccctggcgttggccgccctgctggtcttgctggtggctgcctccgcgggcatcagcggggcgttctacgatgtttcttttgacggccaggcataccaccaggaaggcgcttaccagcttgcccacgggtggaatccgctcttcacgcgccacatcagcccggtggctgtcttccaaaacgccatcttgaatcactaccccaaagggtcctggataatagcagcgtcgatgtatcttataacgggacgtatcgaaaccggcaagttcgccaacctgctccttatttgcgccgctttttgcatggcgctggcggccttcgccggctcgcgaaaaaagctgagtgcctggccggtggccgtggccttgctggtggcggcgaacccggtggcgctctgtcaactgtgcactttctatgtggatgggcaagtggcgtcgcttttcgtctgcctggcagctctttgttttctgatcgcttcccgtggcaatccctgggtgaactggttgctgtttgcggccgccgtcttgatcatacaggtcaagttcacgggtccggtgtatgccacgattctctttgccggattctttgctctcctggcctggcagaagcggccctggcggaagcctttatatgtggctttgctggccctggggctggggacggccgttttcgggatgaatccctacgtgttcaataccctggagaatggccacccgttctatccctttttcggaagaggagatcatgcgaatttcagcgtggcaaatgatactcctccgcggttcttccaagccaaccgggttgcgaacctcgcgtcgtcgattttctcgcgatcgagcgtctggccgccggagtccacgcccaaagctccgtggcaggttgcccgcggcgaatggatggaatttcaggagcccgatgtgcgcgccggagggttcggccctctcttccccgcagcgctggttttgtctttggtgttcctggcgattcgtttatggcggggtggcgccgtgccctgggtcgcaacggcaatcattctgataattattgcttcggtattacccgttcagccttgctggtgggcccgctatgccccgcaggtgtggttggtgcccctggtggcgctggcggctctcggcgggcccgttgagagaccgaacttgcatcgtctttcctggctggtgttgctcatcctcggtgtgaatgtggccgggatcgccgtggttaatttccgcgccaacctgagcgccactcgcgagaccgccgcaagtctggctgatctccgctcccacgttccctttcagatagccttcggcgatctccgctccaaccgctttcgccttcaggaagcggggatccccttcattgaaaatgagggacctctgaagtgtgatgcagaggtcaaagcaaactatgacctctgcatcgagcactagggcgtcaccatcatttcttcgccagtggcgctgaaatgagtgagagcaaatcaggcgcggcctgatcgcgttccaaatgtggataccgttcgccgccgtgataatccactcggaaagttttgtaatacacgcccgtcttgagcagcagctccagcggcgtggtggacgtggcggtctgctgcaccgcttcccgcagggttgtgggattgaattcgcgcccgtttacggcgatcaaattcatgcccggcgcaacgcctgcctgggcggagggtccgttcatggacacatccttgatggcgccgtttcccttcactctcaaaccgatggagtaactgaggtcgatggcgtctgcccactcctcggaagccttccacaaatcagatcgcgtgccgttgtaaacaagcttccagcccccgtcattgatgccgcccagaggcgcgtggcgagcggtggagcgcagacgcgtctgaaaaaatccggcccaatcgtaaggctgcacggcgttgagagcggcgatcaagtcgtcgaaattatagggcttcagcgcgggtgcgccacccgggccaccgtaaaacgcccggcaaaagtcgttgagggattttgccccctggctgaggcggcgaatggtgacgtcggcttccagccaaatcagcgaaccctcgggatagtagtccaccgaccgccgatagtctgtatattcgtccggcgcggcataaagaagttgcgcggcgacggcggtgtcctccaggggacgccaggtccggcccgactcgcggtcgagttgggcggcggtcatggcaagggaatcccgatagtcctccgggctccacaatccactgcgcgcggccagcacctcgccgagatagttggtcagcccctcgtatacccacagcagatcgcccttcatgggcgcatcgaacccacccgtggccagaccctccggacggcggtatttgccgttccaggaatgggtcatttcgtgcgggagcagcgagccatccactttcagcaagtcggggtcaatcaaggtgcgctcgtgatcgcgatcgtcgctcgattcgtgatgttcaatgccaatgcggatgatgtggtcgctgagggtcagtagaaaatgatagctgcgatagtgccgggagccgaacagcgcgccggtttccgccaccagatttttccaatgcgcaacggtgtccgggctcacctcgagggcgcgctcgctatcgccggcgaggtgaatgaaatgcgccaccccgccgtcattccccaggtcaaaagtgcggtagtgaatgccggtggaaaccggcgaatcgaccagcgtggtgagggagacgggttgaaactcaacctcattgccggattcccgtgccacgggcagcgccgttccatagcgccagccggcgggaactctgagcgttgcctgatactggatgcggtccggattggagccttgcggatacagcaccgtctggttccaattgagcaccgccaattcgctggtcacggaactgccgctggaagagaacagatcttcgtccacggccgagatgtaatcaaaggcaatgtcgagtgaactcgcgcccggcggcacgtccaggtggaaggcgaacatgttgacgttgtcgcgctgccagggaacgggctggccggcggccgtgaacttcaggcccaccaggttggtgatggggccaaccggcatatgctcgcccggaatccatttcggataaagcagggtgagcggaccggatttgaccggcattttcatttgcacgtgaaaaaggcggcgcggcgcgtcggtggcgtcaaccttcaacgcgaccgtagaatcctgagcaaagccgccggcaagaagcagcggcaagaggcaaagcgtgtagattcgcatgtgacctattgtacaccgttgtcgtaacgctgaccttcaggtcagcacgtgccgacctcaaggtcagcgccaggcctacttccttcccacgaaaagaaaatggtccgactggccgatgccctccggcgtctgtgcggttgcttccacaaggtccagccacagttcctgctctgccgcgggaaggtcgccgaagatgttctgccacgccgtggtaaaggactcaacgcccaggaacgccaccttctcgaattggccctggaagagcgcccggaattccgcggcggtggtcaagtgcgcgtagccgatgggcggcgcgtgctcagggtccagattcccgtcgcgcaggtattgctggtggaaggtcacgcgctcggaggcggctccaaacttcatacgcagcagatcgcgcaggtacgacaggcgattgatgcccgcggcgaaaagcgtgccacccggtttaagaattcgggctgactcctgcacgctgccctggcgttcagcgagggattgcaggtgatagagcggtcccatcaggagcgccaggtcgacgctcgcggagggcagcccttccagccgcgcgccggagaggtgatggcggccggcaatgcggtcatgcaagccggctttctgcagcttatctgcgactgcgtccagcaagcgcgcggagatgtccacaaggtgcaggcggcaccccaggcgcgccagaaattccgtgtaatggccgccccccacgccgatctccgcgacaacgtcccctggcttcgccacgcgcgcgagccagcggagcgttattcccagctccacggggcagtcttgcggcaaccgcgcgagttccgcctcgaaggccacgtcgtaatgcctcgccacgttcgattcttgctcattgaattgggccatagtagcgaaagtatacgccgggtccgccacgagttgtagcggcaaaccgccgagcagcggggcggctaaggggaatcagaaggcggaaagcaagcgtagtgcggacctgttctgtagctccgcggagttttgttgtcgatgggggacggaccgcagacccccgaaacaggcctgcgccgcccgttacaactttccctcttccagaaagccagagtatccggtccgggccttgcatttcccctgtgctgggtgtataccttcgtcacgtttatcctttgttagtatccagcggacggccggatcgccagcagcgcgacgggcctgccacccgccttttgcccaggcaaggaggaagccgtggactataacctgctcgatgaaaagtggattcccgttttgtggaaagatgggcgttgcgaccgcgtgggcataattgaggcgctgactcaagcgcaccgaatacgtcaaatcgccgccagcaatcccatggaccgcgtggcgattctgcgttttctcctcgcattgctttattggtgccaggggagcccgccggatggccaggacacggcttccttctttcccgcagattggttcaagaagctaggcgacaacagggactgtttcaaccttctgggcgacgggaagcggttctatcaacacattgccagtggaacagaggcaaaactctccgccgactatcttgtgcaagaggtgcccactggtaccaactcctggcacttccggcattcgacagacatgaaagacggattgtgcgcggattgctgcgccatgggtttgttgcgcctgccggtgtttgccacatcgggagggcgcggcaaaccgccgggtatcaaccaaaaaccgcccgtgtatgtcataccagttggcgcctcactcgctgagaccctgcgactttcctggcgaaagttatcgggcgcggacctggggacgcccgtatgggagaggccggatgcaaccctaccaaaacagggtactgttccacttctaatggggctaacgtggctgccgcgccgcgtgtggttggacaatccgcaagaacctcaggccatctgcgtatcctgcgggcgtaaagagcttctgatacgccgctgcgtgtttgctggcgttgggagcacaaagaccgacggagatggcaagggccgagtgtgggccgatccgcacactatcagtgacggcgaagatatcgttaagcccagcagtgcgcttgctcgcgcggacgcggcggctggccaatggacaaatattgctgcgggtattcttaatgccaagaaaggacatcccaaacgaagtctgtgggtcgtcgccttttcgacagttcaaaacgacaaatatatagaagcgatggaatgtgagattccctttccggacacgctggaaggggggaaggtccaagagagcctcgaaaacattgaaaggtggcagaaagaatgttggaagctcactcgcaaggcaacaccgagagaggcttctcgaaagcacgtcgagattcctcccattttcgatgctattcgtccgcacgtggaagcacgggtttcggggaaggcgggagagttgatctctgcttggggaggcgcatgggaagaggcagcccgcgaatatagtccgatgatggcggctgtcgccaaatcgctgtcacccggcgttacgaccgctgcgcttttgcggcggagacagcttggatacgtgaagcctgacatgcgggaaaagactgaagcggcggaaaagacccgccggaggaaaggaggatcaagtgacagcgacggagcaatacatccaagtcctggcacgcctgaaatctggtgaactcgggctcttacgccaacatgccgggcggaggcttgatcaatcggtagaggggtttgacctgtttgccggactgtggtggcctttgcgcgcgcaaaaccagcgcgcccctcgccgcggggtggcatggctggtcgccaagctttacgccttccagcccgtcgaacattcacgcggcccagccatcgcttatcagcttgggcgttgtcggaaagatcgggaccccgcaaaggatccggttacgcaacggttcgacaaattattgaccttacccattgagaaccttgagccttccttgcaatgggccattagccttctgtctcggaagagcctcaagttcgactgggcagagttaaccgatgatctctcgctatgggaacgcgaatcaaagcggatcaaatgggccgaggagtttctaaaaacttcgaaggaggatcgttatgctgattgaaattcatgccattcaaaatcacagcccagccaacctgaaccgggacgacttgggcgcgcccaaaacctgctatttcggcggggtcctgcgctcccgcatttccagtcagtgtctgaagcgcagcatccgcatgagcgaagggttcaaagagttgcttgggggtatccgcacccgcaaattggccgaaaagatttcggaaaaagtaaccgggaaacccgccgcgaaaaagcgggcagcgaagattctggaaaagtgcggcatcaagccgcgcagcgaagatgatgccaaaagtgacatgcttgtttatacgacgcaggaagcaattgtgaagatggccaaacttctccaggatggtgagggaaagaaggatgaggagttggcggaagaatttggcaagctgatcagtgaatccacctgcgtgcccgacatggcgctcagcggaaggatgctggaaaccggagtgctgaaagacacaacggtcgaggcggcgcttcaggttgcccacgcgatttccacccacgaggctcgtccggaggtggattacttcgtggcggccgatgacgtgcccggtgatgatgcgggtgcgggcttggtgggtgaagctatgtttggcgccgcctgcttctacaagtatttttccatcgatttcgagaccctgaagaagaacctcaagggcaaccaggtactcgccgcgcacacggtgggtgcattcattcgcggcgcggccctgtcaaatcccaccggcaagcagaacagcttcgccgcccacaatcctcccgatggaatcctggtggaaatcaggaacaatccgctcagctacgccaacgcctttgccaaaccagtgaccgacgaccaacgagacatcatctcccagagcatcgcgcaactcggccagtacgttcacgatatcgacaatggatacggcgggccgaagagccggttctggttctcgcccaatctccgctaccctttgacggcctccttcaaggaaaaggaaaacggaaaggaaaaagtccaggaggtcgcgcttacggataacaacataaggtcgctcaacgcgttaatccgggcggtcgtcaaggaaactggctatgactgggaggaggttcagaaggtggtggtgaattcggaggtggcatgatgagcgcaaacaccctgtttctccgtcttgaaggtccccttcaagcatggggcgatcagcaatcgaagtttgtcattcggcggacggctgaggccccgacgaagtctggtgtgatcgggatgctctgcgcggcattgggagtttcgcggcctgaggccgccgagagccgcctccgcgctctcggggcgttacgcatgggcgtgcgcattgatgttcctggagtccggtggtgggattatcacacagtaggcgccgggatgccgatgcggacggcggaaggcggaactaagcccggcgccatgctcacccggcgcgagtatctgtgtgatgcttcctttcttgtcgctcttcagggtgagctaggtctgattgctgaactggaaggggcaatcaaagcgcccaggtggacgctctacctcggcagaaagtcctgccctccttcgcgccctctactggatccgaagcattcgccccgtgaattcgacgacctcctttccgccctcaagtcggttccctggcgcaaacggttggagggagacgatctgccccaaagattggaatgcttgctcgactggcagccgacagaagaacagccggaggcccccgatgatgcgctcgtctggtacgacgtgccgctgaccttcgatccgccgtcgcaccagccccgatttgtcattcgcaagcacctgcgagtatggcccgacggtgaggtaaccacaggtccgccagcacagaacgagacgccagcgcctccccgtccgagagcggattacaccaacaccgagtacagaaatcgacgcaaggagcggctggacggcgattatcacctgtgcgtcttctgcaaggcgcccgccacgactgtccaacacatcacctatcgccacgcggggggtagtgaacacatcgaggagttgcgctccctctgccgttactgccatgacgccgtgaccatgatcgaatacggtctgggcatggggcttgaccggattaatcccgaggagccgcgctggcgcgatttgatccgcgaaaagcgagaggagattattaaattccgttctctcgaaacccggcgcagacatctcgttgccgaggaggtggaatagccatgttcctttcctgtctcctgattgacaccggcaccaatcctgaccgcccccgtcccgggcgcacgtggttgcgcaatctttatcatgttcaccaacgcctttgcatggcttttccgtctgcatccagaaaatccgatgacgcggatttcctcaaacctttcgacccaggggatttcggcaagggtcaggtgcacatagcgcgtgcggatgactccggttttctcttccgcatcgacccgggccccgccgggcgagccgtgattctggtgcaatcggcggtgaaacccgactgggattatgcctttcaaaatgccgggtttctgctggccgctcccgccgaagtaaaagtgtacgaaccgggttttgcggcgggccagaggcttcgcttccggttggcggcaaatcccacgcggaaactatcgcagcattctcgtgagcgggacggaaaaccggtggcggagaagtgggttggaaagcgggtgcccgtgcccgccgatcaactcctgccttggctggcggaatggcgggttcgcccggatgaaccgccggggttctgcatcgacaaggattccaccaccgttcacgcaggctacatttatgtgaataaggggcgggaggagggcgggcagcggctgcgctcggttcgctacgacggcattctggaggtaacggacgccgataaattccgcaatacgcttctgcgcggcatcgggccaggcaaagcctttggctttgggctgctttcggtggcgccctataccgggccagccgcagcaatctcgtaggggcggttcgcgaaccgcccctacgcccgtcgatcggggatcgacgcagcgtaacgccgccatcctggcggcaccggtgccggctggaagccggcgttacgagcagcacgcctgtggaggcaacgtgagaatccaagatctccacatactacccaagttcggcgacggatggagttatctgtacgtcgagcactgcggcgtcgatcaggaggaccgtgccattgcggtgcatgacaaaagcggcagggtgccggtcccctgcgccaatctcgctctcctgatgttgggtcctggcgtctcgatcactcacgccgccgtctccgtgctggcggaccatggctgtctggtggcgtggtgcggggaagagggagtgcgcttctacgccctgggcatgggcgaaacgcgcagcgccgccaatttcctgcatcaggcgcgggtgtgggcgcacaccggttaccgcatggaggtggtccgtcgcatgtaccagttgcggttttccgagaagttcgattccacgctcagcctccagcaaatccgcggcatggagggagtacgcgtgcgcgatagctatgcgcgcatcgccaaggagaccggcgtcacctggtccggccgaagttatcaacgagacgagtggagcaaggccgatccggtgaaccgggccttgtccaccgccaactcctgcctgtatgggatctgccatgccgccattgtctcggcgggcttttcacccgcgctgggattcatccataccggcaaaatgttgtctttcgtttatgacattgccgacctctataagacggaggtcaccgtccccattgcctttcgcgccgtcgcccaacccaaagggctgctggagcggcacgtgcgcctcacttgtcgcgaccaattcgtctccacgcgccttctggagaggattatccccgatatccagacggtcttgatgatgcccaagccgagggcgggcgccgctgccccctttgaccaggatgccgccgcccccggcttcctctgggaccctgcgcagggtgacgttcgtggagggcgcgtgcagcccttggaaattgacgattcggagcctgacgatggtggtcctgattcttgagcgcgtccccccgggattgcgcggcgagctaacaagatggttcctggaaccgcaggcgggagtctttgtcggccgcgtctccgccgccgtccgtgaacgcctttgggaaaaagcgtgttcccaagctcgcgatggagggtgccttattatccattcctcggacaatgagcaggggtataatgtccggacttggggtcggacggcacgctccatcgaagacttcgagggcctttttctggttcgagtgccgtagaatcaacaactttttcagtattgtccccacgcgcgtgggggtgaaccggccacttggcaatgtccatgtcgatatgggacattgtccccacgcgcgtgggggtgaaccgcggtggtcaggtatgacgatggctcatcttggattgtccccacgcgcgtgggggtgaaccgtactcgggttacaggaacacgcggcggcatccattgtccccacgcgcgtgggggtgaaccggccggcgcggcggaaacgttcgccttcgtctcattgtccccacgcgcgtgggggtgaaccgggttaaaacccgtccaggatatctctttatgtattgtccccacgcgcgtgggggtgaaccgat

SEQ ID NO: 961 - DNA, 103619 bp, Artificial Sequence
  Synthetic Oligonucleotide
  misc_feature (1)..(32520): n is a, c, g, or t
nnnnnnnnnnnnnnnnnnnnnnnnnnnnnnnnnnnnnnnnnnnnnnnnnnnnnnnnnnnnnnnnnnnnnnnnnnnnnnnnnnnnnnnnnnnnnnnnnnnnnnnnnnnnnnnnnnnnnnnnnnnnnnnnnnnnnnnnnnnnnnnnnnnnnnnnnnnnnnnnnnnnnnnnnnnnnnnnnnnnnnnnnnnnnnnnnnnnnnnnnnnnnnnnnnnnnnnnnnnnnnnnnnnnnnnnnnnnnnnnnnnnnnnnnnnnnnnnnnnnnnnnnnnnnnnnnnnnnnnnnnnnnnnnnnnnnnnnnnnnnnnnnnnnnnnnnnnnnnnnnnnnnnnnnnnnnnnnnnnnnnnnnnnnnnnnnnnnnnnnnnnnnnnnnnnnnnnnnnnnnnnnnnnnnnnnnnnnnnnnnnnnnnnnnnnnnnnnnnnnnnnnnnnnnnnnnnnnnnnnnnnnnnnnnnnnnnnnnnnnnnnnnnnnnnnnnnnnnnnnnnnnnnnnnnnnnnnnnnnnnnnnnnnnnnnnnnnnnnnnnnnnnnnnnnnnnnnnnnnnnnnnnnnnnnnnnnnnnnnnnnnnnnnnnnnnnnnnnnnnnnnnnnnnnnnnnnnnnnnnnnnnnnnnnnnnnnnnnnnnnnnnnnnnnnnnnnnnnnnnnnnnnnnnnnnnnnnnnnnnnnnnnnnnnnnnnnnnnnnnnnnnnnnnnnnnnnnnnnnnnnnnnnnnnnnnnnnnnnnnnnnnnnnnnnnnnnnnnnnnnnnnnnnnnnnnnnnnnnnnnnnnnnnnnnnnnnnnnnnnnnnnnnnnnnnnnnnnnnnnnnnnnnnnnnnnnnnnnnnnnnnnnnnnnnnnnnnnnnnnnnnnnnnnnnnnnnnnnnnnnnnnnnnnnnnnnnnnnnnnnnnnnnnnnnnnnnnnnnnnnnnnnnnnnnnnnnnnnnnnnnnnnnnnnnnnnnnnnnnnnnnnnnnnnnnnnnnnnnnnnnnnnnnnnnnnnnnnnnnnnnnnnnnnnnnnnnnnnnnnnnnnnnnnnnnnnnnnnnnnnnnnnnnnnnnnnnnnnnnnnnnnnnnnnnnnnnnnnnnnnnnnnnnnnnnnnnnnnnnnnnnnnnnnnnnnnnnnnnnnnnnnnnnnnnnnnnnnnnnnnnnnnnnnnnnnnnnnnnnnnnnnnnnnnnnnnnnnnnnnnnnnnnnnnnnnnnnnnnnnnnnnnnnnnnnnnnnnnnnnnnnnnnnnnnnnnnnnnnnnnnnnnnnnnnnnnnnnnnnnnnnnnnnnnnnnnnnnnnnnnnnnnnnnnnnnnnnnnnnnnnnnnnnnnnnnnnnnnnnnnnnnnnnnnnnnnnnnnnnnnnnnnnnnnnnnnnnnnnnnnnnnnnnnnnnnnnnnnnnnnnnnnnnnnnnnnnnnnnnnnnnnnnnnnnnnnnnnnnnnnnnnnnnnnnnnnnnnnnnnnnnnnnnnnnnnnnnnnnnnnnnnnnnnnnnnnnnnnnnnnnnnnnnnnnnnnnnnnnnnnnnnnnnnnnnnnnnnnnnnnnnnnnnnnnnnnnnnnnnnnnnnnnnnnnnnnnnnnnnnnnnnnnnnnnnnnnnnnnnnnnnnnnnnnnnnnnnnnnnnnnnnnnnnnnnnnnnnnnnnnnnnnnnnnnnnnnnnnnnnnnnnnnnnnnnnnnnnnnnnnnnnnnnnnnnnnnnnnnnnnnnnnnnnnnnnnnnnnnnnnnnnnnnnnnnnnnnnnnnnnnnnnnnnnnnnnnnnnnnnnnnnnnnnnnnnnnnnnnnnnnnnnnnnnnnnnnnnnnnnnnnnnnnnnnnnnnnnnnnnnnnnnnnnnnnnnnnnnnnnnnnnnnnnnnnnnnnnnnnnnnnnnnnnnnnnnnnnnnnnnnnnnnnnnnnnnnnnnnnnnnnnnnnnnnnnnnnnnnnnnnnnnnnnnnnnnnnnnnnnnnnnnnnnnnnnnnnnnnnnnnnnnnnnnnnnnnnnnnnnnnnnnnnnnnnnnnnnnnnnnnnnnnnnnnnnnnnnnnnnnnnnnnnnnnnnnnnnnnnnnnnnnnnnnnnnnnnnnnnnnnnnnnnnnnnnnnnnnnnnnnnnnnnnnnnnnnnnnnnnnnnnnnnnnnnnnnnnnnnnnnnnnnnnnnnnnnnnnnnnnnnnnnnnnnnnnnnnnnnnnnnnnnnnnnnnnnnnnnnnnnnnnnnnnnnnnnnnnnnnnnnnnnnnnnnnnnnnnnnnnnnnnnnnnnnnnnnnnnnnnnnnnnnnnnnnnnnnnnnnnnnnnnnnnnnnnnnnnnnnnnnnnnnnnnnnnnnnnnnnnnnnnnnnnnnnnnnnnnnnnnnnnnnnnnnnnnnnnnnnnnnnnnnnnnnnnnnnnnnnnnnnnnnnnnnnnnnnnnnnnnnnnnnnnnnnnnnnnnnnnnnnnnnnnnnnnnnnnnnnnnnnnnnnnnnnnnnnnnnnnnnnnnnnnnnnnnnnnnnnnnnnnnnnnnnnnnnnnnnnnnnnnnnnnnnnnnnnnnnnnnnnnnnnnnnnnnnnnnnnnnnnnnnnnnnnnnnnnnnnnnnnnnnnnnnnnnnnnnnnnnnnnnnnnnnnnnnnnnnnnnnnnnnnnnnnnnnnnnnnnnnnnnnnnnnnnnnnnnnnnnnnnnnnnnnnnnnnnnnnnnnnnnnnnnnnnnnnnnnnnnnnnnnnnnnnnnnnnnnnnnnnnnnnnnnnnnnnnnnnnnnnnnnnnnnnnnnnnnnnnnnnnnnnnnnnnnnnnnnnnnnnnnnnnnnnnnnnnnnnnnnnnnnnnnnnnnnnnnnnnnnnnnnnnnnnnnnnnnnnnnnnnnnnnnnnnnnnnnnnnnnnnnnnnnnnnnnnnnnnnnnnnnnnnnnnnnnnnnnnnnnnnnnnnnnnnnnnnnnnnnnnnnnnnnnnnnnnnnnnnnnnnnnnnnnnnnnnnnnnnnnnnnnnnnnnnnnnnnnnnnnnnnnnnnnnnnnnnnnnnnnnnnnnnnnnnnnnnnnnnnnnnnnnnnnnnnnnnnnnnnnnnnnnnnnnnnnnnnnnnnnnnnnnnnnnnnnnnnnnnnnnnnnnnnnnnnnnnnnnnnnnnnnnnnnnnnnnnnnnnnnnnnnnnnnnnnnnnnnnnnnnnnnnnnnnnnnnnnnnnnnnnnnnnnnnnnnnnnnnnnnnnnnnnnnnnnnnnnnnnnnnnnnnnnnnnnnnnnnnnnnnnnnnnnnnnnnnnnnnnnnnnnnnnnnnnnnnnnnnnnnnnnnnnnnnnnnnnnnnnnnnnnnnnnnnnnnnnnnnnnnnnnnnnnnnnnnnnnnnnnnnnnnnnnnnnnnnnnnnnnnnnnnnnnnnnnnnnnnnnnnnnnnnnnnnnnnnnnnnnnnnnnnnnnnnnnnnnnnnnnnnnnnnnnnnnnnnnnnnnnnnnnnnnnnnnnnnnnnnnnnnnnnnnnnnnnnnnnnnnnnnnnnnnnnnnnnnnnnnnnnnnnnnnnnnnnnnnnnnnnnnnnnnnnnnnnnnnnnnnnnnnnnnnnnnnnnnnnnnnnnnnnnnnnnnnnnnnnnnnnnnnnnnnnnnnnnnnnnnnnnnnnnnnnnnnnnnnnnnnnnnnnnnnnnnnnnnnnnnnnnnnnnnnnnnnnnnnnnnnnnnnnnnnnnnnnnnnnnnnnnnnnnnnnnnnnnnnnnnnnnnnnnnnnnnnnnnnnnnnnnnnnnnnnnnnnnnnnnnnnnnnnnnnnnnnnnnnnnnnnnnnnnnnnnnnnnnnnnnnnnnnnnnnnnnnnnnnnnnnnnnnnnnnnnnnnnnnnnnnnnnnnnnnnnnnnnnnnnnnnnnnnnnnnnnnnnnnnnnnnnnnnnnnnnnnnnnnnnnnnnnnnnnnnnnnnnnnnnnnnnnnnnnnnnnnnnnnnnnnnnnnnnnnnnnnnnnnnnnnnnnnnnnnnnnnnnnnnnnnnnnnnnnnnnnnnnnnnnnnnnnnnnnnnnnnnnnnnnnnnnnnnnnnnnnnnnnnnnnnnnnnnnnnnnnnnnnnnnnnnnnnnnnnnnnnnnnnnnnnnnnnnnnnnnnnnnnnnnnnnnnnnnnnnnnnnnnnnnnnnnnnnnnnnnnnnnnnnnnnnnnnnnnnnnnnnnnnnnnnnnnnnnnnnnnnnnnnnnnnnnnnnnnnnnnnnnnnnnnnnnnnnnnnnnnnnnnnnnnnnnnnnnnnnnnnnnnnnnnnnnnnnnnnnnnnnnnnnnnnnnnnnnnnnnnnnnnnnnnnnnnnnnnnnnnnnnnnnnnnnnnnnnnnnnnnnnnnnnnnnnnnnnnnnnnnnnnnnnnnnnnnnnnnnnnnnnnnnnnnnnnnnnnnnnnnnnnnnnnnnnnnnnnnnnnnnnnnnnnnnnnnnnnnnnnnnnnnnnnnnnnnnnnnnnnnnnnnnnnnnnnnnnnnnnnnnnnnnnnnnnnnnnnnnnnnnnnnnnnnnnnnnnnnnnnnnnnnnnnnnnnnnnnnnnnnnnnnnnnnnnnnnnnnnnnnnnnnnnnnnnnnnnnnnnnnnnnnnnnnnnnnnnnnnnnnnnnnnnnnnnnnnnnnnnnnnnnnnnnnnnnnnnnnnnnnnnnnnnnnnnnnnnnnnnnnnnnnnnnnnnnnnnnnnnnnnnnnnnnnnnnnnnnnnnnnnnnnnnnnnnnnnnnnnnnnnnnnnnnnnnnnnnnnnnnnnnnnnnnnnnnnnnnnnnnnnnnnnnnnnnnnnnnnnnnnnnnnnnnnnnnnnnnnnnnnnnnnnnnnnnnnnnnnnnnnnnnnnnnnnnnnnnnnnnnnnnnnnnnnnnnnnnnnnnnnnnnnnnnnnnnnnnnnnnnnnnnnnnnnnnnnnnnnnnnnnnnnnnnnnnnnnnnnnnnnnnnnnnnnnnnnnnnnnnnnnnnnnnnnnnnnnnnnnnnnnnnnnnnnnnnnnnnnnnnnnnnnnnnnnnnnnnnnnnnnnnnnnnnnnnnnnnnnnnnnnnnnnnnnnnnnnnnnnnnnnnnnnnnnnnnnnnnnnnnnnnnnnnnnnnnnnnnnnnnnnnnnnnnnnnnnnnnnnnnnnnnnnnnnnnnnnnnnnnnnnnnnnnnnnnnnnnnnnnnnnnnnnnnnnnnnnnnnnnnnnnnnnnnnnnnnnnnnnnnnnnnnnnnnnnnnnnnnnnnnnnnnnnnnnnnnnnnnnnnnnnnnnnnnnnnnnnnnnnnnnnnnnnnnnnnnnnnnnnnnnnnnnnnnnnnnnnnnnnnnnnnnnnnnnnnnnnnnnnnnnnnnnnnnnnnnnnnnnnnnnnnnnnnnnnnnnnnnnnnnnnnnnnnnnnnnnnnnnnnnnnnnnnnnnnnnnnnnnnnnnnnnnnnnnnnnnnnnnnnnnnnnnnnnnnnnnnnnnnnnnnnnnnnnnnnnnnnnnnnnnnnnnnnnnnnnnnnnnnnnnnnnnnnnnnnnnnnnnnnnnnnnnnnnnnnnnnnnnnnnnnnnnnnnnnnnnnnnnnnnnnnnnnnnnnnnnnnnnnnnnnnnnnnnnnnnnnnnnnnnnnnnnnnnnnnnnnnnnnnnnnnnnnnnnnnnnnnnnnnnnnnnnnnnnnnnnnnnnnnnnnnnnnnnnnnnnnnnnnnnnnnnnnnnnnnnnnnnnnnnnnnnnnnnnnnnnnnnnnnnnnnnnnnnnnnnnnnnnnnnnnnnnnnnnnnnnnnnnnnnnnnnnnnnnnnnnnnnnnnnnnnnnnnnnnnnnnnnnnnnnnnnnnnnnnnnnnnnnnnnnnnnnnnnnnnnnnnnnnnnnnnnnnnnnnnnnnnnnnnnnnnnnnnnnnnnnnnnnnnnnnnnnnnnnnnnnnnnnnnnnnnnnnnnnnnnnnnnnnnnnnnnnnnnnnnnnnnnnnnnnnnnnnnnnnnnnnnnnnnnnnnnnnnnnnnnnnnnnnnnnnnnnnnnnnnnnnnnnnnnnnnnnnnnnnnnnnnnnnnnnnnnnnnnnnnnnnnnnnnnnnnnnnnnnnnnnnnnnnnnnnnnnnnnnnnnnnnnnnnnnnnnnnnnnnnnnnnnnnnnnnnnnnnnnnnnnnnnnnnnnnnnnnnnnnnnnnnnnnnnnnnnnnnnnnnnnnnnnnnnnnnnnnnnnnnnnnnnnnnnnnnnnnnnnnnnnnnnnnnnnnnnnnnnnnnnnnnnnnnnnnnnnnnnnnnnnnnnnnnnnnnnnnnnnnnnnnnnnnnnnnnnnnnnnnnnnnnnnnnnnnnnnnnnnnnnnnnnnnnnnnnnnnnnnnnnnnnnnnnnnnnnnnnnnnnnnnnnnnnnnnnnnnnnnnnnnnnnnnnnnnnnnnnnnnnnnnnnnnnnnnnnnnnnnnnnnnnnnnnnnnnnnnnnnnnnnnnnnnnnnnnnnnnnnnnnnnnnnnnnnnnnnnnnnnnnnnnnnnnnnnnnnnnnnnnnnnnnnnnnnnnnnnnnnnnnnnnnnnnnnnnnnnnnnnnnnnnnnnnnnnnnnnnnnnnnnnnnnnnnnnnnnnnnnnnnnnnnnnnnnnnnnnnnnnnnnnnnnnnnnnnnnnnnnnnnnnnnnnnnnnnnnnnnnnnnnnnnnnnnnnnnnnnnnnnnnnnnnnnnnnnnnnnnnnnnnnnnnnnnnnnnnnnnnnnnnnnnnnnnnnnnnnnnnnnnnnnnnnnnnnnnnnnnnnnnnnnnnnnnnnnnnnnnnnnnnnnnnnnnnnnnnnnnnnnnnnnnnnnnnnnnnnnnnnnnnnnnnnnnnnnnnnnnnnnnnnnnnnnnnnnnnnnnnnnnnnnnnnnnnnnnnnnnnnnnnnnnnnnnnnnnnnnnnnnnnnnnnnnnnnnnnnnnnnnnnnnnnnnnnnnnnnnnnnnnnnnnnnnnnnnnnnnnnnnnnnnnnnnnnnnnnnnnnnnnnnnnnnnnnnnnnnnnnnnnnnnnnnnnnnnnnnnnnnnnnnnnnnnnnnnnnnnnnnnnnnnnnnnnnnnnnnnnnnnnnnnnnnnnnnnnnnnnnnnnnnnnnnnnnnnnnnnnnnnnnnnnnnnnnnnnnnnnnnnnnnnnnnnnnnnnnnnnnnnnnnnnnnnnnnnnnnnnnnnnnnnnnnnnnnnnnnnnnnnnnnnnnnnnnnnnnnnnnnnnnnnnnnnnnnnnnnnnnnnnnnnnnnnnnnnnnnnnnnnnnnnnnnnnnnnnnnnnnnnnnnnnnnnnnnnnnnnnnnnnnnnnnnnnnnnnnnnnnnnnnnnnnnnnnnnnnnnnnnnnnnnnnnnnnnnnnnnnnnnnnnnnnnnnnnnnnnnnnnnnnnnnnnnnnnnnnnnnnnnnnnnnnnnnnnnnnnnnnnnnnnnnnnnnnnnnnnnnnnnnnnnnnnnnnnnnnnnnnnnnnnnnnnnnnnnnnnnnnnnnnnnnnnnnnnnnnnnnnnnnnnnnnnnnnnnnnnnnnnnnnnnnnnnnnnnnnnnnnnnnnnnnnnnnnnnnnnnnnnnnnnnnnnnnnnnnnnnnnnnnnnnnnnnnnnnnnnnnnnnnnnnnnnnnnnnnnnnnnnnnnnnnnnnnnnnnnnnnnnnnnnnnnnnnnnnnnnnnnnnnnnnnnnnnnnnnnnnnnnnnnnnnnnnnnnnnnnnnnnnnnnnnnnnnnnnnnnnnnnnnnnnnnnnnnnnnnnnnnnnnnnnnnnnnnnnnnnnnnnnnnnnnnnnnnnnnnnnnnnnnnnnnnnnnnnnnnnnnnnnnnnnnnnnnnnnnnnnnnnnnnnnnnnnnnnnnnnnnnnnnnnnnnnnnnnnnnnnnnnnnnnnnnnnnnnnnnnnnnnnnnnnnnnnnnnnnnnnnnnnnnnnnnnnnnnnnnnnnnnnnnnnnnnnnnnnnnnnnnnnnnnnnnnnnnnnnnnnnnnnnnnnnnnnnnnnnnnnnnnnnnnnnnnnnnnnnnnnnnnnnnnnnnnnnnnnnnnnnnnnnnnnnnnnnnnnnnnnnnnnnnnnnnnnnnnnnnnnnnnnnnnnnnnnnnnnnnnnnnnnnnnnnnnnnnnnnnnnnnnnnnnnnnnnnnnnnnnnnnnnnnnnnnnnnnnnnnnnnnnnnnnnnnnnnnnnnnnnnnnnnnnnnnnnnnnnnnnnnnnnnnnnnnnnnnnnnnnnnnnnnnnnnnnnnnnnnnnnnnnnnnnnnnnnnnnnnnnnnnnnnnnnnnnnnnnnnnnnnnnnnnnnnnnnnnnnnnnnnnnnnnnnnnnnnnnnnnnnnnnnnnnnnnnnnnnnnnnnnnnnnnnnnnnnnnnnnnnnnnnnnnnnnnnnnnnnnnnnnnnnnnnnnnnnnnnnnnnnnnnnnnnnnnnnnnnnnnnnnnnnnnnnnnnnnnnnnnnnnnnnnnnnnnnnnnnnnnnnnnnnnnnnnnnnnnnnnnnnnnnnnnnnnnnnnnnnnnnnnnnnnnnnnnnnnnnnnnnnnnnnnnnnnnnnnnnnnnnnnnnnnnnnnnnnnnnnnnnnnnnnnnnnnnnnnnnnnnnnnnnnnnnnnnnnnnnnnnnnnnnnnnnnnnnnnnnnnnnnnnnnnnnnnnnnnnnnnnnnnnnnnnnnnnnnnnnnnnnnnnnnnnnnnnnnnnnnnnnnnnnnnnnnnnnnnnnnnnnnnnnnnnnnnnnnnnnnnnnnnnnnnnnnnnnnnnnnnnnnnnnnnnnnnnnnnnnnnnnnnnnnnnnnnnnnnnnnnnnnnnnnnnnnnnnnnnnnnnnnnnnnnnnnnnnnnnnnnnnnnnnnnnnnnnnnnnnnnnnnnnnnnnnnnnnnnnnnnnnnnnnnnnnnnnnnnnnnnnnnnnnnnnnnnnnnnnnnnnnnnnnnnnnnnnnnnnnnnnnnnnnnnnnnnnnnnnnnnnnnnnnnnnnnnnnnnnnnnnnnnnnnnnnnnnnnnnnnnnnnnnnnnnnnnnnnnnnnnnnnnnnnnnnnnnnnnnnnnnnnnnnnnnnnnnnnnnnnnnnnnnnnnnnnnnnnnnnnnnnnnnnnnnnnnnnnnnnnnnnnnnnnnnnnnnnnnnnnnnnnnnnnnnnnnnnnnnnnnnnnnnnnnnnnnnnnnnnnnnnnnnnnnnnnnnnnnnnnnnnnnnnnnnnnnnnnnnnnnnnnnnnnnnnnnnnnnnnnnnnnnnnnnnnnnnnnnnnnnnnnnnnnnnnnnnnnnnnnnnnnnnnnnnnnnnnnnnnnnnnnnnnnnnnnnnnnnnnnnnnnnnnnnnnnnnnnnnnnnnnnnnnnnnnnnnnnnnnnnnnnnnnnnnnnnnnnnnnnnnnnnnnnnnnnnnnnnnnnnnnnnnnnnnnnnnnnnnnnnnnnnnnnnnnnnnnnnnnnnnnnnnnnnnnnnnnnnnnnnnnnnnnnnnnnnnnnnnnnnnnnnnnnnnnnnnnnnnnnnnnnnnnnnnnnnnnnnnnnnnnnnnnnnnnnnnnnnnnnnnnnnnnnnnnnnnnnnnnnnnnnnnnnnnnnnnnnnnnnnnnnnnnnnnnnnnnnnnnnnnnnnnnnnnnnnnnnnnnnnnnnnnnnnnnnnnnnnnnnnnnnnnnnnnnnnnnnnnnnnnnnnnnnnnnnnnnnnnnnnnnnnnnnnnnnnnnnnnnnnnnnnnnnnnnnnnnnnnnnnnnnnnnnnnnnnnnnnnnnnnnnnnnnnnnnnnnnnnnnnnnnnnnnnnnnnnnnnnnnnnnnnnnnnnnnnnnnnnnnnnnnnnnnnnnnnnnnnnnnnnnnnnnnnnnnnnnnnnnnnnnnnnnnnnnnnnnnnnnnnnnnnnnnnnnnnnnnnnnnnnnnnnnnnnnnnnnnnnnnnnnnnnnnnnnnnnnnnnnnnnnnnnnnnnnnnnnnnnnnnnnnnnnnnnnnnnnnnnnnnnnnnnnnnnnnnnnnnnnnnnnnnnnnnnnnnnnnnnnnnnnnnnnnnnnnnnnnnnnnnnnnnnnnnnnnnnnnnnnnnnnnnnnnnnnnnnnnnnnnnnnnnnnnnnnnnnnnnnnnnnnnnnnnnnnnnnnnnnnnnnnnnnnnnnnnnnnnnnnnnnnnnnnnnnnnnnnnnnnnnnnnnnnnnnnnnnnnnnnnnnnnnnnnnnnnnnnnnnnnnnnnnnnnnnnnnnnnnnnnnnnnnnnnnnnnnnnnnnnnnnnnnnnnnnnnnnnnnnnnnnnnnnnnnnnnnnnnnnnnnnnnnnnnnnnnnnnnnnnnnnnnnnnnnnnnnnnnnnnnnnnnnnnnnnnnnnnnnnnnnnnnnnnnnnnnnnnnnnnnnnnnnnnnnnnnnnnnnnnnnnnnnnnnnnnnnnnnnnnnnnnnnnnnnnnnnnnnnnnnnnnnnnnnnnnnnnnnnnnnnnnnnnnnnnnnnnnnnnnnnnnnnnnnnnnnnnnnnnnnnnnnnnnnnnnnnnnnnnnnnnnnnnnnnnnnnnnnnnnnnnnnnnnnnnnnnnnnnnnnnnnnnnnnnnnnnnnnnnnnnnnnnnnnnnnnnnnnnnnnnnnnnnnnnnnnnnnnnnnnnnnnnnnnnnnnnnnnnnnnnnnnnnnnnnnnnnnnnnnnnnnnnnnnnnnnnnnnnnnnnnnnnnnnnnnnnnnnnnnnnnnnnnnnnnnnnnnnnnnnnnnnnnnnnnnnnnnnnnnnnnnnnnnnnnnnnnnnnnnnnnnnnnnnnnnnnnnnnnnnnnnnnnnnnnnnnnnnnnnnnnnnnnnnnnnnnnnnnnnnnnnnnnnnnnnnnnnnnnnnnnnnnnnnnnnnnnnnnnnnnnnnnnnnnnnnnnnnnnnnnnnnnnnnnnnnnnnnnnnnnnnnnnnnnnnnnnnnnnnnnnnnnnnnnnnnnnnnnnnnnnnnnnnnnnnnnnnnnnnnnnnnnnnnnnnnnnnnnnnnnnnnnnnnnnnnnnnnnnnnnnnnnnnnnnnnnnnnnnnnnnnnnnnnnnnnnnnnnnnnnnnnnnnnnnnnnnnnnnnnnnnnnnnnnnnnnnnnnnnnnnnnnnnnnnnnnnnnnnnnnnnnnnnnnnnnnnnnnnnnnnnnnnnnnnnnnnnnnnnnnnnnnnnnnnnnnnnnnnnnnnnnnnnnnnnnnnnnnnnnnnnnnnnnnnnnnnnnnnnnnnnnnnnnnnnnnnnnnnnnnnnnnnnnnnnnnnnnnnnnnnnnnnnnnnnnnnnnnnnnnnnnnnnnnnnnnnnnnnnnnnnnnnnnnnnnnnnnnnnnnnnnnnnnnnnnnnnnnnnnnnnnnnnnnnnnnnnnnnnnnnnnnnnnnnnnnnnnnnnnnnnnnnnnnnnnnnnnnnnnnnnnnnnnnnnnnnnnnnnnnnnnnnnnnnnnnnnnnnnnnnnnnnnnnnnnnnnnnnnnnnnnnnnnnnnnnnnnnnnnnnnnnnnnnnnnnnnnnnnnnnnnnnnnnnnnnnnnnnnnnnnnnnnnnnnnnnnnnnnnnnnnnnnnnnnnnnnnnnnnnnnnnnnnnnnnnnnnnnnnnnnnnnnnnnnnnnnnnnnnnnnnnnnnnnnnnnnnnnnnnnnnnnnnnnnnnnnnnnnnnnnnnnnnnnnnnnnnnnnnnnnnnnnnnnnnnnnnnnnnnnnnnnnnnnnnnnnnnnnnnnnnnnnnnnnnnnnnnnnnnnnnnnnnnnnnnnnnnnnnnnnnnnnnnnnnnnnnnnnnnnnnnnnnnnnnnnnnnnnnnnnnnnnnnnnnnnnnnnnnnnnnnnnnnnnnnnnnnnnnnnnnnnnnnnnnnnnnnnnnnnnnnnnnnnnnnnnnnnnnnnnnnnnnnnnnnnnnnnnnnnnnnnnnnnnnnnnnnnnnnnnnnnnnnnnnnnnnnnnnnnnnnnnnnnnnnnnnnnnnnnnnnnnnnnnnnnnnnnnnnnnnnnnnnnnnnnnnnnnnnnnnnnnnnnnnnnnnnnnnnnnnnnnnnnnnnnnnnnnnnnnnnnnnnnnnnnnnnnnnnnnnnnnnnnnnnnnnnnnnnnnnnnnnnnnnnnnnnnnnnnnnnnnnnnnnnnnnnnnnnnnnnnnnnnnnnnnnnnnnnnnnnnnnnnnnnnnnnnnnnnnnnnnnnnnnnnnnnnnnnnnnnnnnnnnnnnnnnnnnnnnnnnnnnnnnnnnnnnnnnnnnnnnnnnnnnnnnnnnnnnnnnnnnnnnnnnnnnnnnnnnnnnnnnnnnnnnnnnnnnnnnnnnnnnnnnnnnnnnnnnnnnnnnnnnnnnnnnnnnnnnnnnnnnnnnnnnnnnnnnnnnnnnnnnnnnnnnnnnnnnnnnnnnnnnnnnnnnnnnnnnnnnnnnnnnnnnnnnnnnnnnnnnnnnnnnnnnnnnnnnnnnnnnnnnnnnnnnnnnnnnnnnnnnnnnnnnnnnnnnnnnnnnnnnnnnnnnnnnnnnnnnnnnnnnnnnnnnnnnnnnnnnnnnnnnnnnnnnnnnnnnnnnnnnnnnnnnnnnnnnnnnnnnnnnnnnnnnnnnnnnnnnnnnnnnnnnnnnnnnnnnnnnnnnnnnnnnnnnnnnnnnnnnnnnnnnnnnnnnnnnnnnnnnnnnnnnnnnnnnnnnnnnnnnnnnnnnnnnnnnnnnnnnnnnnnnnnnnnnnnnnnnnnnnnnnnnnnnnnnnnnnnnnnnnnnnnnnnnnnnnnnnnnnnnnnnnnnnnnnnnnnnnnnnnnnnnnnnnnnnnnnnnnnnnnnnnnnnnnnnnnnnnnnnnnnnnnnnnnnnnnnnnnnnnnnnnnnnnnnnnnnnnnnnnnnnnnnnnnnnnnnnnnnnnnnnnnnnnnnnnnnnnnnnnnnnnnnnnnnnnnnnnnnnnnnnnnnnnnnnnnnnnnnnnnnnnnnnnnnnnnnnnnnnnnnnnnnnnnnnnnnnnnnnnnnnnnnnnnnnnnnnnnnnnnnnnnnnnnnnnnnnnnnnnnnnnnnnnnnnnnnnnnnnnnnnnnnnnnnnnnnnnnnnnnnnnnnnnnnnnnnnnnnnnnnnnnnnnnnnnnnnnnnnnnnnnnnnnnnnnnnnnnnnnnnnnnnnnnnnnnnnnnnnnnnnnnnnnnnnnnnnnnnnnnnnnnnnnnnnnnnnnnnnnnnnnnnnnnnnnnnnnnnnnnnnnnnnnnnnnnnnnnnnnnnnnnnnnnnnnnnnnnnnnnnnnnnnnnnnnnnnnnnnnnnnnnnnnnnnnnnnnnnnnnnnnnnnnnnnnnnnnnnnnnnnnnnnnnnnnnnnnnnnnnnnnnnnnnnnnnnnnnnnnnnnnnnnnnnnnnnnnnnnnnnnnnnnnnnnnnnnnnnnnnnnnnnnnnnnnnnnnnnnnnnnnnnnnnnnnnnnnnnnnnnnnnnnnnnnnnnnnnnnnnnnnnnnnnnnnnnnnnnnnnnnnnnnnnnnnnnnnnnnnnnnnnnnnnnnnnnnnnnnnnnnnnnnnnnnnnnnnnnnnnnnnnnnnnnnnnnnnnnnnnnnnnnnnnnnnnnnnnnnnnnnnnnnnnnnnnnnnnnnnnnnnnnnnnnnnnnnnnnnnnnnnnnnnnnnnnnnnnnnnnnnnnnnnnnnnnnnnnnnnnnnnnnnnnnnnnnnnnnnnnnnnnnnnnnnnnnnnnnnnnnnnnnnnnnnnnnnnnnnnnnnnnnnnnnnnnnnnnnnnnnnnnnnnnnnnnnnnnnnnnnnnnnnnnnnnnnnnnnnnnnnnnnnnnnnnnnnnnnnnnnnnnnnnnnnnnnnnnnnnnnnnnnnnnnnnnnnnnnnnnnnnnnnnnnnnnnnnnnnnnnnnnnnnnnnnnnnnnnnnnnnnnnnnnnnnnnnnnnnnnnnnnnnnnnnnnnnnnnnnnnnnnnnnnnnnnnnnnnnnnnnnnnnnnnnnnnnnnnnnnnnnnnnnnnnnnnnnnnnnnnnnnnnnnnnnnnnnnnnnnnnnnnnnnnnnnnnnnnnnnnnnnnnnnnnnnnnnnnnnnnnnnnnnnnnnnnnnnnnnnnnnnnnnnnnnnnnnnnnnnnnnnnnnnnnnnnnnnnnnnnnnnnnnnnnnnnnnnnnnnnnnnnnnnnnnnnnnnnnnnnnnnnnnnnnnnnnnnnnnnnnnnnnnnnnnnnnnnnnnnnnnnnnnnnnnnnnnnnnnnnnnnnnnnnnnnnnnnnnnnnnnnnnnnnnnnnnnnnnnnnnnnnnnnnnnnnnnnnnnnnnnnnnnnnnnnnnnnnnnnnnnnnnnnnnnnnnnnnnnnnnnnnnnnnnnnnnnnnnnnnnnnnnnnnnnnnnnnnnnnnnnnnnnnnnnnnnnnnnnnnnnnnnnnnnnnnnnnnnnnnnnnnnnnnnnnnnnnnnnnnnnnnnnnnnnnnnnnnnnnnnnnnnnnnnnnnnnnnnnnnnnnnnnnnnnnnnnnnnnnnnnnnnnnnnnnnnnnnnnnnnnnnnnnnnnnnnnnnnnnnnnnnnnnnnnnnnnnnnnnnnnnnnnnnnnnnnnnnnnnnnnnnnnnnnnnnnnnnnnnnnnnnnnnnnnnnnnnnnnnnnnnnnnnnnnnnnnnnnnnnnnnnnnnnnnnnnnnnnnnnnnnnnnnnnnnnnnnnnnnnnnnnnnnnnnnnnnnnnnnnnnnnnnnnnnnnnnnnnnnnnnnnnnnnnnnnnnnnnnnnnnnnnnnnnnnnnnnnnnnnnnnnnnnnnnnnnnnnnnnnnnnnnnnnnnnnnnnnnnnnnnnnnnnnnnnnnnnnnnnnnnnnnnnnnnnnnnnnnnnnnnnnnnnnnnnnnnnnnnnnnnnnnnnnnnnnnnnnnnnnnnnnnnnnnnnnnnnnnnnnnnnnnnnnnnnnnnnnnnnnnnnnnnnnnnnnnnnnnnnnnnnnnnnnnnnnnnnnnnnnnnnnnnnnnnnnnnnnnnnnnnnnnnnnnnnnnnnnnnnnnnnnnnnnnnnnnnnnnnnnnnnnnnnnnnnnnnnnnnnnnnnnnnnnnnnnnnnnnnnnnnnnnnnnnnnnnnnnnnnnnnnnnnnnnnnnnnnnnnnnnnnnnnnnnnnnnnnnnnnnnnnnnnnnnnnnnnnnnnnnnnnnnnnnnnnnnnnnnnnnnnnnnnnnnnnnnnnnnnnnnnnnnnnnnnnnnnnnnnnnnnnnnnnnnnnnnnnnnnnnnnnnnnnnnnnnnnnnnnnnnnnnnnnnnnnnnnnnnnnnnnnnnnnnnnnnnnnnnnnnnnnnnnnnnnnnnnnnnnnnnnnnnnnnnnnnnnnnnnnnnnnnnnnnnnnnnnnnnnnnnnnnnnnnnnnnnnnnnnnnnnnnnnnnnnnnnnnnnnnnnnnnnnnnnnnnnnnnnnnnnnnnnnnnnnnnnnnnnnnnnnnnnnnnnnnnnnnnnnnnnnnnnnnnnnnnnnnnnnnnnnnnnnnnnnnnnnnnnnnnnnnnnnnnnnnnnnnnnnnnnnnnnnnnnnnnnnnnnnnnnnnnnnnnnnnnnnnnnnnnnnnnnnnnnnnnnnnnnnnnnnnnnnnnnnnnnnnnnnnnnnnnnnnnnnnnnnnnnnnnnnnnnnnnnnnnnnnnnnnnnnnnnnnnnnnnnnnnnnnnnnnnnnnnnnnnnnnnnnnnnnnnnnnnnnnnnnnnnnnnnnnnnnnnnnnnnnnnnnnnnnnnnnnnnnnnnnnnnnnnnnnnnnnnnnnnnnnnnnnnnnnnnnnnnnnnnnnnnnnnnnnnnnnnnnnnnnnnnnnnnnnnnnnnnnnnnnnnnnnnnnnnnnnnnnnnnnnnnnnnnnnnnnnnnnnnnnnnnnnnnnnnnnnnnnnnnnnnnnnnnnnnnnnnnnnnnnnnnnnnnnnnnnnnnnnnnnnnnnnnnnnnnnnnnnnnnnnnnnnnnnnnnnnnnnnnnnnnnnnnnnnnnnnnnnnnnnnnnnnnnnnnnnnnnnnnnnnnnnnnnnnnnnnnnnnnnnnnnnnnnnnnnnnnnnnnnnnnnnnnnnnnnnnnnnnnnnnnnnnnnnnnnnnnnnnnnnnnnnnnnnnnnnnnnnnnnnnnnnnnnnnnnnnnnnnnnnnnnnnnnnnnnnnnnnnnnnnnnnnnnnnnnnnnnnnnnnnnnnnnnnnnnnnnnnnnnnnnnnnnnnnnnnnnnnnnnnnnnnnnnnnnnnnnnnnnnnnnnnnnnnnnnnnnnnnnnnnnnnnnnnnnnnnnnnnnnnnnnnnnnnnnnnnnnnnnnnnnnnnnnnnnnnnnnnnnnnnnnnnnnnnnnnnnnnnnnnnnnnnnnnnnnnnnnnnnnnnnnnnnnnnnnnnnnnnnnnnnnnnnnnnnnnnnnnnnnnnnnnnnnnnnnnnnnnnnnnnnnnnnnnnnnnnnnnnnnnnnnnnnnnnnnnnnnnnnnnnnnnnnnnnnnnnnnnnnnnnnnnnnnnnnnnnnnnnnnnnnnnnnnnnnnnnnnnnnnnnnnnnnnnnnnnnnnnnnnnnnnnnnnnnnnnnnnnnnnnnnnnnnnnnnnnnnnnnnnnnnnnnnnnnnnnnnnnnnnnnnnnnnnnnnnnnnnnnnnnnnnnnnnnnnnnnnnnnnnnnnnnnnnnnnnnnnnnnnnnnnnnnnnnnnnnnnnnnnnnnnnnnnnnnnnnnnnnnnnnnnnnnnnnnnnnnnnnnnnnnnnnnnnnnnnnnnnnnnnnnnnnnnnnnnnnnnnnnnnnnnnnnnnnnnnnnnnnnnnnnnnnnnnnnnnnnnnnnnnnnnnnnnnnnnnnnnnnnnnnnnnnnnnnnnnnnnnnnnnnnnnnnnnnnnnnnnnnnnnnnnnnnnnnnnnnnnnnnnnnnnnnnnnnnnnnnnnnnnnnnnnnnnnnnnnnnnnnnnnnnnnnnnnnnnnnnnnnnnnnnnnnnnnnnnnnnnnnnnnnnnnnnnnnnnnnnnnnnnnnnnnnnnnnnnnnnnnnnnnnnnnnnnnnnnnnnnnnnnnnnnnnnnnnnnnnnnnnnnnnnnnnnnnnnnnnnnnnnnnnnnnnnnnnnnnnnnnnnnnnnnnnnnnnnnnnnnnnnnnnnnnnnnnnnnnnnnnnnnnnnnnnnnnnnnnnnnnnnnnnnnnnnnnnnnnnnnnnnnnnnnnnnnnnnnnnnnnnnnnnnnnnnnnnnnnnnnnnnnnnnnnnnnnnnnnnnnnnnnnnnnnnnnnnnnnnnnnnnnnnnnnnnnnnnnnnnnnnnnnnnnnnnnnnnnnnnnnnnnnnnnnnnnnnnnnnnnnnnnnnnnnnnnnnnnnnnnnnnnnnnnnnnnnnnnnnnnnnnnnnnnnnnnnnnnnnnnnnnnnnnnnnnnnnnnnnnnnnnnnnnnnnnnnnnnnnnnnnnnnnnnnnnnnnnnnnnnnnnnnnnnnnnnnnnnnnnnnnnnnnnnnnnnnnnnnnnnnnnnnnnnnnnnnnnnnnnnnnnnnnnnnnnnnnnnnnnnnnnnnnnnnnnnnnnnnnnnnnnnnnnnnnnnnnnnnnnnnnnnnnnnnnnnnnnnnnnnnnnnnnnnnnnnnnnnnnnnnnnnnnnnnnnnnnnnnnnnnnnnnnnnnnnnnnnnnnnnnnnnnnnnnnnnnnnnnnnnnnnnnnnnnnnnnnnnnnnnnnnnnnnnnnnnnnnnnnnnnnnnnnnnnnnnnnnnnnnnnnnnnnnnnnnnnnnnnnnnnnnnnnnnnnnnnnnnnnnnnnnnnnnnnnnnnnnnnnnnnnnnnnnnnnnnnnnnnnnnnnnnnnnnnnnnnnnnnnnnnnnnnnnnnnnnnnnnnnnnnnnnnnnnnnnnnnnnnnnnnnnnnnnnnnnnnnnnnnnnnnnnnnnnnnnnnnnnnnnnnnnnnnnnnnnnnnnnnnnnnnnnnnnnnnnnnnnnnnnnnnnnnnnnnnnnnnnnnnnnnnnnnnnnnnnnnnnnnnnnnnnnnnnnnnnnnnnnnnnnnnnnnnnnnnnnnnnnnnnnnnnnnnnnnnnnnnnnnnnnnnnnnnnnnnnnnnnnnnnnnnnnnnnnnnnnnnnnnnnnnnnnnnnnnnnnnnnnnnnnnnnnnnnnnnnnnnnnnnnnnnnnnnnnnnnnnnnnnnnnnnnnnnnnnnnnnnnnnnnnnnnnnnnnnnnnnnnnnnnnnnnnnnnnnnnnnnnnnnnnnnnnnnnnnnnnnnnnnnnnnnnnnnnnnnnnnnnnnnnnnnnnnnnnnnnnnnnnnnnnnnnnnnnnnnnnnnnnnnnnnnnnnnnnnnnnnnnnnnnnnnnnnnnnnnnnnnnnnnnnnnnnnnnnnnnnnnnnnnnnnnnnnnnnnnnnnnnnnnnnnnnnnnnnnnnnnnnnnnnnnnnnnnnnnnnnnnnnnnnnnnnnnnnnnnnnnnnnnnnnnnnnnnnnnnnnnnnnnnnnnnnnnnnnnnnnnnnnnnnnnnnnnnnnnnnnnnnnnnnnnnnnnnnnnnnnnnnnnnnnnnnnnnnnnnnnnnnnnnnnnnnnnnnnnnnnnnnnnnnnnnnnnnnnnnnnnnnnnnnnnnnnnnnnnnnnnnnnnnnnnnnnnnnnnnnnnnnnnnnnnnnnnnnnnnnnnnnnnnnnnnnnnnnnnnnnnnnnnnnnnnnnnnnnnnnnnnnnnnnnnnnnnnnnnnnnnnnnnnnnnnnnnnnnnnnnnnnnnnnnnnnnnnnnnnnnnnnnnnnnnnnnnnnnnnnnnnnnnnnnnnnnnnnnnnnnnnnnnnnnnnnnnnnnnnnnnnnnnnnnnnnnnnnnnnnnnnnnnnnnnnnnnnnnnnnnnnnnnnnnnnnnnnnnnnnnnnnnnnnnnnnnnnnnnnnnnnnnnnnnnnnnnnnnnnnnnnnnnnnnnnnnnnnnnnnnnnnnnnnnnnnnnnnnnnnnnnnnnnnnnnnnnnnnnnnnnnnnnnnnnnnnnnnnnnnnnnnnnnnnnnnnnnnnnnnnnnnnnnnnnnnnnnnnnnnnnnnnnnnnnnnnnnnnnnnnnnnnnnnnnnnnnnnnnnnnnnnnnnnnnnnnnnnnnnnnnnnnnnnnnnnnnnnnnnnnnnnnnnnnnnnnnnnnnnnnnnnnnnnnnnnnnnnnnnnnnnnnnnnnnnnnnnnnnnnnnnnnnnnnnnnnnnnnnnnnnnnnnnnnnnnnnnnnnnnnnnnnnnnnnnnnnnnnnnnnnnnnnnnnnnnnnnnnnnnnnnnnnnnnnnnnnnnnnnnnnnnnnnnnnnnnnnnnnnnnnnnnnnnnnnnnnnnnnnnnnnnnnnnnnnnnnnnnnnnnnnnnnnnnnnnnnnnnnnnnnnnnnnnnnnnnnnnnnnnnnnnnnnnnnnnnnnnnnnnnnnnnnnnnnnnnnnnnnnnnnnnnnnnnnnnnnnnnnnnnnnnnnnnnnnnnnnnnnnnnnnnnnnnnnnnnnnnnnnnnnnnnnnnnnnnnnnnnnnnnnnnnnnnnnnnnnnnnnnnnnnnnnnnnnnnnnnnnnnnnnnnnnnnnnnnnnnnnnnnnnnnnnnnnnnnnnnnnnnnnnnnnnnnnnnnnnnnnnnnnnnnnnnnnnnnnnnnnnnnnnnnnnnnnnnnnnnnnnnnnnnnnnnnnnnnnnnnnnnnnnnnnnnnnnnnnnnnnnnnnnnnnnnnnnnnnnnnnnnnnnnnnnnnnnnnnnnnnnnnnnnnnnnnnnnnnnnnnnnnnnnnnnnnnnnnnnnnnnnnnnnnnnnnnnnnnnnnnnnnnnnnnnnnnnnnnnnnnnnnnnnnnnnnnnnnnnnnnnnnnnnnnnnnnnnnnnnnnnnnnnnnnnnnnnnnnnnnnnnnnnnnnnnnnnnnnnnnnnnnnnnnnnnnnnnnnnnnnnnnnnnnnnnnnnnnnnnnnnnnnnnnnnnnnnnnnnnnnnnnnnnnnnnnnnnnnnnnnnnnnnnnnnnnnnnnnnnnnnnnnnnnnnnnnnnnnnnnnnnnnnnnnnnnnnnnnnnnnnnnnnnnnnnnnnnnnnnnnnnnnnnnnnnnnnnnnnnnnnnnnnnnnnnnnnnnnnnnnnnnnnnnnnnnnnnnnnnnnnnnnnnnnnnnnnnnnnnnnnnnnnnnnnnnnnnnnnnnnnnnnnnnnnnnnnnnnnnnnnnnnnnnnnnnnnnnnnnnnnnnnnnnnnnnnnnnnnnnnnnnnnnnnnnnnnnnnnnnnnnnnnnnnnnnnnnnnnnnnnnnnnnnnnnnnnnnnnnnnnnnnnnnnnnnnnnnnnnnnnnnnnnnnnnnnnnnnnnnnnnnnnnnnnnnnnnnnnnnnnnnnnnnnnnnnnnnnnnnnnnnnnnnnnnnnnnnnnnnnnnnnnnnnnnnnnnnnnnnnnnnnnnnnnnnnnnnnnnnnnnnnnnnnnnnnnnnnnnnnnnnnnnnnnnnnnnnnnnnnnnnnnnnnnnnnnnnnnnnnnnnnnnnnnnnnnnnnnnnnnnnnnnnnnnnnnnnnnnnnnnnnnnnnnnnnnnnnnnnnnnnnnnnnnnnnnnnnnnnnnnnnnnnnnnnnnnnnnnnnnnnnnnnnnnnnnnnnnnnnnnnnnnnnnnnnnnnnnnnnnnnnnnnnnnnnnnnnnnnnnnnnnnnnnnnnnnnnnnnnnnnnnnnnnnnnnnnnnnnnnnnnnnnnnnnnnnnnnnnnnnnnnnnnnnnnnnnnnnnnnnnnnnnnnnnnnnnnnnnnnnnnnnnnnnnnnnnnnnnnnnnnnnnnnnnnnnnnnnnnnnnnnnnnnnnnnnnnnnnnnnnnnnnnnnnnnnnnnnnnnnnnnnnnnnnnnnnnnnnnnnnnnnnnnnnnnnnnnnnnnnnnnnnnnnnnnnnnnnnnnnnnnnnnnnnnnnnnnnnnnnnnnnnnnnnnnnnnnnnnnnnnnnnnnnnnnnnnnnnnnnnnnnnnnnnnnnnnnnnnnnnnnnnnnnnnnnnnnnnnnnnnnnnnnnnnnnnnnnnnnnnnnnnnnnnnnnnnnnnnnnnnnnnnnnnnnnnnnnnnnnnnnnnnnnnnnnnnnnnnnnnnnnnnnnnnnnnnnnnnnnnnnnnnnnnnnnnnnnnnnnnnnnnnnnnnnnnnnnnnnnnnnnnnnnnnnnnnnnnnnnnnnnnnnnnnnnnnnnnnnnnnnnnnnnnnnnnnnnnnnnnnnnnnnnnnnnnnnnnnnnnnnnnnnnnnnnnnnnnnnnnnnnnnnnnnnnnnnnnnnnnnnnnnnnnnnnnnnnnnnnnnnnnnnnnnnnnnnnnnnnnnnnnnnnnnnnnnnnnnnnnnnnnnnnnnnnnnnnnnnnnnnnnnnnnnnnnnnnnnnnnnnnnnnnnnnnnnnnnnnnnnnnnnnnnnnnnnnnnnnnnnnnnnnnnnnnnnnnnnnnnnnnnnnnnnnnnnnnnnnnnnnnnnnnnnnnnnnnnnnnnnnnnnnnnnnnnnnnnnnnnnnnnnnnnnnnnnnnnnnnnnnnnnnnnnnnnnnnnnnnnnnnnnnnnnnnnnnnnnnnnnnnnnnnnnnnnnnnnnnnnnnnnnnnnnnnnnnnnnnnnnnnnnnnnnnnnnnnnnnnnnnnnnnnnnnnnnnnnnnnnnnnnnnnnnnnnnnnnnnnnnnnnnnnnnnnnnnnnnnnnnnnnnnnnnnnnnnnnnnnnnnnnnnnnnnnnnnnnnnnnnnnnnnnnnnnnnnnnnnnnnnnnnnnnnnnnnnnnnnnnnnnnnnnnnnnnnnnnnnnnnnnnnnnnnnnnnnnnnnnnnnnnnnnnnnnnnnnnnnnnnnnnnnnnnnnnnnnnnnnnnnnnnnnnnnnnnnnnnnnnnnnnnnnnnnnnnnnnnnnnnnnnnnnnnnnnnnnnnnnnnnnnnnnnnnnnnnnnnnnnnnnnnnnnnnnnnnnnnnnnnnnnnnnnnnnnnnnnnnnnnnnnnnnnnnnnnnnnnnnnnnnnnnnnnnnnnnnnnnnnnnnnnnnnnnnnnnnnnnnnnnnnnnnnnnnnnnnnnnnnnnnnnnnnnnnnnnnnnnnnnnnnnnnnnnnnnnnnnnnnnnnnnnnnnnnnnnnnnnnnnnnnnnnnnnnnnnnnnnnnnnnnnnnnnnnnnnnnnnnnnnnnnnnnnnnnnnnnnnnnnnnnnnnnnnnnnnnnnnnnnnnnnnnnnnnnnnnnnnnnnnnnnnnnnnnnnnnnnnnnnnnnnnnnnnnnnnnnnnnnnnnnnnnnnnnnnnnnnnnnnnnnnnnnnnnnnnnnnnnnnnnnnnnnnnnnnnnnnnnnnnnnnnnnnnnnnnnnnnnnnnnnnnnnnnnnnnnnnnnnnnnnnnnnnnnnnnnnnnnnnnnnnnnnnnnnnnnnnnnnnnnnnnnnnnnnnnnnnnnnnnnnnnnnnnnnnnnnnnnnnnnnnnnnnnnnnnnnnnnnnnnnnnnnnnnnnnnnnnnnnnnnnnnnnnnnnnnnnnnnnnnnnnnnnnnnnnnnnnnnnnnnnnnnnnnnnnnnnnnnnnnnnnnnnnnnnnnnnnnnnnnnnnnnnnnnnnnnnnnnnnnnnnnnnnnnnnnnnnnnnnnnnnnnnnnnnnnnnnnnnnnnnnnnnnnnnnnnnnnnnnnnnnnnnnnnnnnnnnnnnnnnnnnnnnnnnnnnnnnnnnnnnnnnnnnnnnnnnnnnnnnnnnnnnnnnnnnnnnnnnnnnnnnnnnnnnnnnnnnnnnnnnnnnnnnnnnnnnnnnnnnnnnnnnnnnnnnnnnnnnnnnnnnnnnnnnnnnnnnnnnnnnnnnnnnnnnnnnnnnnnnnnnnnnnnnnnnnnnnnnnnnnnnnnnnnnnnnnnnnnnnnnnnnnnnnnnnnnnnnnnnnnnnnnnnnnnnnnnnnnnnnnnnnnnnnnnnnnnnnnnnnnnnnnnnnnnnnnnnnnnnnnnnnnnnnnnnnnnnnnnnnnnnnnnnnnnnnnnnnnnnnnnnnnnnnnnnnnnnnnnnnnnnnnnnnnnnnnnnnnnnnnnnnnnnnnnnnnnnnnnnnnnnnnnnnnnnnnnnnnnnnnnnnnnnnnnnnnnnnnnnnnnnnnnnnnnnnnnnnnnnnnnnnnnnnnnnnnnnnnnnnnnnnnnnnnnnnnnnnnnnnnnnnnnnnnnnnnnnnnnnnnnnnnnnnnnnnnnnnnnnnnnnnnnnnnnnnnnnnnnnnnnnnnnnnnnnnnnnnnnnnnnnnnnnnnnnnnnnnnnnnnnnnnnnnnnnnnnnnnnnnnnnnnnnnnnnnnnnnnnnnnnnnnnnnnnnnnnnnnnnnnnnnnnnnnnnnnnnnnnnnnnnnnnnnnnnnnnnnnnnnnnnnnnnnnnnnnnnnnnnnnnnnnnnnnnnnnnnnnnnnnnnnnnnnnnnnnnnnnnnnnnnnnnnnnnnnnnnnnnnnnnnnnnnnnnnnnnnnnnnnnnnnnnnnnnnnnnnnnnnnnnnnnnnnnnnnnnnnnnnnnnnnnnnnnnnnnnnnnnnnnnnnnnnnnnnnnnnnnnnnnnnnnnnnnnnnnnnnnnnnnnnnnnnnnnnnnnnnnnnnnnnnnnnnnnnnnnnnnnnnnnnnnnnnnnnnnnnnnnnnnnnnnnnnnnnnnnnnnnnnnnnnnnnnnnnnnnnnnnnnnnnnnnnnnnnnnnnnnnnnnnnnnnnnnnnnnnnnnnnnnnnnnnnnnnnnnnnnnnnnnnnnnnnnnnnnnnnnnnnnnnnnnnnnnnnnnnnnnnnnnnnnnnnnnnnnnnnnnnnnnnnnnnnnnnnnnnnnnnnnnnnnnnnnnnnnnnnnnnnnnnnnnnnnnnnnnnnnnnnnnnnnnnnnnnnnnnnnnnnnnnnnnnnnnnnnnnnnnnnnnnnnnnnnnnnnnnnnnnnnnnnnnnnnnnnnnnnnnnnnnnnnnnnnnnnnnnnnnnnnnnnnnnnnnnnnnnnnnnnnnnnnnnnnnnnnnnnnnnnnnnnnnnnnnnnnnnnnnnnnnnnnnnnnnnnnnnnnnnnnnnnnnnnnnnnnnnnnnnnnnnnnnnnnnnnnnnnnnnnnnnnnnnnnnnnnnnnnnnnnnnnnnnnnnnnnnnnnnnnnnnnnnnnnnnnnnnnnnnnnnnnnnnnnnnnnnnnnnnnnnnnnnnnnnnnnnnnnnnnnnnnnnnnnnnnnnnnnnnnnnnnnnnnnnnnnnnnnnnnnnnnnnnnnnnnnnnnnnnnnnnnnnnnnnnnnnnnnnnnnnnnnnnnnnnnnnnnnnnnnnnnnnnnnnnnnnnnnnnnnnnnnnnnnnnnnnnnnnnnnnnnnnnnnnnnnnnnnnnnnnnnnnnnnnnnnnnnnnnnnnnnnnnnnnnnnnnnnnnnnnnnnnnnnnnnnnnnnnnnnnnnnnnnnnnnnnnnnnnnnnnnnnnnnnnnnnnnnnnnnnnnnnnnnnnnnnnnnnnnnnnnnnnnnnnnnnnnnnnnnnnnnnnnnnnnnnnnnnnnnnnnnnnnnnnnnnnnnnnnnnnnnnnnnnnnnnnnnnnnnnnnnnnnnnnnnnnnnnnnnnnnnnnnnnnnnnnnnnnnnnnnnnnnnnnnnnnnnnnnnnnnnnnnnnnnnnnnnnnnnnnnnnnnnnnnnnnnnnnnnnnnnnnnnnnnnnnnnnnnnnnnnnnnnnnnnnnnnnnnnnnnnnnnnnnnnnnnnnnnnnnnnnnnnnnnnnnnnnnnnnnnnnnnnnnnnnnnnnnnnnnnnnnnnnnnnnnnnnnnnnnnnnnnnnnnnnnnnnnnnnnnnnnnnnnnnnnnnnnnnnnnnnnnnnnnnnnnnnnnnnnnnnnnnnnnnnnnnnnnnnnnnnnnnnnnnnnnnnnnnnnnnnnnnnnnnnnnnnnnnnnnnnnnnnnnnnnnnnnnnnnnnnnnnnnnnnnnnnnnnnnnnnnnnnnnnnnnnnnnnnnnnnnnnnnnnnnnnnnnnnnnnnnnnnnnnnnnnnnnnnnnnnnnnnnnnnnnnnnnnnnnnnnnnnnnnnnnnnnnnnnnnnnnnnnnnnnnnnnnnnnnnnnnnnnnnnnnnnnnnnnnnnnnnnnnnnnnnnnnnnnnnnnnnnnnnnnnnnnnnnnnnnnnnnnnnnnnnnnnnnnnnnnnnnnnnnnnnnnnnnnnnnnnnnnnnnnnnnnnnnnnnnnnnnnnnnnnnnnnnnnnnnnnnnnnnnnnnnnnnnnnnnnnnnnnnnnnnnnnnnnnnnnnnnnnnnnnnnnnnnnnnnnnnnnnnnnnnnnnnnnnnnnnnnnnnnnnnnnnnnnnnnnnnnnnnnnnnnnnnnnnnnnnnnnnnnnnnnnnnnnnnnnnnnnnnnnnnnnnnnnnnnnnnnnnnnnnnnnnnnnnnnnnnnnnnnnnnnnnnnnnnnnnnnnnnnnnnnnnnnnnnnnnnnnnnnnnnnnnnnnnnnnnnnnnnnnnnnnnnnnnnnnnnnnnnnnnnnnnnnnnnnnnnnnnnnnnnnnnnnnnnnnnnnnnnnnnnnnnnnnnnnnnnnnnnnnnnnnnnnnnnnnnnnnnnnnnnnnnnnnnnnnnnnnnnnnnnnnnnnnnnnnnnnnnnnnnnnnnnnnnnnnnnnnnnnnnnnnnnnnnnnnnnnnnnnnnnnnnnnnnnnnnnnnnnnnnnnnnnnnnnnnnnnnnnnnnnnnnnnnnnnnnnnnnnnnnnnnnnnnnnnnnnnnnnnnnnnnnnnnnnnnnnnnnnnnnnnnnnnnnnnnnnnnnnnnnnnnnnnnnnnnnnnnnnnnnnnnnnnnnnnnnnnnnnnnnnnnnnnnnnnnnnnnnnnnnnnnnnnnnnnnnnnnnnnnnnnnnnnnnnnnnnnnnnnnnnnnnnnnnnnnnnnnnnnnnnnnnnnnnnnnnnnnnnnnnnnnnnnnnnnnnnnnnnnnnnnnnnnnnnnnnnnnnnnnnnnnnnnnnnnnnnnnnnnnnnnnnnnnnnnnnnnnnnnnnnnnnnnnnnnnnnnnnnnnnnnnnnnnnnnnnnnnnnnnnnnnnnnnnnnnnnnnnnnnnnnnnnnnnnnnnnnnnnnnnnnnnnnnnnnnnnnnnnnnnnnnnnnnnnnnnnnnnnnnnnnnnnnnnnnnnnnnnnnnnnnnnnnnnnnnnnnnnnnnnnnnnnnnnnnnnnnnnnnnnnnnnnnnnnnnnnnnnnnnnnnnnnnnnnnnnnnnnnnnnnnnnnnnnnnnnnnnnnnnnnnnnnnnnnnnnnnnnnnnnnnnnnnnnnnnnnnnnnnnnnnnnnnnnnnnnnnnnnnnnnnnnnnnnnnnnnnnnnnnnnnnnnnnnnnnnnnnnnnnnnnnnnnnnnnnnnnnnnnnnnnnnnnnnnnnnnnnnnnnnnnnnnnnnnnnnnnnnnnnnnnnnnnnnnnnnnnnnnnnnnnnnnnnnnnnnnnnnnnnnnnnnnnnnnnnnnnnnnnnnnnnnnnnnnnnnnnnnnnnnnnnnnnnnnnnnnnnnnnnnnnnnnnnnnnnnnnnnnnnnnnnnnnnnnnnnnnnnnnnnnnnnnnnnnnnnnnnnnnnnnnnnnnnnnnnnnnnnnnnnnnnnnnnnnnnnnnnnnnnnnnnnnnnnnnnnnnnnnnnnnnnnnnnnnnnnnnnnnnnnnnnnnnnnnnnnnnnnnnnnnnnnnnnnnnnnnnnnnnnnnnnnnnnnnnnnnnnnnnnnnnnnnnnnnnnnnnnnnnnnnnnnnnnnnnnnnnnnnnnnnnnnnnnnnnnnnnnnnnnnnnnnnnnnnnnnnnnnnnnnnnnnnnnnnnnnnnnnnnnnnnnnnnnnnnnnnnnnnnnnnnnnnnnnnnnnnnnnnnnnnnnnnnnnnnnnnnnnnnnnnnnnnnnnnnnnnnnnnnnnnnnnnnnnnnnnnnnnnnnnnnnnnnnnnnnnnnnnnnnnnnnnnnnnnnnnnnnnnnnnnnnnnnnnnnnnnnnnnnnnnnnnnnnnnnnnnnnnnnnnnnnnnnnnnnnnnnnnnnnnnnnnnnnnnnnnnnnnnnnnnnnnnnnnnnnnnnnnnnnnnnnnnnnnnnnnnnnnnnnnnnnnnnnnnnnnnnnnnnnnnnnnnnnnnnnnnnnnnnnnnnnnnnnnnnnnnnnnnnnnnnnnnnnnnnnnnnnnnnnnnnnnnnnnnnnnnnnnnnnnnnnnnnnnnnnnnnnnnnnnnnnnnnnnnnnnnnnnnnnnnnnnnnnnnnnnnnnnnnnnnnnnnnnnnnnnnnnnnnnnnnnnnnnnnnnnnnnnnnnnnnnnnnnnnnnnnnnnnnnnnnnnnnnnnnnnnnnnnnnnnnnnnnnnnnnnnnnnnnnnnnnnnnnnnnnnnnnnnnnnnnnnnnnnnnnnnnnnnnnnnnnnnnnnnnnnnnnnnnnnnnnnnnnnnnnnnnnnnnnnnnnnnnnnnnnnnnnnnnnnnnnnnnnnnnnnnnnnnnnnnnnnnnnnnnnnnnnnnnnnnnnnnnnnnnnnnnnnnnnnnnnnnnnnnnnnnnnnnnnnnnnnnnnnnnnnnnnnnnnnnnnnnnnnnnnnnnnnnnnnnnnnnnnnnnnnnnnnnnnnnnnnnnnnnnnnnnnnnnnnnnnnnnnnnnnnnnnnnnnnnnnnnnnnnnnnnnnnnnnnnnnnnnnnnnnnnnnnnnnnnnnnnnnnnnnnnnnnnnnnnnnnnnnnnnnnnnnnnnnnnnnnnnnnnnnnnnnnnnnnnnnnnnnnnnnnnnnnnnnnnnnnnnnnnnnnnnnnnnnnnnnnnnnnnnnnnnnnnnnnnnnnnnnnnnnnnnnnnnnnnnnnnnnnnnnnnnnnnnnnnnnnnnnnnnnnnnnnnnnnnnnnnnnnnnnnnnnnnnnnnnnnnnnnnnnnnnnnnnnnnnnnnnnnnnnnnnnnnnnnnnnnnnnnnnnnnnnnnnnnnnnnnnnnnnnnnnnnnnnnnnnnnnnnnnnnnnnnnnnnnnnnnnnnnnnnnnnnnnnnnnnnnnnnnnnnnnnnnnnnnnnnnnnnnnnnnnnnnnnnnnnnnnnnnnnnnnnnnnnnnnnnnnnnnnnnnnnnnnnnnnnnnnnnnnnnnnnnnnnnnnnnnnnnnnnnnnnnnnnnnnnnnnnnnnnnnnnnnnnnnnnnnnnnnnnnnnnnnnnnnnnnnnnnnnnnnnnnnnnnnnnnnnnnnnnnnnnnnnnnnnnnnnnnnnnnnnnnnnnnnnnnnnnnnnnnnnnnnnnnnnnnnnnnnnnnnnnnnnnnnnnnnnnnnnnnnnnnnnnnnnnnnnnnnnnnnnnnnnnnnnnnnnnnnnnnnnnnnnnnnnnnnnnnnnnnnnnnnnnnnnnnnnnnnnnnnnnnnnnnnnnnnnnnnnnnnnnnnnnnnnnnnnnnnnnnnnnnnnnnnnnnnnnnnnnnnnnnnnnnnnnnnnnnnnnnnnnnnnnnnnnnnnnnnnnnnnnnnnnnnnnnnnnnnnnnnnnnnnnnnnnnnnnnnnnnnnnnnnnnnnnnnnnnnnnnnnnnnnnnnnnnnnnnnnnnnnnnnnnnnnnnnnnnnnnnnnnnnnnnnnnnnnnnnnnnnnnnnnnnnnnnnnnnnnnnnnnnnnnnnnnnnnnnnnnnnnnnnnnnnnnnnnnnnnnnnnnnnnnnnnnnnnnnnnnnnnnnnnnnnnnnnnnnnnnnnnnnnnnnnnnnnnnnnnnnnnnnnnnnnnnnnnnnnnnnnnnnnnnnnnnnnnnnnnnnnnnnnnnnnnnnnnnnnnnnnnnnnnnnnnnnnnnnnnnnnnnnnnnnnnnnnnnnnnnnnnnnnnnnnnnnnnnnnnnnnnnnnnnnnnnnnnnnnnnnnnnnnnnnnnnnnnnnnnnnnnnnnnnnnnnnnnnnnnnnnnnnnnnnnnnnnnnnnnnnnnnnnnnnnnnnnnnnnnnnnnnnnnnnnnnnnnnnnnnnnnnnnnnnnnnnnnnnnnnnnnnnnnnnnnnnnnnnnnnnnnnnnnnnnnnnnnnnnnnnnnnnnnnnnnnnnnnnnnnnnnnnnnnnnnnnnnnnnnnnnnnnnnnnnnnnnnnnnnnnnnnnnnnnnnnnnnnnnnnnnnnnnnnnnnnnnnnnnnnnnnnnnnnnnnnnnnnnnnnnnnnnnnnnnnnnnnnnnnnnnnnnnnnnnnnnnnnnnnnnnnnnnnnnnnnnnnnnnnnnnnnnnnnnnnnnnnnnnnnnnnnnnnnnnnnnnnnnnnnnnnnnnnnnnnnnnnnnnnnnnnnnnnnnnnnnnnnnnnnnnnnnnnnnnnnnnnnnnnnnnnnnnnnnnnnnnnnnnnnnnnnnnnnnnnnnnnnnnnnnnnnnnnnnnnnnnnnnnnnnnnnnnnnnnnnnnnnnnnnnnnnnnnnnnnnnnnnnnnnnnnnnnnnnnnnnnnnnnnnnnnnnnnnnnnnnnnnnnnnnnnnnnnnnnnnnnnnnnnnnnnnnnnnnnnnnnnnnnnnnnnnnnnnnnnnnnnnnnnnnnnnnnnnnnnnnnnnnnnnnnnnnnnnnnnnnnnnnnnnnnnnnnnnnnnnnnnnnnnnnnnnnnnnnnnnnnnnnnnnnnnnnnnnnnnnnnnnnnnnnnnnnnnnnnnnnnnnnnnnnnnnnnnnnnnnnnnnnnnnnnnnnnnnnnnnnnnnnnnnnnnnnnnnnnnnnnnnnnnnnnnnnnnnnnnnnnnnnnnnnnnnnnnnnnnnnnnnnnnnnnnnnnnnnnnnnnnnnnnnnnnnnnnnnnnnnnnnnnnnnnnnnnnnnnnnnnnnnnnnnnnnnnnnnnnnnnnnnnnnnnnnnnnnnnnnnnnnnnnnnnnnnnnnnnnnnnnnnnnnnnnnnnnnnnnnnnnnnnnnnnnnnnnnnnnnnnnnnnnnnnnnnnnnnnnnnnnnnnnnnnnnnnnnnnnnnnnnnnnnnnnnnnnnnnnnnnnnnnnnnnnnnnnnnnnnnnnnnnnnnnnnnnnnnnnnnnnnnnnnnnnnnnnnnnnnnnnnnnnnnnnnnnnnnnnnnnnnnnnnnnnnnnnnnnnnnnnnnnnnnnnnnnnnnnnnnnnnnnnnnnnnnnnnnnnnnnnnnnnnnnnnnnnnnnnnnnnnnnnnnnnnnnnnnnnnnnnnnnnnnnnnnnnnnnnnnnnnnnnnnnnnnnnnnnnnnnnnnnnnnnnnnnnnnnnnnnnnnnnnnnnnnnnnnnnnnnnnnnnnnnnnnnnnnnnnnnnnnnnnnnnnnnnnnnnnnnnnnnnnnnnnnnnnnnnnnnnnnnnnnnnnnnnnnnnnnnnnnnnnnnnnnnnnnnnnnnnnnnnnnnnnnnnnnnnnnnnnnnnnnnnnnnnnnnnnnnnnnnnnnnnnnnnnnnnnnnnnnnnnnnnnnnnnnnnnnnnnnnnnnnnnnnnnnnnnnnnnnnnnnnnnnnnnnnnnnnnnnnnnnnnnnnnnnnnnnnnnnnnnnnnnnnnnnnnnnnnnnnnnnnnnnnnnnnnnnnnnnnnnnnnnnnnnnnnnnnnnnnnnnnnnnnnnnnnnnnnnnnnnnnnnnnnnnnnnnnnnnnnnnnnnnnnnnnnnnnnnnnnnnnnnnnnnnnnnnnnnnnnnnnnnnnnnnnnnnnnnnnnnnnnnnnnnnnnnnnnnnnnnnnnnnnnnnnnnnnnnnnnnnnnnnnnnnnnnnnnnnnnnnnnnnnnnnnnnnnnnnnnnnnnnnnnnnnnnnnnnnnnnnnnnnnnnnnnnnnnnnnnnnnnnnnnnnnnnnnnnnnnnnnnnnnnnnnnnnnnnnnnnnnnnnnnnnnnnnnnnnnnnnnnnnnnnnnnnnnnnnnnnnnnnnnnnnnnnnnnnnnnnnnnnnnnnnnnnnnnnnnnnnnnnnnnnnnnnnnnnnnnnnnnnnnnnnnnnnnnnnnnnnnnnnnnnnnnnnnnnnnnnnnnnnnnnnnnnnnnnnnnnnnnnnnnnnnnnnnnnnnnnnnnnnnnnnnnnnnnnnnnnnnnnnnnnnnnnnnnnnnnnnnnnnnnnnnnnnnnnnnnnnnnnnnnnnnnnnnnnnnnnnnnnnnnnnnnnnnnnnnnnnnnnnnnnnnnnnnnnnnnnnnnnnnnnnnnnnnnnnnnnnnnnnnnnnnnnnnnnnnnnnnnnnnnnnnnnnnnnnnnnnnnnnnnnnnnnnnnnnnnnnnnnnnnnnnnnnnnnnnnnnnnnnnnnnnnnnnnnnnnnnnnnnnnnnnnnnnnnnnnnnnnnnnnnnnnnnnnnnnnnnnnnnnnnnnnnnnnnnnnnnnnnnnnnnnnnnnnnnnnnnnnnnnnnnnnnnnnnnnnnnnnnnnnnnnnnnnnnnnnnnnnnnnnnnnnnnnnnnnnnnnnnnnnnnnnnnnnnnnnnnnnnnnnnnnnnnnnnnnnnnnnnnnnnnnnnnnnnnnnnnnnnnnnnnnnnnnnnnnnnnnnnnnnnnnnnnnnnnnnnnnnnnnnnnnnnnnnnnnnnnnnnnnnnnnnnnnnnnnnnnnnnnnnnnnnnnnnnnnnnnnnnnnnnnnnnnnnnnnnnnnnnnnnnnnnnnnnnnnnnnnnnnnnnnnnnnnnnnnnnnnnnnnnnnnnnnnnnnnnnnnnnnnnnnnnnnnnnnnnnnnnnnnnnnnnnnnnnnnnnnnnnnnnnnnnnnnnnnnnnnnnnnnnnnnnnnnnnnnnnnnnnnnnnnnnnnnnnnnnnnnnnnnnnnnnnnnnnnnnnnnnnnnnnnnnnnnnnnnnnnnnnnnnnnnnnnnnnnnnnnnnnnnnnnnnnnnnnnnnnnnnnnnnnnnnnnnnnnnnnnnnnnnnnnnnnnnnnnnnnnnnnnnnnnnnnnnnnnnnnnnnnnnnnnnnnnnnnnnnnnnnnnnnnnnnnnnnnnnnnnnnnnnnnnnnnnnnnnnnnnnnnnnnnnnnnnnnnnnnnnnnnnnnnnnnnnnnnnnnnnnnnnnnnnnnnnnnnnnnnnnnnnnnnnnnnnnnnnnnnnnnnnnnnnnnnnnnnnnnnnnnnnnnnnnnnnnnnnnnnnnnnnnnnnnnnnnnnnnnnnnnnnnnnnnnnnnnnnnnnnnnnnnnnnnnnnnnnnnnnnnnnnnnnnnnnnnnnnnnnnnnnnnnnnnnnnnnnnnnnnnnnnnnnnnnnnnnnnnnnnnnnnnnnnnnnnnnnnnnnnnnnnnnnnnnnnnnnnnnnnnnnnnnnnnnnnnnnnnnnnnnnnnnnnnnnnnnnnnnnnnnnnnnnnnnnnnnnnnnnnnnnnnnnnnnnnnnnnnnnnnnnnnnnnnnnnnnnnnnnnnnnnnnnnnnnnnnnnnnnnnnnnnnnnnnnnnnnnnnnnnnnnnnnnnnnnnnnnnnnnnnnnnnnnnnnnnnnnnnnnnnnnnnnnnnnnnnnnnnnnnnnnnnnnnnnnnnnnnnnnnnnnnnnnnnnnnnnnnnnnnnnnnnnnnnnnnnnnnnnnnnnnnnnnnnnnnnnnnnnnnnnnnnnnnnnnnnnnnnnnnnnnnnnnnnnnnnnnnnnnnnnnnnnnnnnnnnnnnnnnnnnnnnnnnnnnnnnnnnnnnnnnnnnnnnnnnnnnnnnnnnnnnnnnnnnnnnnnnnnnnnnnnnnnnnnnnnnnnnnnnnnnnnnnnnnnnnnnnnnnnnnnnnnnnnnnnnnnnnnnnnnnnnnnnnnnnnnnnnnnnnnnnnnnnnnnnnnnnnnnnnnnnnnnnnnnnnnnnnnnnnnnnnnnnnnnnnnnnnnnnnnnnnnnnnnnnnnnnnnnnnnnnnnnnnnnnnnnnnnnnnnnnnnnnnnnnnnnnnnnnnnnnnnnnnnnnnnnnnnnnnnnnnnnnnnnnnnnnnnnnnnnnnnnnnnnnnnnnnnnnnnnnnnnnnnnnnnnnnnnnnnnnnnnnnnnnnnnnnnnnnnnnnnnnnnnnnnnnnnnnnnnnnnnnnnnnnnnnnnnnnnnnnnnnnnnnnnnnnnnnnnnnnnnnnnnnnnnnnnnnnnnnnnnnnnnnnnnnnnnnnnnnnnnnnnnnnnnnnnnnnnnnnnnnnnnnnnnnnnnnnnnnnnnnnnnnnnnnnnnnnnnnnnnnnnnnnnnnnnnnnnnnnnnnnnnnnnnnnnnnnnnnnnnnnnnnnnnnnnnnnnnnnnnnnnnnnnnnnnnnnnnnnnnnnnnnnnnnnnnnnnnnnnnnnnnnnnnnnnnnnnnnnnnnnnnnnnnnnnnnnnnnnnnnnnnnnnnnnnnnnnnnnnnnnnnnnnnnnnnnnnnnnnnnnnnnnnnnnnnnnnnnnnnnnnnnnnnnnnnnnnnnnnnnnnnnnnnnnnnnnnnnnnnnnnnnnnnnnnnnnnnnnnnnnnnnnnnnnnnnnnnnnnnnnnnnnnnnnnnnnnnnnnnnnnnnnnnnnnnnnnnnnnnnnnnnnnnnnnnnnnnnnnnnnnnnnnnnnnnngagctctccgagctgctggaacagaacttcctgatgtatgacggcaaaggccccatcccggcgcagatcgtcgcgtggatgaagcaaagcgaaaacctccgcaagatcatccaagaagaactcgcagctggcggcgcgacggaagagaacggccaactagaaaccaggaaccaggaactcataacccgcgcgaaagcgcgctggtacgtcccggacccgaacaaggccggcgacctggagaagctccgcgagcgggccctgctgcgcgagttcgaggagtaccgcgaatccaagcagaagcgcctgaaggtcttccgcctcgaggccgtccgcgccggcttcaagaaggcatgggccgagcgggactacgccaccatcatcgccgtggcgcgcaagatccccgagaacgtcctccaggaggaccccaagctcctcatgtggtacgaccaggcgctcacgcgaacgggggaggagtagaaccacgaatggacacgaatgaacacaaattattgttcaaagacgaggtgttccagatcgttggttgcgccatggaggtgctcaatacgctcgggcatggactgcttgaaaagccctatgaaaatgcactcgtagttgaatttcgcttgagaggaattccttacaagcagcagccgcgcttcgacgtcatttacaagggagtcaaggtaggcgattatattcccgatttgatcgcattcggtaagatcgtcgtggatgccaagacgattgaccgtattaccgatgtggaacgcgggcagattctcaattacttgaagatcacgggacttcgggtcgggctgatcctcaacttcaagcatcctaaactcgaatgggagcggcttgtgctttgaggggactacgaatggacacgaatcaacacgaatcaaaacatcttggtgccaatgaagccgctggaccattggtgcccattcgtgtgaattcgtggttctattcccccgagcacggggagctctgccgggtcatcgagacccagacgctctggggcgagaccgtctgccgtgtctggctgccgggcaaggataccgtcgtgcggttgcccgccgcgcgcctccggccagtgcatgaagcaactgtcggcaccgtggacgggatcgcttatctcgccgccgcggcgcgggtggccgatgcgctgacccaggacgttctccttgcgcccatcgaatcgtccgtcatcccgctgccgcatcagattcgagcgctctccagggccatttccaacgaccgcgtgcgctatctcctggcggacgaggtgggcctcggcaagaccattgaggcaggtctcatcatgcgggagctcaagctccggggcctggtgaggcgaacgctggtgatcgccccgaagggcctggtgacccaatgggtagcggagatgcgcacccacttcggggaggagttccgcctgctcatcccgagcgacttctccgcctaccgccgcatcgcccaggaagacaacctctggcagagccatccacaggtggtctgccccatggattcggtgaagcccctggacggccggcgcggctggtccagggaacaggtggccgagtacaaccgggagcgcttcgaggacctgatctccgccggctgggacctggtgatcgtggacgaggcccatcgcctgggtgggagcacggaccaggtggcccgctacaagctcggccaggggctggccgaggcagcgccctacctgctcctgctctccgccacgccgcatcagggcaagaccgaccattaccggcggttgatgtcactccttgatgcggaggcgtttcccgacgaagcgagcatcactaaggaccgggtacagccctatgtcatccgcacggagaagcgccgcgccatcgatgcggaaggcaagccgcttttcaaaccccggcgtacggagctggcaccggtctcctggaaggagcgccaccgggatcaacggctgctctacgaggcggtcaccgaatacgtgcgagaaggctacaaccaggccatcactgagaagcgcagctacatcggattcctcatgatcctgatgcagcgcctggtggtctccagcacccgcgctatccgaaccaccctggagcggcgcctcgaagcgctcgaggcgccccaagaacagctcacactcttccccatggtctccgaggaggactgggccgacctggacggccaggagcagatggacaccctgctcaaaacacgtctcaaggccctgaagaatgaacgggccgaggtgaagctgctcctggaggcggccaagcgctgcgaaagccagggcccggacgccaaggctgaagcgctcctggactggatctaccgcctccaggcggaggaaggcgacccggatctcaaagtgctggtgttcaccgagttcgtgccgacccaggagatgctgtacgagttcctgaccgagcgtggcttcgaggtggtgtgcctcaacggctccatggacctggaggagcgcaagcgggtccaggacgcattcgccaaggatgcccgcatcctcatctcgacggacgccggcggtgaggggctcaacctccagttctgtcatgtggtcatcaactacgacatcccctggaacccgatgcgtctggagcagcgcatcggccgggtggaccgcatcggccagacccatacggtgcgcgccatcaacttcgtgttcgaggattcggtcgagcaccgtgtccgcgaggtcctggaggagaaattggcggtcatcttcgaagagttcggcatcgacaagaccggtgacgtgctcgactctgcccaggcgggccagatcttcgatgatctgtatgtggaggccatcctcaatcccgatgtggtggagacgaaggtcgacgaggtcctgaaaagcatccaggagcaggcccgggagtcccggcagagcgcttccgtgctcggctcgaccgaggacctggaccctcgcgaggcccagcggctgctggcccacccgctcccgcattgggtggagcgcatgacggtaagctacctgcaggctcacggcggcaaggctgagaggaagaacggcgcctgggatctcacctggcccaacggcgagcgactgaccaatgtcgtcttcaccagcaaggaggctgaagagaagcctttgagccgccacttgacgctggaagatcccaaggtgcgtgggctggccatgcgcctacctccctttgccccgggacaaccggtccctgtcatcacgcttcctggccttgccccagagatcatgggtttctggtcgctctggcgaatctcgatctcgaccgtcgactggaatcgtcgccggatcatgcccttgttcctggccgacgacggtcgggtgttcgcgccgaccgcccggcacatctgggatcaactggtgaccactccgcccacgatcctccggcatttggacatcgagacctctcatcaagccttcgatcaactccggggggcggcggaacgacaggggaagacgatctacgacgagctggtgcaggctcaccgggagcgtcttgctcgtgagcgtgagaagggcgagtacgccttcgctgcgcgacgcagagccatcgagcgcatcggactgccccaggtccgtaaccatcgcctgagtctcttggaacaggaggaagaacgcttcagggaacaactcgagcgcagggcccagatcttgccggaaatggcgcccctgcttctcgtccgcgtggagggatgcgcccatgggtagttggcgtgaccaaatcctgagtgagttcacaccccaggtcgccaggcttaccctggtcgcggatccggatggcctgctccttgaagaaggtgtcctcgaagggatccgggaacggggctttgagctgatcccgttcgaggatcatgtcgcctttcgctatgcctacgaatccaagttccgctcccgctgggaccgtggcgagaaaaccgatctggtggtggtgctgagatcgccgtcgagcgatctcgatgccttgccctacgacctgctgcaggctggccgcaagctctcgttcaacctgggcgatctcttcccgaatctcagctaccccgtggtcgcggcgctcgaccgggctgatctcgacgccttgttcgatgcgcagacgaagcacgcgccggggcagctcggcgacaacgctacgaaggagttcgtccttcgtcatgtgttcgagatcgcgccggaactcatcaagcagccatcggacctgctccgggtcttgctgcgccgccattaccgcggacaacgaatcccggccatcctcgatgagcgctttatccaggtgcttcgtcaaaacggcctgttcgaggattggcctctggagaccatcattccggacgcgcaagcattctttgcgttcctgcaggagcgctggccggtgttcctggattcgctcgcaaagccgaaggacgatgccgtccacgaggacgcggcggactccggcttcgagttcccaggaccgacgcttttgcctttcgaccaccacgatgtccgcattttcatcgacaacctattcctcgagggtttgctacagccggttcctcacgagcaatcgcaagcgctcgccaagacctgggtggcttacggcatcaaagtctcccccgtggagaaccgtcgccgccgcgtggaggggctgctggaatccatcgagaagacgatccccacggtggagacgcgtcatggggagtggctccattttgcctaccgttgggcggaactcgtcgccttggagctcgagccggacaccaccctgccggaaggataccgggagcgcctagatgcattgagatcccggatcgattctgcgctcaccggttgggtggtgaagcgctacgcgagcctgatcaaccttccgcccgcgccgccggtgatgctgcatcacatcccgcggttcctcgcccgaagcctcggagacgaccggcgctcgaagatcgcttttctgctggtggacggcctcgccctggaccaatggatcgccttgcgcgaggtgctcggagagctggattcgaagctgcggttccgtgagagcgccgttttcgcctggattcccaccatcacctcggtttcccggcaggccgcctttgccggcaagccaccgatctacttcccaacgagtatccataccacagacaaggagccgggcctttggacgcagttctgggtcgatcaggggctcaacgcaaatgaggtggcttacgccaaggggctgggcgagggggacctggacaaggtctccgagctactgagccggcccaggctacgtgtcgtcggattggtcatcgacaaggtcgaccggatcatgcacggcatggagctgggtgcggcgggcatgcacaaccaggttcggcaatgggccaggcagggtttcatgcgggaccttttcggcctgctttatgaccgcggtttccaggtctaccttgcttcggaccacggaaacatcgaggcgaaaggcgcaggaaggcctgccgaaggggcggttgcggacctgcgcggcgagcgcgtgcgtgtctactccgatcccaggctcagggctcaaatcaaggagcgattcccggagtccttggagtggccctcggtgggcctcccagaggactacctcgccctcatcgctccgaaccgggctgcttttgtgcgggcgggtgaaaccctcgtcggtcatggaggcattagtgtcgaggaactgctcgtccctcttgtccagatcgataggagggaccgatgaacagtcgcctgacccagatcggtttcagccagcgggtccgtcttgaatggctggagagaacggccaacctggtgcttgccggaaacgacgaggcgtccatctacaacgccctccaagagcttttcgaagacaagctgtctgtcggcgggaatgccaaacgcggcaatcgggagaaggtgatcaccatcctgatgaagatctgggtccgccccccgcgcgacctccatccccttcagcgggaaggcctcaagcttctctcacacctgccgcgtgaggaccatatcgcggtccactggggcatggccatggcggtttatccgttctggggggccgtagcggcccatgtggggcgactgctcaggctccagggaacggccgcagccagccaggtacagcgccgcgtgcgggagcaatatggggaacgcggcacggtatccagagcggcacgacgggtgctgcggagcttcgtcgattgggaggtcctgaaggaaacatcggaaaaaggcatctataccgctgggctttcactcgccatagctcaggtggaggttatcgcctggttggccgaggccttcttgcacgctcatcccaacgcttcggtggctttgagaacggtcctcgattccacgagcctgttcccgttccgcctgagccctgtttccgcggctcatctggtcgcggtctccgggcggctcgatgtgctgcgacacggccttgaccaggacttgatcatgctccgcgaggaaagcctgccagcggcgaagggcggcggatcatgacgaaagagatagcacaggcctgaagtggatcggggcgaatgaatggtatgaagccacatatggaaggtcgggccaccgagacatcttcctcgggagatttcttcgacgagtggcttgaggtccgcgactggaccattcggcgtcaccggaagatcctgcttcgcgagaaggatggagcaagggatgcgatcctcgatgacttgcgaaatgtagtacgaagtcattacgtctcccctgagacgatggcagcaaggatcgagcaactgggcgcagacaaaacggctgagctgcttcgggaacatcttcccaccaagaagggctcccgttccggggacctcggtgagatccttgcaacggaattcgtcactcgaaagctcgcctacgaagtgcccatcctacggctccggtggaaggacggcagagagatggcgctgcggggggatgacgtggttgccttccgcagggatgaggacgatagactctcttttctcaaaggggaagccaagagccgcgcgaggctgactcccgatatcgtccaacaggctgcaaacgcgctcgaccaggaccatggacgaccgggtcgtcactccgtccttttcgtcgcggagaggcttcgagaacagggtgcggacgaaatggccgttctactcgagaacgccgttttgaacagcttcagtagttgtgaagtcgagcaccttctgttcacgttctccggcaattcgcctgatgcccacttgtccaaccacctcgaggcgctccgaagcggaagacggcgttacgcagtgggtctgcgaatcgatgaccactgtgatttcatccaagcgatctacgagggtctgtagatgccagagccggttgcaatactcgaatcccgaatccagcgagcgatcgccccaggtttccgcgatcggctcttggacaagggattggctcgcgggctcatctggcgtgatggtgctcttcctccagggtcccctcgcttccccaggacactgacggaagacctgctcgatttcggacacaccgtccttgcgatggcgctccggctgcgaggtgtttccccggacagtccccatctcaaacgagctttcctatgcgcaggcgaagccattgagagtgccgttcaccaaggggagccaggacggactgattccggctttcatcgggtgaccgccgcagtggcctttcaccttgctcgatatgcggctcgcgcctattcgattctgccggatggtaccatcgaaacaaacacatcattctccgagctggctctcgcgcgattgctgcggcgctcgctggacgagctccacgaacagctctcgacatggttgctggacgaggtacatcgtgatgctgcggtagcagaacgtctgcagaccgacgacgactacgatgagtacgatgcgatcgacgacatcctgacgacgtcactcatgcgtggcctcgcgttgttcgatcacgcattgcgtaccggaaccacggcatctgcaaatcgagccaagcaattactactgacgggggcggcggccgccgccgacctccatgtggtccctcactggtggatcctcacccttgctgcccatctcatcgacgagctctgggatcacagcctccatgaacgtctcccgaagctgcctcctgatcatccggatgaacgctggaacggactgcggagagactacattcatcgcctccgcagaaacagccgagctgcaatcgaactctggccatcacagatcacggcagccgagcgcgccattgatcccgcagacgacctgatcatcgccttgccgaccagcgctgggaagacgcgaattgcggagctctgtatcctcagggctctggcggctggcaaacgtgtcgtgtacgtgactccattgcgagcgctgtccgctcaagtcgaacgggacctctccgataccttcgttcctctggggttccccgtatcttccttgtacggatcggccggggtcgaagccgctgacgcagacacgctacgtacgaaggagatcgtcgtatcgacacccgagaaactggacttcgctcttcgaaacgacccgacgatcatcgacgacgtcggtttgatcgtcctcgacgaagggcacatgctcgggcccggggagcgggaggtgcggtacgaggccctggtgcagcgtctcctccggcgagatgacgcaggtgatcgacgtatcgtgtgcctgtcggcattgttcccagagacggagaagatgaccgacttggtggcatggattcgacgtgataggcccggagaacccgtacattccgaatggcgaccgacccgacagcgattcggatggatccaatgggagggtcgcgctgcgcggcttcaggtccgagtcgaggaagaggagtcgtatgtcccgcgattcgttgaagccaaacctcccccgtcaggttcgaggaggaggaatacctttccccagaacaagaacgaattgacacttgcgacggcatggcagtttgctggccatggtaaggacgtcatgatctattgtgctcgcagagactcggtggagtctctcggaaaactcattctcaagtgtggacgtcaaggagtgctttcgcggctcggggatgtcacgccgcgtatccgtgaggtgatggccactggaaaagagtggcttgggccgaatcatccggcagttcggtgcttggaatacggtgtcgcactccaccacggaggtttgcctcgtcagttcctctcggaggtcgaacggctgctacggtcgggagattgtcgtgtgaccatcgcatcaccgacccttgctcaaggactcaatctgtctgcaagcgtgcttctcgttccatcgatatggcgtacccagggagagaagatctcaccagtggagttcgcaaacgtggccggccgtgcgggacgggcgttcgtggacttggaaggattggtgcttcatgtcgtatgggagaggaatcaaaggaagagaaggtgggtgatccaacaatgggaagaactcgtagcacaggcgagggcttccgagatcgaaagcgggttactccgtcttacagctttgcttttcgagcgaatcgcaagagctgcagatgtctcgattgaggaggtcatcgaatacgtaactggccacggagaagcgtgggattacacggaactcgtgggtgagcgcaccgaagtctccgagtccgaatgggaacgtgatgccgcgtcgctggatgcggcaatattgggtctcctcgatgtcgagacagccattgatgaaatcgagcgacagctcgatgtcgtgctcgacggctctctctttactcggcagatcgcaagacaggaagcccgcatccaggatctcatccgtcgattcctcgcagcgagggccaggttgatctggtcgcgcacgacaacggcacaacggaggggctaccaggttgcgggtctcggtctacgaggtggtcgttttttggacgagcacatggaagagctggttggagcactccttgcagcagagactatgatcgatggcagcgacgagacgagtgcagcggacgccatcgtacaattcgctggtctggtgttccaaacggttccgtttcgacccaccaagatgccagatgcttggcgggatgcgctccatgcctggatttccggaagaccggctgcagaagtcgtcgacattggaggtgaggaaggtatcgactttcttcaggacgcggtgatgtaccgactcgcctgggcaatggaggccgtgcgcgtacacgctaccacgataggacatgacggtgcagataacattcgtgggctcgctgcaatggccgttgaagcagggagtgccaacccgtcggtgataacgttgcttcgttcggggctgaactcgagggacgtggccaaggcggccgtcgagtcgaccggtgccaacttcgtagataggacggggatgctgggctggctggaatccgacgaagtccaaacccgaagtagagaggaagactggccgacgcctgaaggacgctccacctggctccgtttcatcgaaacgatcaggcaaggtaatcgagttcgatggagtcgatccaggcagacggtagacgtagattggctcgacccggcctcaccacctgaaccaggatctcacgtcatcgtggagaccactaccgatccacaaggtggtggatgggtattgcagccagatttcacaccgcttggacggcttcgttctcctctcgaacgcccgcgagaggatatagtcgatgcgcgtgtcggacgacaaccaagtacggtacgcattgagttcttcggcccgcgcggtgtccggtgaggaaacggattggagtcattggtaggcagactgtcaccgaaccttagtgcgcgaagaccatgaaatacccaaaaggaggatggagacgatgccaagacgtaagacttaccatgtgactcctcggaccgacggcggctggaacgtgaaagaggaaaatgcgtcaagggcgtccagcagccacgacaccaaggccgaggccatagcccgtgccaaggaattggcgaagaagcaggcgcttggacaggtgatcattcacaagcaggacggtacgatccagacggaacacacatacggcaaggatccgcatccgcccaaagggtaacagggacgtttcggatgagcttccgcttctggagacgaatcaggatcgcaccgggcgtgaccctgaacctgagcaagtcaggcgggtcactctcgttcgggccgcgcggggcgaagttcaccatcggtccgaggggcaagcgggccacggtgggcattccgggaacaggccttttctacacgaccacggttccgagtgggagatccagcggtaggagaagcgcgtcctactccgctccggccctcccaacggtccacccggaagaccgcctgaccctgggcttcttcaagcggcttatcacgccggacgacgaggaggccctggtggacgggtgccgggagttggtgctggggaatgaggacaaggcgcttcagtaccttgaacaggcgactcacctggccgacggcgcgtacctcgccggtttcctggcgctcaagaaggagcggctggaagaagctgcgaactacctggcgacggccgccgagaaacacagccgcctgggccgctacttctccaagtacggcatctccgccaccatgagcctccccattacagacgaggtgtccgcgcatgtgggcccggatctccgcggcgtgctgttgggcctggtggaggtctatcagcgtcaggagcgctgggaggatgcgattgcctgcctggagcgcttgcggcggctcgaacccgacgacgtggtggtgaagctgtccctcgcggagctgctgttggacgcccgcccgggcgacaagaacgtctgccggaagatcgtgcggttgaccgagggcatcgagaacgagagcccggtccacaccgcgctgctgctgtacaaggccagggccctgcgcgggctcggacttccggacgcagcgcgggagaccttgaccggcgccctgcgccggaagaagggccgctccgaggagctgctccgggcgctcaggtacgaacgggccctggtctacgaggacctcggccagcgccggcgggcacgcagcgagatcgagaagctctacgccgaggacccggattacgaggatgtagcgacccggttggagctgtgacaagctgtgacacggagctgtgacatcccatgcttgcgacaaacttgcgacacggcttgcgacatccggctcaggccggacgggaggaaatccgaatcaaggccgtttccgccccctcggggatgtgctgctctttgaaaagatattgtgtatcaatgggttaggtgatatcctggcagtggagagtggttatgaagagggttgcactcggggagccaggtattttccgcgtaatttgcgcggttgattggttgacgcagcgccccggagagtattcctttccggggcgtcgccttttcggccgatattcacggcattcccagccatctcgccgccattaagttattcccatttgggggacaggtgccaggtaaaaattccgtcgggtttgacttggccggaaccgcagacgagcagtccttcatggccaccctgccgcgccacacatcaatcgtttgtgaataatgacgaggttgcaggagcatggcgccccgtgcccacgtccccgaagaacaatttggtgcccccgtatacggttccattcccccatcgtcccgcgttccaatccgccgttactagacacatcaacgctccgcggggcacgcccggagcccaacctggcaagtccatgattacggacgcgtcatccgcgacgaagatgaatcgaaccggattcgccgacacatccttgatcgtcccgcgcgctggtgcttgatgatgcaatccgcacccgtccgggaaagccctcctcccgatgaacaacgtcgcttcgcgcctccagccaccagggaaaagccgctctcccataccacgcgcgactttgccaggaagcgcgcgttacatggtgttccaccgaccgggaggggtgttttatactgtgacgaagttcaatgaccggaggtaatggcgtggctattccaacatttagtgatatcatgcttccccttctcaaactgatgggggatggaacagcgcggacgctacaccaatgtcaagacatcctggctgatcagtttcatctgacagcggaagaacgggagcggcggttttccagcgaccggcgggtgttcgataatcgggtacgttgggcgcgcacatatctcgggaaggcggccctgctgcaatccaccggtaagggcatcatacaaatcacgcctaggggcctgcaggctctctctgacccgccagacagaattaccaccgaatacctgaagcagttcgaggagtttcgagaatttatggcgcgttcccggaggctttctaaaaatggccaaactaaagaaacggaaagcccacgcgaggaaacaccggaggaaatgattgaatcggcttatgcccgacacctggaatcgctgagtgacgatctactggaaaaagtgaaggagatgccgccagcattctttgaacacctggtgacacagttgcttctggcaatgggatacggcaagggactgaccacagcgggatccgtgaccggcggatccggggacgagggcatcgatggcatcatcaacgaggacaaactcgggctggacgtgatctacatccaagcgaaacggtggaccagccccgtaggccgtcctgaaatccagcggttcgtgggtgccctgcacggcaaacacgcccaaaaaggggtgtttatcacgacgtctactttcagccaggaggccagggactacgtgaaaaccctgaatctgaaagtcgtgctggtggatggcaagaccctggcgcgcctcatggttgactacaacgtgggagttttcgcaaaagccacctacgtgttgaaatccatagatcgagactttttcgagggcccggagtgagcagcccatgaaccccgatcaactcgtgaaatttttgccgttcgtctccatgtttcagcagcatcccctgttgctgcttacggtgggagcaatggtcatcctgacctttatcggtcgattgcccggggtaaagggctggatcggcgagaccctcatgcgtctccagttcagcctgttcctgccagaaacatcctaccgggtcattaacaacgtcaccatcccggataaccagggaggcaccacgcagatcgatcacgttattgtctcgccctacggcattttcgtcgtggaaaccaagcactacaaaggctggatattcggcgacccacagcaaccgacgtggacccagatgatccacaagcgccacaagcagaaatttcagaatccgttgcgccagaattacaagcacacggaatgcctgaaatcgctcctggatcttcccggcgacctggttaaatccgtggtggttttcacgggcgactgcacgcttaagacgcgcgataaactgccggattatgtaacccagcccctcagttgcgtgcggtacatcagaaaacatcgggcggtcctgatcgacaaggacacggtcgacgctatcgaatccgctatccgggaaaaacggctgagccctgggtggaagaccgcccggcagcacaaggcgtacgtccgctcgatccatgccacgccgcgacaaactgccgtgtccacgaccgggtcgcgcaatcctgccgaagccgccacaagcaatccggcctgcaccggaaacatcaggccatccagggtaccaggacggcctggcggatcacccggcactacccccgtccgcgagcgcgctcccgaggttgccgcgcccaccctgcccgcgccaggctaccgggtcaagccccggggaccaggtcaaccgaaaccataaagcaccctacggttgcacgcgcgttgtcgtgaaggggcaaaccgtttccgcgcagggcggcgcgggatgaccgctcccatgcctgtcacgcttcacggtcgggaggggacagggacggttccatggcttcgcggagagccaagcggatcagttcgaccggggggatgccggatggaccgtggtcacccaggtaaacccggcagccgaaaaaaggcggatcctccgcgcgggcggattcgatgtcccgcccgttgacctggatgctgggggagcccaggaaccgttcctgaacggcctgcccgggactggtcacctcgaccatttcgatcggaccgtcgattcccgcttccctgatcacggtttcaaggcgttccagggcgggccggctgttgggacagccctcaaaatacaaaaaacggatcttcatgacggctccttctcgaggccaacgtttcagcaccgttccatctttttgcgtcccgctccggcgcgcgcgctccccgtcacggttcgccggcttcccgcagcgcgccttccagcgcgtcgaactccggcggtatatagatgggcgccgcggcatgttccgcgaaaaagggcaagtctttcaggccgtgaccggtcagcaggcagcagacccgcgatcccgggaacatcgcggccagccgggacaacgcggcaaacgccgccgcggcggttggttccgccatcagcccttcttcgcgcgccaaggccagggcggcttcgcggatggcctggtcggtaacgtcgagcgccacgccgtcggtgtcgcgcagggcgggcagcacggtgtgcgcgtcgaacaggatgtcgtccgctatgcctccggcaatggtttccgggtgaggccatgggcgggacagggcctcgagcggcgtccatccctcgcgcagggccctgaccaggggggcgcacccggcggcctgaatcccggccagcctgggcagccgatcgatctttcccgcgcgtcgcaggtcgagcagcccgcgccagatgcctcccagcaggcctcccccccccacgggcaccacgatccagtccggcaacctaccgtcatactgccgccagagttcgtaggcgatggtccgcgcgccctcgacattggcgggcgcgtagatccccgccgtggacaggtgggcccagccgaaccgcgcgcaggcctcacggcacagggtaaatacccggtcgggcgacggacaggccacgcggaacacccgcgccccgcaggccgccgcctgggcgatcttgccggcaccggcatgggcatgcatgaacagcacggcccgcatgcccgcccgggcgcaatacgccgcggttgccacgccgacattacccgaggacaccacggcggccacccggtatcccgcttcgcgggcacaggaaacccccacggacacctgtcgatccttgaaggatcccgtgggattggccgcctcgttcttgacgcgtaactcggcaagcccgagccgccgcccgagccggggcgcgggcaccaggggcgttgccccttcgccaagggtcaccacgcccgccggatcccgtaccggcaggagagacgcgtagtcccacatggaccggggatcctggtcaaacagatccgccggggccgggaccgaggggcttaaccccatgggcgtgccacagcgggagcacctggccggctccatgggcatgggaacccggtcgcgcgcgccgcacgcgtaacattccacatcccatgcccggggcatcctggtggaggcgttcatgggcaataccatatgccgtccaggcgcgcggcgacaacttcccgggacgtcgcgcgggggaagcggtccaacccggaatggtaagatgatcccggacttcaactggagctctgcaaggataccggcatgcgacaaaccctccggcgaaccgtcacgatgatatgcgtgggcgtgggatgcctgtccccgggaccgtggagtcatggagacaccgccgcgccggaaacctttgttctctggaatgcatccgcccctgcccgggaatgccagttccacgggacagccgcggagggaccggcggagaacggaccaggactacgggtccgtttcgatcccgtggactggccccagttgctttttaccgcgtcgagcgacccgtgggactggagccactgggaaggcatgcgggtttccctgcggaaccttgaacagcgaccctgtcgcgtcggcctgagggtagacaaccccggcgcggacggacaatccctcagtaacacgcggaccctctcgctgggtccgggccaatccgccacgctggttatgcagtttcgcaccccggaaacggacaatctctggggcatgcgcggcctgcccggattgtcccaactggcggaggggacggccatcgacctcgcgcggattgtcgctttccaggtttttctccacaaaccagaccagccgcaccgcctggtgatcgggccgattgaactgttccgggcagccgggggggcgcacccggctgcattgcctttcgtggatcgcttcggccagtatcgacacgccgactggccaggcaagttaatcgacccgaaccagtggaaaacccgggaagccgaagaacaggccgcctgggccaccgccccggaagtaccgggacgggaccggttcggcggatggatagatggtccccgcctcgaggcgacggggcggttccacgtggaaaaagtggacgggaaatggtggctggtcacgccggacggcacgttgtttttcagcgccggagtgaactgcgtgcgactgggtgattacaccttcgtcgaaaagcgggagccctggtttgaatggctgccagccgaaggagaaccagaagccgcgttctactcccgggccagcggcgcccacagtcacgccgagcccattggcggcgcgggccgcacctttgatttcttctcgtgcaatctgtggcggcggtacggagaaaactggcgggaacgctgggccgagatcaccggtaaacgcctcaggcactggggcttcaacacggttgccaactggagcgactggcgcgtggcggcgcggcatggcattccctatgtcgcgggcaccagcctggggggggcgccggtagtcgagggcgccacggggtactggggaaaaatgtacgacccgtaccacccgaagtttgcggaactggtcaatgagcgggtggaacaactggcccgggatcacgccgccaatcccctgtgcctggggttcttcgtggacaacgaactggcctgggaaggcgtccgctacggcgtgctggccagtccggaacaacagcccgcgcgggaagccctggtccgcctgctgcgggaacggtacggatccctcgacgccctgaatgccgcctggcagaccgatttcaccgactggacctccctgtccaagccccggcgaatcaacaagacctgtcgcgacgacctggacgcgttcctgctggacttcgcgcgtgtctacttccgggtaatccgggaagccatggaccggcacgcgccgggtaccctttacctgggttgccggttcgcgtgggtggaggacgcggccgtccaggccgcggcggaattcgcggacgtgttgtcgtttaatatttaccagaagaccccggcgcttccgaagatcatggaaaacatcgacaagccagtcgtcatcggcgagtttcatttcggcgcgctggaccgcggcatgttccacacgggcctggtagccgcggcatcccaggaagaacgggcggccctgtatgaaaattacctgcgcgaagcggccacgcatcccaagatcgtcggcacgcactggttccagtttattgatgaacctatcaccggccgctggtacgacggagagaattacaacatcggcctggtatcggtcgtggacttgccatacccggaactgacggaagccgcccgccggatccatggcgcgctctacgctttacgggccggcagaaccatggagaagaaaccgtgaatgtcagacacacgggggttctgttcacgggcgcggccatcgcgctgctcgcgtggcatgcctggtcccaggagagccgggtctccggggtggtggcctttccggatagccggcaggatttcaccggcgtccggattttcctggagccgggcatcgacggcgccctggaagaaacccatcctgacccttccggacaattcgcgttctcagggccatacgtcggaccgataggcctgctggccatcgcgccgggattcggatggaccggccggcacctgaacttgagcccgggcgaatcggtaaacgacgtccggctggtgttgcgacctgccgtcaccctgtcgggacaggtcgtggactcaaaaggaaaacccgtcgcggatgccgtggtgctccgggcggccgtgaccgagccgttcaaggtgggcatccccttttcaaaattatcgggcctgggttttggggacatccggtcggacgccagcggacgcttcaccgttccgggactcccggcgggaagcctggtagcgctgaaactggcccatccctcccacgcgcagaccgccacgcctgcccgcccggtcggtgaaaccgtgaccgtgacgctttcaccgggcgtgctggtctcgggcgaagtggtcgaccgggccctgcagagccgggtcgccggggcccgggttaccctgcgcaacgcaagcccgccccacgataccgtgtccctggagacggatacccagggcctgttcatgacgcgcctgaaccccggtgtctacctggcccgggccgaggcaacagaccgactgagtcccggctggcaggaaatcacgattaccggggaaacccccgaaacccgtttgcgcctgccggtgagccgggcgggatccatatcgggctccctggcggacgcgatcacgggcgcgccggtcgagggcgcgcgggtgcgggtggagtgcggcggattcaccgcggccatcgcgcgcacggacgcccggggcgcgttcaaggtaacggcttcggagggcgagaacgtcgtctactttgaagggacccccggatacctgccaccggaacccagggctgtacgggtcatggtcccgtccgggcagaacgtggccctgccgggcgtgtggctcgctcccctgcccgaattcgaaacccgcctggtggtggacgacgatcaaaagcccgtggccggggcggtggtggccccgctcgaaccgcggcagttaggctgggtcatcgcggacgcggacggcaccgcgcgattccgggtaaaccggatgcccgagagcggcaaggtcaccgccatggcctggcaccccacggaacggcaggccgccctgttcgccctggatcgtgcccggcccaaaaacaacctggtccggttgctgccctgcgcccatgtccgggggaaggtgctcctgccggatggttctcccgccgcaggcgtgaccgttggcgcggtatacggcgcggaaggacttgaagaaccgctggtgttgtggcgcgcggtcaccgacgcgtccggcggatttgcctggccggcggtggtgcccggcattccacaacgggtggtggcgctggcagcggatggcacggaactcgtcctgggggacatcaacgccgctcccgggcaatccctggaactgcccgccggaacgctagcgggcggcggccgccaggcggcgtctccggtgccccctgaggttcttgccgcgcgattgcgggaacacatccagggccccgccctggtggtcgcgctgggtgacgcctccaccctgacggcgtggacggagaccctggcggcagtatgccgcgtcgtgccggacatccagggcgccgtggctgccgacgcgacagggcgcgcggacgcgggcgcggcagttcggatcctgcccaccctgccggccggaacgttgccccccggcgtggacaccatcctgttggaccgccaaggccagactgtcgtggtcacggcgggcctgccacccctgttcctggtccgggaagccgcacgatgaatccggaaaagctgcgaggcactggttttctgctgctgatcgcgtggggcgtcacctgcctggccgtcgcggatggcatcacgctgcgcggcgtggttaccgacccgtccggcattcccgtggcgggagcacaggtatggtccggacagttccgcatggcccgggtgacgcgaacggatcgtgaagggcgctttgcttttgacgggcttcgtttcgcgcccatggaagtggtcaccctggcggagggtttctccttcgcggggtggaacggtctcccgttgccggaccgggacctgaccctcgtgataagcccggaacgccgtcggatggatctgcggataaccgacgaggccttcaagcccctgcccggcgcatggatcaaggccctgtcgccaggaggactgtataccatcaccgtggaagattacgcgcccctgggcttcccccccatgcgggctgatgacgacggcgtcattaccattgacgcgttgccacccgtggatcacgcgcgggtcgtgctgggacatctgaaatacgcggacacgatggtaaattacctgcccgttcgggaaggtcaccgcaaccacgcgcaaatggaacccggcaataccctgcgcggacgggtcacggacggaaaccagggggtcgcgggtatgcgggttcgggttttccagcctggcgtgggtggaacgatcgtgctggccgagggtctcactgatcccgagggttatttctcgctgcgggttccgccgggatcgtactacgcggcatgcctggggcatggggaccgcgcggatcccgagcccgtggcggtggacctgtccgccagcgacgccaccgtgaacttctccctgccggaaacccgcaccctgcggggacaggtccaggacgcgtccggaaaacccgtgccgctggcccggctggtgttccgcaagggtgacctggaacttgccgagtccctgtcggacctggaaggacatttcaccctccacgtcggcgcgccggaaggagacgtgatcgtgcagccgccagcgggactgcgtacccgggcccttccggtcattcccacgcggttcgaatcggccaccgaaatgaatattccaccggtggtgctgttgccgttacccgtgattaccgggcgcgtccgcctcccggatggcgtgaccgatcctcccctggcgctggtctcctcgctttcgctcgaaccggtggcgcgggcggtcaccgactcgcaagggcgtttcagtatcgcgctggggtatcagcccgagaacaaccgggccacgttccgggtggagcacgcgctgcgcatgttgcgtcgggacttcacggtcaacctcgaccagcagggcgaggtcgaactggcactggaacctttccaacccgagctggaaaaccgtccccccattcccggccagaacgacctgaaaagtaaactggggcgacccgcgcccgccctggaatgttcccgatggttcaacattcagccggaaaaggccacaaccctgggcggacgcgtgaccgtcgtcaccttctggggcatgttcgacgacagtccgcaggggctggaccgtttgtatgagatgcaagccctgtatgacctgtaccgcgacgtggaagatgtcgttatcctgacggtgcacgatgccagtgaagatgccgaggcactggattacttcctgacccgccagggcatccgcttcccggtcggcctggacgccgaaccctcgaaaaccttctcggcatatggcatccggttcattcccgaaacggtagtaatcgatccgaagggggtgctgcgatacgatcgcgtggaaggacgcctgctggaactggtaaaaagcctgcgccgggaacgataaccctccaccgccctgggacggcatatcctgactcggaagacggccagaacgtcaacggcgacgcggttcggggaagacggtcggggcgtcaaccgggatcacgcagcggaatcccagggtgttttcccgggattcagggaaaaatccccggcgaaacgtggtcagcagttcttccgggggcgagttccagcagcccccccggaccgcccgttgcgggtacttcgcagccgattccagatcccgtaacgcgagttcatagggaacgaacggatccattgtccattcgtagacgttgcccgccaggtccacgataccttccggtgtctgtccctcctcgtgcaggaacaccacgctgggcatgcccaggtgatccccaaagttacacagggatggattcggaggggtgttgccccacgggtaccgccggttctcaaaaccccgggcggcgaattcccactgcgcttcggtcggcagggtcttgcccgcccagcgggcataggccagggcctcccgccatgacacgccgaccacgggctggtcaggaccgttgaacagcgcgtcccgccagaaccggggctcggaagcgccggtttccctgagataccgggcgtactgggcgacggtaacgggatggatatccatccagaatggtcccacttcggcttcgaattccggggcctgttcccgcaccgcgttattacccatgagaaaacggcccccactgaggaacaccatgccggacgtgtccgccttgcgggcggccacatccggacgcgcgtccgtggcgggtgtgatcacctccggcgggcgataggcggaccacgcgcgactgagcgcctctcggaaagccgccgccgaaggccaacgcgcgtcgggatcctccgctagggcgcgccggagggtttccagcagcgatggcgccacgtcctggcggagctgctccacgggcggattgtcctcgaggggcgtccgtaacgtcagcatttcccggagcacgaggcccacagcgtacaggtctgacgcggccgttaccggcttgaaggccttctgttccggggacgcgtaggccagcgtcccaaccacccgtttcttccgggttccctggtctttttccagttcctcgagggcccgagccaggccaaaatccaacagtttcacccgttcgttcggttccacgaagatgttttcgggcttgatatcccggtggaccaccagcctgtgggcgtagtcgagggccgccaggatctggtccgtcacccgcaaggcgaaacgtacttccgggtagcgcctggccttgcggtactcgttgagcgtcttgcgcagggaacgtccccgggcaaattccatggagatgtacggcacgccgtcaggagtaaagttgatgtcatggacggcgatgatgtgttcgtgccggagtttccgggatacttgggcctcctgcagaaacatccgcagggccttttcggtggccagcagggcgggatgcatgaacttcagggcaacttcctcaccggtcaggccatcgtgagcccggaacacgatgcccatgccaccttccccgactttttccaccaggcggtatcgcccggacacgatgtcgcccggggcgtactgggtggttccagcccggggctcgtcgggtactaccagcaggtgcccgcatccgaagcataccccttttttcccttgaacggtggggggaaccaggatgcgaaggccgcaatgaggacatacaacagggatcatagaacagaccagtttacaggattccagggggggatcacaacaaagttgcgaagaaaaatgataatgatttatcattaacaggctggttcaatgctaaggagcatgacatggtttccgcggtaagactcatgctgactggccggtggattctgagtagtatggtcgggatcgccgcaatgtgcctcgtcgtgaccggatgctctggtgacccgaaaaccagaactacagagtcacaggaagattccggaacaggaccactcgttatcgccgttaccgtggcgccgcttaactggctggtctccacgttgggaagtgacgcggcgcgcgccgtcaccgtggttccccccggacagaatcacgaaacctgggaacccgccccgggacacatggataccctggcccgggcggcggtttactttgagtccggcatgcccttcgaagaaccgttgattgaacggttgcgggggttgaacccttccctggaggccgtgtgcctgctggacgcggtaaccgaaaagattcccccgccccagatcgcgccggaggaggcgcgcgacacgaaacccgaagaggaccatggggagccgcgccaggatctccacggtggggaagcccatgaccatggccacgatcatggggacggagaccctcatttctggacggatccccaggccatgatctgtgccgcggaacggattgccgaggtgctgtcgcgacacctgcccgaacaggctgacagcatccgggaaaaactggaaaccgtccgccgggacctgcagcaactggacacggagattgccggcatgctcgagcctgttaaaggaagaccatattacgtgttccacccggaaacgggatggtttgcccgccggtacggcctggttgagcgggccgtggagcagcatgggaaaaccccgggggcgcgggacctggacgcgttagcccgggaaataggcgcgtcgggcgtcaccgccctgatcacccagccagggtaccccgcgtccgaaatgaaggctctggcgcgacagttgaacctgcgggtcctggaagtcaacctgaaccgtccggactatcccgaagcgattcgcgccctggcccaggcgacacgtgaaagttttgcccccgccgcgccgtgacgcgcctcgcgaaccttataatgggggcacaaaaataaaccgggggatacgctgtgagcacttcaaccatgcctgcgccagtcgcggcggacccgcggggtgagtccgcggcggcggaggtccggaacgtcaccttcgcgtacgagcggcgtgaaccgatcctcgtggacatttccctggtcgtgccgcggggaggttgcgtgacgctggtagggcccaacggtggcggaaagaccacgttgctgaagctcatgctgggcctgctggaaccccggcggggcatggtgttcctgctgggagggcctccggagcaaacccgcccgcgggccggttacgtgccgcaacggctacagtgtgacacgctgtttcccatcacggtccaggaagtggtagggatgggactgctgaaccatcctggggccggcaaccggcacgcgcggcgggaacgggtgtttcatgccctggaaacggcgggcatcgcggacctggcccgtaaatcctttggtgaactgtcggggggacagcagcagcggaccctgatcgcccgggccctggtaagcaacccggaaatcctgttcctggatgaaccgacggccgcagtggacccggcctcgcgggccgcgctgctggacctgctggagaccacccggcgggaccgcgcgatggtgctggtcacccatgacgtggaagtggcggaacgctttctggaagcggtgtactgcgtgcatcgcacgattcaccatcaccgggtcgctcacatggacagcggcctgttgcggcacatgacggggggagggctcgcggatcatgattgaagtgctggcgaccatggcgggatcggtgatcttccgacacgcgctggcggcgctgacccttgccggggtagcggggggcacggtgggcgcctacgtggtcacccgccggctgggctacatcgccggtgggattgcccatgccgccctcggtggcattggcgcggcggaatacctgcgggccacccggggatggacgtggctgcatccgctctggggcgcggtgaccgcggccatcctgtcggccctgctgatcgcctgggtggcgcagcggtggcgggaacgggaagacacgctgatcggcctgatgtggtccacgggaatggccgtgggcatcctgttgctgtacctgacccccgggtacagccgcgatctctcggcatacctgttcggcaacattctcatggccgggccccgggagatcgggatcatggccgggctggacctggtgatcctgggaaccgtcgggtggtattttcagcccttcctcgcgctatgtttcgatacggagtatgcccggttgcggggactacccgcggaacgatattacagtgtcctgctgatcctggtggcgctgaccgtggtggcgctgaccgtggtggcgggggtagtgctatccatcgcactgctgacgctgccggcggcggcggcggcccgaatggcccggcgactggacagcgtgatggtgatgggcgtggcgtactcggtaacctgcggcgtgctggggatggccgccagttacctgtggaatttgccgtccgggccggttatcgtgctggttaacggcatcggttaccttgccctgttatggttccggcgctgaagaggatacgcccggtcaatgattcaacctattgttaattggtgcttatgctgaaactggtggccaagttgtgcctcgtgcaaattatcgcttgactttttctccaagttgtgctagactctttatagtcaacgataacctaggagatggccatgagcaggcacggtcatgatcgcgggataactttccttttctgtgtgtgcgccctggcggtgctggtgttatcgccagacgcctttgccgtaaagcgcatcctgctggtgggcgacagttgggcgcagtggccctggaacatgggatcctaccagtcggtgctcaactacaattacggcgcgggcacttacgaggtggagggcacctacacggctatcggcggatccacggtggacatgtgggccaacaacgccgtgcctcctgagagcagttttccttcgccaccgggctacaccaacatgcccctgctggaccggatcaactggtcgctggcccagtggccgaccatcgatatcatctgcctgtccatcaccggtaatgacatgtggtcctggcgggccgactggacgccggcacagaccgaagccctgtatgactctatccagcaagacctggaaacgctggtcaactggttccggaccaatcatcccaccaagaaaatcctgcacatcggctacgactacctgaacatcaccgagacctgtacctacgggatgcaggaattctcctggaactccgtgtacttcgcggcaggtcttgggttcaccgtgggggacatctggcagaacaaggcgaacaaccaggtcattaaccagttcttcgtgggcatgggcacgcggaacaagaatgtcgccctggccacgccccgctgggacttcctgaacaatttcggcgcgaatcactacgcgaacgggtacaccaactcgctcgggaccattttcaacccgggtaccacgccgttcccgggttactaccccgcgtacacgcccatggcgggcggggatatttcctacggcaccgccccgatgcagatgaacaagccagaggcgaacaagaattaccgggatccgattcatctcaacgaccagggctacaaaaccctgttcaacaatgccgtcatgcaattcctgaacggctggctgaccgatacttccgcgcccgtcgcgctgtctatcaaccgcgggaacccgtcgccgaccgaggcgaacgaggtcacgttcgtggtgaccttcaacgaagcggtgcggggcgtggacgtctcggatttcgccctgaccggctcttcggcgtccggggcctccatcactgccgtggaagggaacgatgacacggcgacccgcacggtgcgcgtggatatttccggcgcccccaatggtaccctggggctgaacctgctggacgacggttccatttacgataaaaactggaaccagctgggtggcgaaggcgcgaacaacggcgccttcacaaccggtcagacctacctcatcgaccgcaacgatcccgttgccacgattacgccgcgtgttcctgaaccaaccacccagacctcggttacctttgacgtggtgttcaacaaggacgtgtcgggtttcacggcggacgacctgatcgtcctggttcaaagcggccagggcacggcgtgggtgaccaacttcgcgggaagcggcgcgtcgtattcgttctccctgctcgtcagccggacccagaccattaccgtctccgtgcagattccggcgggcgcggcaacggacgccatgggtcgatcttctcttccggcttcatacctggatggcgcggacaacgcatacacctttgagtatcctggcggcccggtatcggacggcgacatttacctcagtgacggatcgctgggcgatcttaccgtttcctccggatcggtgaccatcaataccggcacgaccccacccttcctgcaggcgggatccagcccggcggtatacggacagattctcagcaccagtgccggaaacgtggccaagttcaacttccgtaacgtgtccgtgagtaatggcgtgaccgtgtccgtcacgggcaaccggccgctggtactggccgcttccggcgacatgacctggaacaccacgctggacgtgtccggcgcggtggcgggtcgcgcgggcggtggcgcggggggcgccggaggttcggccggtagcgggggcgccggtggagcgggcggaagcagtaacggcgcggggggcgcgctcgcgcccggtggagccggggggaacattggcatgtgggtagatggcgtgctggggaagggagcccacggcgcgggcaggaacagcggctctgacggtgcttccggggccgcggggaacgcgggacaacagggcggcacgggcggaaatggttcattgggattcggctccatgggtaccgccggtgtcgggggcgcgcgaggaagtggcggctcgccccagagcgtgaccaacggtggcgcgggtggcgtgacctccgggggtaacggcggcggcggtgatccacaacttgggccgaatagcggatatcctggaggtaacgcgtgggcggacggtgtcgatggtggaaatggcagtgccggcgcgcagggcgggtcgggtagccatggcagcccgggtacgcccgcttcattcacggtggcggccaacacccttgggctcgcggcgggtcacgggggtggtggtggcggtggtggtggtgggggggccggtggccagggcggcggcaagggtggcggtggatccagtggcgcggggggtggcggtggtggccttgcgtacaactcctgggttgcccagtgtaacgtcccgatagatggtaacggcggcaacggcgggaatggcggcgcggggggcgccggcgggaatggcggcaacggcggcgcgggaggcaacggcggcgcggggggtgccggcgggaatggcggtggcgtggcggtgctggccgccagggggattctgcggttcgggggaaccgtgaatatttcctcatccgcgccgggcgccggggccgtggggaacgcgggccttgccggcaatggcggcacggatccgggcaacaactggcagaatggatccggaggcgcgggaggcgccacgggggtatattgggtgacgttttatggatgctggcctcaagcgaacaatggtggggcgggcggaaacggtacccgcggtggacggggcggcattggcggccccggcggttccggtggaagcggtggcaatggtgcgcccggtggcctgggcacgccgggcatggtcaagttgcacgggtcggtggtgctggccgacagtggatatatcgaatgcaacaatcacaccgccaacacctccgacacctataaaggtcgggcaacgattatcagcaacatgaccagtccgcccctgccggtgttcagcgatgactacctgctgggctacgccaccaacaacagcgtgttgcgcgcctccgcgccgtacgacgaatcgatccaggtgcccctgcagggagacctggcgaacaacacggtggccaccggcgggttcctgaagccgggcttctggaaccagaccacctacctggccaaccggctgggttccccaaccattgaagtggtggccctgcggaacgccaattcgccgttcaacgggttcgaccagattttcgtgaccaacaatggcgcaacagttcaggacaacgtgactattttcgtggacggttgcgatcccttcgtgatcggcacgatggccccgggacaggtatggtccacgaccgttcccgcgggacgcaacgtgttggcgtatacccagttgcaggcgtccatcaacgagtcgcagatcaacacctaccttggcgcctccttcacgctgaccgcaaccgtcagcggtggcgcgacgccccgggtgacgcggtggcgacgcaatggccttaccgtgacgagcggctgggaccagtacaccttcacggttaacccggtgctggcctcgcacgccgggcagtataccctcgaagtcaccgacggcgtgggccaggtggtggtgaccgatccgcccgtgccggtcacggtcaatgcgccggtgagcatcacgacgcagccccagagcgcgtcgatcgtgcaggggggtaacgtggtgttcaccgtggccgccacgggtggctacccgccgttgagttacgactggcgcaaggatggcgtgagccttggaaagcccagcctgccgtaccttgccctgggtccggttaccccggcggacgcgggcacctacgatgtggttatcacggacgcccttggcgtgccggtattcgggcaggtgaccagcgcgggggcggtactcacggtgaccacgccgctggccatcgccgcgcagccggtttcggtgatcgcgtacgcagacgaaccccaggccgtgttcagcgtcacggcccagggtggcacgccgccgtacgcgtacacgtggctgaaagacggcacgccgctgcccccggcggaacagccgaacggtccgacccttaccctgaacgcgcccctggcgtcccgcgcgggctcctaccgttgcgtggtgaccgacaactacgcgcctcccgccgaggtacaatctgatccggccaccctgacggtctatccgcggctggtgatcaccacgcagccccagggcggcagcttcgagcgcttcaccagcaccacgctggccgtggccgtcacgggtggcgcgcccggccggacctacctgtggcgcaaggacggcgtgccgctgcccgtcgagcagcagccgcagacgtgggccctggcgctcaacaacctgcagtacgcggatgcgggggcctacgacgtggtggtctatgacggctacaacgaccaggtaacctcctcgcccgccgtgatcacggtgacgccgccgccggcgttgaccattaccgcgcagccccagggcggcacggccaagatcggcgcgtcgtgggtattcgccgtgcagaccaccggcggagaaggcgcgatcacttaccagtggaagttcgacgacggctcgggtccggtgaacgtgggcaccagccagccctacctgttcctgacgaacctgcaggcgaacatggaaggggtatactgggttgagatcacggacgaagcgcgtaccgtgacatcacaacccgcgcagttgaccctggtcagccagccgctgatccagatcaccgggcagccgcaatcgacccaggcgccggcgggcggcagcgccacgttcaccgtggccgtcacgggtggcgtgtacccgctgcagttcacgtggatgttcgatgacggctccggtaacccgccggtaccggtgggcgacaacgcgccgaccctgaccctgaccgacctcacgcgggcccagtccggcacgtactacgtggaggtcagcgaccagtacgagacggtgacgtctgacccggccacgctgttcgtcacgctggccatcacggcgcagccccaaggggctaccgtgcgggcgggcgatcccatcgagttgtcggtggtggccgatggcgggacgggtaccctccactaccagtggaagttcgagcggtccggcgagaaagcggtggtcaacgtcggggacgacagtcccacgctgtacatttccgaagcctcggcggaagacgccggcaattactgggtggaaatctccgacgataacaccttcgtggtcagcgacccggcgaccatcatcgtgctgaccgagccgggggtcccggtaggcggcgcgggcctgctggccttcctgggcgtggcgatcagcgcggccggggcgggcatgctccgccggaaacggccgggccgcgcgtagcgcgcctgtagtgcttccctccaggtcgccccggacagccccctgtccggggcgatcgcattgaagtccacgcgcggtctggcgcaaatcgggactggcaacctggctccgcttccctgtcgacggatacgccggatcacctgccggacggcacgcgtcacgcggagacgacagccaccgcggctgaattgagcaaccggtccgccggggagaccgtgtcagccggtgaggcggttaaccgtttattccctggtatattcgatgtctgcttcttcgaggggttcgtaaatggcgttacgtacccaggtcgcttcgaagccttccttggacatgccctcgacgtggatgcgcaccctgccaccgtcggacttgtcagcgagtttagcgatagcagagaacgacttgtagacctgtgcccccgtcgcttcgaaggtaagagcgatccgtcgctcgcgggtgacggtgtctcctcctgttgaggcgggtgggacaggaacccagccctcggtgcctccggtggtgggctcctgtacgcgatctcctgacgggccagttgctggaagccctaccgccggagtcgggatcgcgcccggttccatcaggaagccggtctcgaggtcgatttcgtcctcggcgacccttttatttatgacgaccttttcgcggttcacctggaactttccatcggggcccaggctgggcgtggggccactggtatacgcgaaaattccttcctcaacgccgcgcgcgatccctttgcgcagcacggccgcggattccaggcggggtggcgtgatatcccggaaaaacgattcaagcacatcggataccttgatgccctggatcggtggctctccctcgtttatagattcgccgagccgcacgcgctcgacgatcttccgcggcgtcaccgacccataaagccgaggggtccccacgctggtaagcaactccaagacgcgctcgtggacgccgatcgcctgaagtggtttgcctcctcgttccaccttttcaaggctcacctgaccctccacaacctggggcagccagacggccgagtacagttcccggaaacaggattccaccgtggcggtttcggtctgtcgtctttcccggagttgctccagttgatccctggtaagccggaactggtttctctggttttcgacgcgctcgatggccagcaggtaccgcacggcccgccgcaatgcctcaatctgtcgcttatccgggatggcaaggccgagaccgttgcggaagcgccgcggacgatccccgtatctggtcaggtactccagggccttgcgttcctgttcggtcgccggctcggtggcgaactcgaggggcaggtaggcaaccaggaaccggggttcgccgtctgggatgtcctggctttgggccggccacacgatggcggagtggtgtcccgcgaggcgcgtatccagcagggtcttgatcttgtcgcgcaccggtccttgtacccccgcgcggatttcctcgcggctgatggactgttccgcgtcctcgaccagcttggtgacgttgggatccttcttgaagcagtaccggacgccatcgtaatgcaggtacaggcaggtgttgcgcagttgcgacaggacggccgtggcggtgatgttgtccaggtcgggatcgacacaggctgccagcaactcgttttccgtgaccccaggcggcaaggtttccgtgccttcctcgccttgccgtcgcagtcccccgaacgaatacaggaggatggcggtggcgagacgggtggcgggtcgcacgctggcgagcgtgggctgctcctttgccagccgttcgtcgatgcgcctggcccgggcgttgggcccctcgatgtccgccgtgatgaccgggtcgtactcgttttgcgcccccagttccttgagcattttgacccgcacgtccccgtcacccagggggatgtcgccggggccgaggagggcccgggcgcctccccgctttttgagggcatgcatgcaggaggcgaggaaccgcagggcgccgcgggtgcgttgaaaggcttccaccgcggtccagcgttcccgcatgatatcgatgagcgcgggatgaaacgggtaagccgcgcgcatccggtccagcagctggaggctttcttcctcggcacggcgcgcctcgacgtcggacgcggcatgggcgcgccacgtgctctgcagggcttcctggtacgccgtggccacctcggtgatggccgaggtatcgggatggctggccagcaaccggcgttgcaggaccgccagcacctcgtctcccgtaaccggttcccggagctggtccacccgggaggccaacttgtcgatttcggccagcagcccctcgttgcccagggattccctggcgctccaggtgagggaatagaccagggcggccttgtcgctcccggccacttccacggtcaggttctggaagaaatccttcgcctggcgctggagggtggagtcaaggacactgaccgccgccgcgcgctccatgtacttgagtacttcgtcaagcagaatcagcacgggccggccgcccgcccccctggtaagcaggtcacggatgacgtcgcctcccggtgccacccggtccctgtcgtgatcggcgacgagagggaaggccttttcggggtcgatctgccaggcaatccatccccacatggtctggatcgcgcggccgtcttccagcgtcttgccgttacgggcgtcgaacttctcgccatcgaacaccgccaccgccacctcgcctggtcgcgcgaaggtcctggcttccggaatgccgtccagggcctcgcggcttcgcgcggcgtgatacagtgccgccagcgtgtgcgatttcccgccgccgaagggcaccctgagtttcaaaacccggttatatccgggcttgccggacaacgaggccagcacctcgtccagcagccttcggaggtccgtggtcaggtaggtggcccggaagaaggcttccgggtcccggttcaccgcgggaacctgggggtctcccgcggcgatggcgccaaggtcgatggcgaacactgcctcggtcagcgcgcccgattccacgtcagggtgcagcctgaccagttcagtccagggacgaagcacgcgcgtattcatgaatggttctccggtggttctctaaaatcccagtttcatctggccggtcttcgcgtcgatttctgacagccgctggtcgatcagcgcccgccagttggccaggagtttcttgagcgcggacgcctccgccggcgtggtcgacacgacgcgttccggcgcctcctccgtcctgccttccagggcggtcccggacagggtctgggccagcaggcgcaaccggtcccggtctggcttctcctcgtccaggaacgcgttcaacccgcgcggatcattttccagcagccacaggacgcggtgcaaggtgtcaatcagcggaacggccccttcgggaccctttgccttgcccagttgcgggtcgctgccgcgttcgctgaaatcccgcagccggtaggttcccttctgtttcgcgacaagggcgtggttgccgctggataagccgttcgggccctccagctccacgcgctggccgtaggtgaagacgatggcctcgcccgcgtccatcgcggcggtgccgtaggtgtagcgccagagcaggtagaaccggctcgggccgtccaccgcggctaccccgcttccggtcagcccgaacactttttcgaggagcgtctcgagcacgagtccttccacctcggccaggaacttctcggccgggaccgcctcgccgttggcgtattccacccgggagaagccggtatacgcccgcagccccgcgcccaccgccgcgatgaccaggtccgcgccggtaatgcccattttccagagcgaatcgacccgctcgcgcacgattcgatccagttcgggccggacctcgttctcgtaggaacccacccttggtggcaccggtcgctggcctgtgccctggtccacaggcgagtcgcccgtgctactttcgcgtttgcgggcgacgaggaagatgctggaggcgagcgcggcagtctccatcgcgatgagccgcgctttcatctcggtatccagcggccaggcctcggtcacggtgaagcccgcctgccggatcgcgtccaccagcgtggaccagccgagcgtggtcttgtgggcatagaccacgaccatcgagccgccgggtttcaagacccgatttgcctcggcaaaggcctgcgccatcatcccctcatacgcgcgtttcgcctcggtctggcttttgtgccgccagggtgaggcaaccgcctcctgcttcttcggggcaacctccgtgccgaaatgttccgggtaaagatctccgatcgtccgtttcagccagacaaaaaagaagtcggaaagagacgcgtactgtatgttgtcgtagtagggtgggtcggtgatgaccgcgtcaaagaaggcattggaccacggaagcgccgtggctgaaccgcgtttgacggtggcagggaggccggaaccggcttgggcgtcggctacgctggcaatccagtcgagggcgcccgcggcgcctccagacccctctccaattgggttcaactcaacgaaatcccagaccatcggcagcgcctgtctgccaaaagtgtttccgagtatttccctagtattgtgccagtgacacagcgcggagttatagtctgcctgccgatctaccagcacccccaaatacgtccccaccgccttggccctctcttggctcatgggtggcgcagtcggctcccctgtggcgggcaggccagtggcctgtcccaccatggtttgacaggcctcccttaccgcggcggcgaaggtgagcaggcagagcatctggcgaggggtgaaaagttcactaaatgttttaatgccaaaacccctgccggcaacagtagtaggatcattcgtatccattggctcgttcggcaccgtcagccccgtccggtggcatagcgcctcgatacgcttttggacggcctcgtcatcgggcaggtattgcgggtagtcatccgcggacaggtagatcttcccctgcctgctcggccgggtgcagacaatggccatcatctgttgggacaggcggcccgcctgtccttcctgcttcacgtaatcgctgtccgccacggtcccgcagaatgggcaggaggcgttgccggccttggaaaatgccgccgggtcgaagccgaggcccgcttccgtggggctttccaccacctcgaatcggaccttcttttcgcctttcggcgcgatcatcctgagcgccacgtagtggtccttcttcttgcaaagccacgtctggcgcacgagcggcacggtcgcgccgcaggcggggttcttgcagcgtaccgtccgagtccagaggtaagcgacgggcacgaggtatccgggatggatactttccttgtctggagatagccacatttcggactggaccgccggtctgttccccttgtactcggggtcggggatgagcgggtaaaggtcgccgatctcggccttgaccttcttgatcacccattcgccccagtagcggacctcctcggccaggccgccccaggtcgtttcgccctttgcattcctggggccggtcatgccgcgggcgttggggtcaggcttgccgaactgctgcgggtacaccagggtgcagagctcgatgatgtgggccaccgggttgaggtcgagggcgtaggcttcgcacccgagccgcaacgcctccagcgggatggccccgccgcccgcgaacatgtccagcacccgggggcgcggggcccggcctgcctcgatgtccgttgccgtgacctgcctgccggtctcgatggtcagccgctccgcgtgggcttcgagcatgtgccgccgcgccttgtcgatcacggcagggttacccggatacttgcagagttgctcgatgaacctggccgcgttggcccggccaaggccctgcttattgtggtcgggggcgttttccgggacgaaccgcgacaccggcaccagcgcgccatataccgcggcgcgacacgccaccaggggccggcgcgcccaccagatgtgcagggtcgaaatgtgccccttgcgcacggacttctcccgggaagcctcggcgctgatgacctggatgggcagaaagtcttcaatgaggctgcgttcgtctggcacgttggatctccttttcagactgggatggcacggagtatttccattctacccctgtatccatacctgccaaaacgtgatcggcggaacggggtgacttccgcgcagtcaacagacggccctgtcctggcaggtggcaggaccgccatgccggccggagacatgaaacgtcgcggcccctggttccaggttggcgacgccttgtgatccgaactggccgggcaaaaccagccttcacggtgtggcctccccttggcgcgcgacggtcgctaatgcccccgccggaatctcgtagtaccgtgccgtcacgacctcctgcttggcgtggtcgagccgcgcgaagggattctggatccggaccagttctggcgtctcgcccaggggatcccagaccacgtagagccagtaggtgtcggccagttgcgccgccttgaaccactcgttggtggtcaaccgtatcggctgcccgcgccgacggcccttgacctcgattctcttgacgatcacttcccccgtggcggggtccgcgatcctgtgcgcgcgaatatcgaaccccagtttcaggtggccgacccgctcgatgcggtcctcggggaagccctccgcgaccagggcttgaatcacgaggtcctccgccgccatttcgctctgccggcgaacgttcggatcgagttcttcggcaaggtccgggaactgctcccgcgccccggcatcgggtgggaacacaacggccgtgcccacgtgcttgaccggcccggtccgcgccacctccaggcgatttaacccctcgaagcgttcctcctgcgcgcgctccagttcagccacgtattttttggcctcttcggcggccaacgtataatccgggttgttcgccgcttcgccggcaagatacatggcccgctcctgggcgcgccggatccgggcctggaacgacctttgcaggtattcccggcaaacctgggcgaaatgctgccgctcctgctgacaccggtcacggcacttgcgctgataggtcgccttgagaaaatcggccgccgcctgcgtggaaatgggatcgatctcccgcggaggagacggatgcgccacgaggttgagcagcgtggcgttcgggatcacctcgtggcacccgtccacttcctggacggccacgagttccccgtagattggtatgctgtttcccctggagtcgtacccccggatcaggatctcgaaaaaatggatccggtagggcttgtcacataagggatcaacgtaaaaagccgtgcctcccaccagattcgcgagacaggtgttgagtttctcatccaccgccgcgtacaggggatgtccgggcaccatcagcacggcgtccaggtgcgcgttctgttcgaggtgttccttgtgaaaggttaccttgcggtaggatggttcggcttttccgaatttctgaacggcctggagccgatcagaccgcagttcctcgcggacatgctcgatgcgccacagcccatcggctctcgcttccacccggagccccacctcgcgggcggcggccaggaactgagcctctacataccgcggcatcagccggcgttcctcgacctcgaggttgcgctgctggaacgccgaaaaatccacgtgactgcgcgcaagcgcgatcccggtggcttcctcgtacgccttgaatttttccgggtcaatgcggtcaatctggtccaggtactcatccaggcgttttggatcacaggccgcttcgcgcaggatctccggcaggtttacgtcgttcagggacagcacttcgccgatcacgtcgaaaacgcgtccttccagggcgtcccgcatctggttaagtttttccaggagccgctgcagtatccggccttccacgatgggactgccgtccacggaatccgtggccacgaagttaaacacgtacacgtcccgctcctggccaatccggtgaatgcgacccaggcgctgttccagtcgcgtgggattccagggcaagtcgtagttgatcatcaggtgacagaactggaggttgatcccttcaccggcggcctctgtcgccacgcatacctgcgcgccggtcctgaatacttcctgggcctgcttgcgttcatgggggttcatgccgccgtgaatttcgcaggtggtatatccccagcgctgcaggtgctcgcgcaggtaaacaagcgtgtcccggtgctccgtgaaaatcaggagcttgccccgtccgtcccgcagttccgcgaactgcgcgtcttcgaggcactttcttaacgcggccaacttggaatcgctcgcgttttcgcgtaccctgcgcgcctgctccacgagttccttgagggcggaaatttccctccgcaacgtatcctgttcttgcgcctccgtgtacccctccacgaggttatcccgttccgcgtcgtccagatcgtcctcgtccacttcggcatccggcatactccgattcagcatgcctagccgacgggcgcgcgcggccggatcgagcgactccagttctttccacaggtcttcctgcttttgcagccgtcgcttgagcgactcgtgaatggcacaggtggaactcaccagtcgacgttgcagcacggtccgggtcagcgccgccgaggaccgcttctgccccgtctgctgcgggatgaattcgttgatgtaagcggcaacgctcttgtagagggcgtattcttcctggtttaactggaaggtaacggtgcgggcatgccgatccgggaaaagacgtctcccatgtatgtccttgaggtcttcctttagtctccggatcgcccacggtgaatcctttccgagtcggaacacgtccttgcgaaggttggcggcctggttttccaggtggtgcggttccggaaacaggtcaggatcaatcagccggagaaaatggccgaacttgtcctcatccccatggtggggcgtggcggtcagcaggagtacgtgatccgcctgcgaagtgagccggaacgccaggtcataacgtttcgtcgtcacggcccggttttccgggcgctttactcctccagtggcggtccgcgcggaacacttgtgggcttcgtcgataattacgaggtcccaccgctgtctgcacacgcgatcgcgcacttcttcctgcttggcataatcaatcgaggcaatgatctgggaagaacgttcccatggatccaccagttgctgctgatcgaccgcggaaaagacaatatcgaaaggttctccaaaccagcgcaacatctcgtcctgccactggatggtgaggggcgcggggcacagaatgagcacccggtcaatcgctccgcgcagcttgagttccttgatcaggagtcccgccatgatggtcttgcctgccccagggtcatcggccagcagaaaccgaagcctgggttgcggcagcatcacctggtataccgcctcaatctggtgcggcagggtgcgaatccccgaaatgcttacggcgaactgctggtcatgggcataggccagtcgaatgcgggctgactctataaggaggcgaagtttttcagcgtccacgggggcgtgggacggcacttcgtcagcgccctgcgcgagaagggccgtcgcctcgtcggcggaaatcaccgcttcctccagagaaccatcaggcagacgaacgcgacactcgtaacctgccgtatcatccggacccagtggtcgcgcgtcttccaggaccacgggtacttcgaaatgcccttgcagcacaatttgttttcctctcagtgtcgtgagcaaagcattacccatttgcgtccctttcccgtgaaagcggtttcaacgtggatccatcgtgccgacgcgcgaggactggcttgctagcgatgaatgaggaattcccgggaaccgttttccggcctgttgctcccgtggcgccacctccgggcccgggaccttgccgttcggaccgtgcccgcagggcggcgctggcgctacccgcgggagggcgggcaggccacgcgtcgatgaccaggacatcccccgcgtgttcaatcatggtacgtaccccctctgccgcaaggcagactccgggattataccacgccaggcgggccgggttaccggcgcgccacgccatccaccacattatggcaccatgatgggtggtgacgggacgcgtcgaccagaggcggcggcaaggtatgataagtttctgattcgcggcccgggagaaccacggcagggatcacggaaacggcgcgtggaaagcaggccgtccgggcctgccgcgggcgcgtgttttgtccgtgccgcgcagggcgtcatgatcacccccccggttgggccccgaaaccacggggtaaccgagattcgggaagagatcgcccaggttgaacgaccgcgtatggccattcagggtctggctaccacccagtcctcgcacagaacctcggtctgttccagcacaagctcggtagcctgttcctgcttatccggcggataaccgtactggcgcaggatacgtctgaccagcacccgcagttgcgcccgggcgttctcgcgccggctccaatccaccgaaacgctcttgcgcaccctttccaccagtacctgagcgatttgctttaggacctgatcgcccagtacctgcaccgcgctgtcgttggaagccagcgcgtcgtagaaagcggcttcgtcgtcggacaacccgagcgtttcaccgcgccgcgcggcctcccgcatctgcttggcgatggcgatgagctcttcaatcacttgcgccgcctcgatggcgcggttgtgatacttgttgagcgcctgttccagcaattccgagaaggtccgcgattgcacgacgttcttgcgcaggcgcacttgtatttcgtcctgaaggagcttcttcagtgtctcaacagcaagattcttctgaggaagtgcccggacttcggcgaggaactcatcagaaaggatggagatatccggcttatccagacccgccgcagcgaagatgtccaccacctcgcggcccgcgaccgcctgagaaacgagctggcgaaccgctgcctcgatctcctccggcgcgcgctcggcagcactcaccgtggccctgatcagggatacgcggatttcctggaacaggcccacttcgtcgcggatggccagcgcctcctcatgtggcacggccagggcaaaggctttggagagcgccgccacggcctgcagatagcgcttcttgccgtcctcctgcgccaggatgaagtccatcgcctgggcgatgccctgcaggcgagcctgtgaagcagcagtgaggagccgccggtagtcgaatccgtgcaggataccgcagacgacctcgtacttctctttcatcaccgccaccgcctcggcctggtcgatggcggccttgccacgcccgccgatgtccgcgtagaccgccagcgccttcttgagcgaatcggcgatgcccaggtagtccaccaccagcccgcccggcttgtcccggaacacccggttcactcgcgcgatcgcttgcatcaggttgtgtccgctcatgggcttgtcgatgtacatcgtgtgcaggggtggcgcgtcgaagccggtgagccacatgtcgcgcacgataaccagctccaactcgtcgttcggatccttgaatcggcgggcacttcgttccttgtttcgcacgtgcgcctgccagtcgggcggatcggacgccgagccggtcatcaccaccttgatcttccctttggcgtcgtcgtcgctgtgccagtctgggcgaagcgcggtgatggccttgtacatctccacgcaaatgcggcggctcatgcagacgatcaaccccttgcccagcatcgcctcgcgccgccgctcccagtggcgcaccaggtcttccgcaacgagccggatacgcttctcggcgcccaccagggcttccagtgatgcccacttgttcttgatccgctcgcgccggacttcatcttcctcggcttcggtgatttcctcgaacgtttcgtccaggcgtggtttttccgcctcgttcagctcgatcctgaccagtcggctttcgtagtagatgggcaccgtggcgccgtcttccaccgcgcgttgaatgtcgtagatggaaatgtagtcgccaaagaccgcccgggtgttccggtcctccttttcgatgggcgtgccggtgaagccgatgaacgacgcgttgggcagcgcgtcgcgcatgtggcgggcgaagccgtcgataaagtcgtactggctgcgatgggcctcgtcggcgatgaccacgatgttactgcggtcggacaagcgcggatacgcgtcgcccttgttctcggggaggaatttctggatggtggtaaagatcacgccgcccgaggcaacctggagaagttccctaaggtgggcgcggttttccgcctgcaccggcgtctggcgcagaagttgcttgttggcggcaaaggttccgaaaagctggttgtccaggtcgttgcggtcggtgatcacgacgatggtcgggttctgcatcgccggatggcggatcaccttaccggcgtaaaaaaccatggtcaggctcttgcccgacccctgcgtgtgccagatcacgccggcgcgccggttgccgagcgtcgcgctgtatcccgcccccggctcccgcaccgcgaacggatcggccgcttcggcctccgcaaaacgggcgtaaagcgcccccgcgtcggcttctatcccacaggccatgagcgtagaagccaaggcctgattgaccgcgtggtactggtggtaacccgcggccttcttggccattccctccgtgccctcgtccgcctgctcgaaggtgacgaagttgagcacgtagtcgaggaagcgccgcggctcgaacatgccgcggatcagggtcttcatctccggctgcggcacgccttcgctctgcttttcgttgccgggctcccggtagagatcggtaccatcgatggtgcgccagggcatgaatcggtcccactcggcagtcagggtgccgaagcgggcctgcatgccgtcggaaatcgccaggatttcgttgtagacgaagagcgacgggatttcttgctggtaggtccggagctggttgaaggcatggcggatcgttgaacgggccgtgccgggattcttcagttcgatcaccaccagcggcaggccgttgacgaagagcacgagatccggccggcgctcctgcctgttctcgatcaccgtgaactggttgaccgccagccagtcgttgtgttccgggtgttcgacgtccagcagccacgccttgccgtggcgttcccctgccggccccatccaggacacgtccacgccgtcggtgagcatctggtggaagcggcggttgttctcgataagcgccgggcttgcgggtgtaagcaccgtgcgcagggcttcttcgatggcatccgttggcatgtccggattgatgcgcctaagcgccccgagcaggcgtgcctggagcaccacatccgcgaagtgctttcgctccgggcggtcaccatcgggcgcgatatccgacccgacggcggtttgccagccgaggtcccggagttcgtccaaggcgagttgttcgatgtcgtcttcggtcatggtcgccatggtcgctctttctccggattggtcgcgtccggattctcccgatcataggcccagcgttccgggttatcggcgatgtactggcggacgcggttcagggattcgttgttacggatgatgtgttcgtaataattacgttgccagacgggcatgccaggggtaccccgcaggatgttgatgcgtttggtggtgacggatttgaacaatcgcacaatggttggaatggaatccgatatgggtttgccgaaccgttccacggtaggggcacatggcgtggacgtagggacacatggcgtggatgtaggggcacatgacgtggacgtaggggcatatggcgtggatgtaggggcacgttgcaacgtgcccctaccatcgatcaatacaataatcccatgcacgtgattgggcataaccacaaacgcgtccagaacaacacctggtcgcaacgcggcggtttgcaaccattcatcacgaacgattcttcccgtttcatttaaccgcatttggcaatccaccaccttaccaaacaggcatttccggttggccgtgcagattgtgatgaaatacgcgccgggctgggtgtaatcgtatccttgcaaccggatgctgcggcggtggtgaaggtcaggatcgtatttcacagcgcatcctccagaatcttctccacatccggcacgcgcaactcgccggaaatgagtctgggcagcagcgtgtcgcgcagggcggcgagggtgcgggattcttcctcaaaagagaggatattctcatctattggataagctagtttttcaaacaaggatatgatgtcaggtctgggagaaatacttgaaagattttgaaattgtttcttgttgattgcaccaaatacggtaccttcagctccgtagatctttagttgttcagcaagtactagtattgcataataataagtatatgatctgcttcctgatttatgacggagcgcggcaacgcctcgaccaatgcagcaggtttcatatgccatgttgatgtcaccaacgggggcacgaacgcttaccagcgtgttaccagtatgtgctattcgcgttggggcagtacaataaacccggcttgatgggtagcgaaaaccaaagtcacgtcgaccctggaaaaaaggaagccctttgccttcttcgttataagttgagccgggaggggattgtcccattgttaaatcgaactcagacccaatagttgttgcctcccacccctccgggatggggcccaactccgaatccacgaagcgggcggggaagaggcggaggaggtcttccggcaggccaagggcgtcggggttgtcgtggtagtgggcggcacactcggcgaatttttcggggatggggttgcccgccttgatggcattcaccaccaccgggtcgaagtccacgaaccaggacttgaacagcgcctgggccatggcctccagcgtctcgtgcatccgccggttcaattcgatcttgtcgtccagcgtgccgaggatgtgggctatggcgcgctgctcggggaggggagggagttttgttgtgatgattttgaatgtatatctcgttattgtattaaaaacacctccatgagcaacttgttgcatttgcgatactgcatgccggagtgcatagtaaacgaaattcgtttcggcaatgccttttttgcctctgacaccatagcaggattgattgaaagccatcggtttggctaattgagctatagcaccaactgttccacgcgctgagatgatgatgtccccccgattaagaatcgtagtagcactttcagctaaacctctctctgtgattgttttctctgccgtgctcacccagcgaaatccagaattgaaatcacttacagacagccatggaatattacctccccagtattccgttacgcttgtcttgggcgtgccgccactgatgatttcaatcacatcagcaaatgacacctctttccactcactccccatagcccagcacctccaggttatttgcgatgttcatagtgctttcgtcccttcgctgaggatgttcagatagcgttcgtaggcaaagacgcggttgcgctgtttgccggtgatttcacggacaatgccaaggcgtgccagggcttccatgcttttggcaactgccgggaaggtcagcccagtctggcggacgccttcgttcagattcaggagcggccgccggcagcaaacctggaacacccgcaacgccgaatttgccatgcgaccagtcgtctgaatccgccgggcatcctcctgaaaaagagcaaccagccgttgggcggtatccacggcattccgcgcggtttggaggactccttccagaaaaaactcgatccaggtctcccagtccccctccgtccgcaccagatcgagcagccggtagtattcgctccggtgttgcttgaagaaaagactcaggtagaggagcggctttttcagtatgccttcatggtggaggatgaaggcaatcagcagacgaccgattcgcccattgccatccaggaagggatgaatggtctcaaactggacatgggcaagggctgtgcgcaccagcaccgggtaggaacggtcatcatggaggaagcgctccagggcagccatacactcttccacatgctcgggcgggggcggaacaaaaacagcattcccgggccggctaccgccgatccagttctgggtgcgtcgaaactcacctggtgatttttcgctgccccgtccccgcgacagcaggacgccgtgcatctcgcggatgagccgattggaaagaggaaagccttcctccaggcgttttattccatgctcgagcgctgccacataattggaaacctctaccacatcgtcgaagggcacccctggcgcttcctccagttcgaagagcaagaggtcggaaagcgaagattgtgtcccctcgatctgcgaggataggagcgcctcccgccgcacataggcataaaggaaaagatcgggatcgggcagaaggagcgtgatactgtcgagccggccgagagctatcgtggcctgttccagcagtgggctttgggttcgggtaagatctacaggccgcgaaggcggcagggggctggggataaaggcgcgaacctcttcgccaccgacaacgcgcacctgatattcaccggtcacaccccgtttcatagcacctttcccagttcaacgaatgttaaatagcaagtctcgctattaaacgtaatgccacgattgtttaataagcatcggttttctgccatacccgatgtcctccaggctggcccagaagagtttgtcgaggcgggcggtttgggtttgttcacgcatcagtcgttcagataaccgccaacggcgcagatacgctggcttatcgcaacttcttatttggaaaggtgttacggccatgccatgcttcttccagctcatattatttgcgcgcgtggttatccgataaccgcgcgtggttatattacgtgtggcgctcataatatcgccccttcttgtcgccgtgagcaacaagttttccccgtttttctaatgatttaagcagacggtacgcctggtttacagaaaggctacaaagttcggctgcctgggctcgcgtaatcttccggtacgtgtcgaggtattttagaaccatctgttcatgctggaactgctcaaggccgtgttgacgaacataggcagcgggcttgcccaggcgacggtaagtggcagccgacaggtgccaagtccggcctttgcgttccccccgcggctcgacgagacccatctccaccagccgattgagcgtggtcctggtatcgttttccggcttctgggtcaggcgggctgcttcttccgtactcagccgccggttctgccagagggcattaaggataaggaggtcgtccaagcccaaatcgcgtcctgctcgtgattcctctgcaagaaggcggacgaactccaggttggcctgtccgccaggaaggactacaacaacagcggcctcgttgctccgctcataggaaggtactggccggccgttgcgcagttgctcataaaagatggtgtcaatgccgcgcgccgtgcgttcgacaatgccggcccgtttgaacgcatcggccagaagcggattccggggccgtggcgcggtaacgagcaggttgtccagccgcactccttcggggaaaccgccggggttggagatttcaagttggtcggtacgccattgcacatgcacggcacccaaacgggtatagtctcggtggatcagggcgttggccagagcctcacggaaggctgccggcgagtaatccggtacgccgattcgaaaaaggccgaccatgacttcttcttcgcgattgcggccagcaaagcgtcgctcgcattcttccatgactcgaagaagcggccagcggaagaaatcgttgacctccactcgttgacctaccaagacttgaaaagcgacctcgtgcgtgggcagaagccttttgagcgacgcttcttttccgaacagaagcagtcccaagactcggatgttttgaaccttaccgtttgcctcgacggctcccaacgccttggccagttctatgtcgggaagatggagcaaggattgatcgccgccacgattttcccggatacttcgacgaaaacgttcgaactccagagggtccagggcatcccagtcggcatcaggcagaaccagtgcagagtaatcctcggcgccccggtccgcttgcctggcatgcatttcgtgaaagaacatcggcagacagcaaggtttgccgtccccgccgatcgcgcggcgcaggtacttgccggccgttgtggcaacaggagaagagatcggttggatttcgataacgatgatctgtttatcttggattgattccaaggagacgcgaggcgttatggatggcctagtgcgattggcgataagggctgcaacgcgcgccggatcggtttgaccggattcgtgccgaggacgcgcgcctgttacgcgcccgtcatcttccacaccgatgagcagccaggcgggagaattcgatgaacgattcgccaagcagaccacggactcaaccaactcgtcatccgaaagggatcttttctcttcccccttgaactcgatgtccaacgtttcgccggcttcaataagacgttggattttttccggcgtcatggtcatttctcccagaatcccaactccctcaggtttttctcaatcgccccatccagtcgcgccgcctcggcttgctgttccctaaactgaaccactagccgtgtcatcttctcttcaaatggttcatcaacctcttcctgaggcgccgctccgacatagcggccgggggtgagcacatagtcgtgcttgcggatgtcgtcaatcgtggcggatttgcagaagccgggtatgtcctggtagggcgccttgccatgcgcccctacagatttccaggcgtggtagatatcggcgatccggcggatctcctcgggcgccagttcccggtgcacacggtccacgaggcgccccatgcggcgggcatcgatgaagagggtctcgcccgcgcggtcgcggaagcctcgcttggggtctgccttcttgttcctcgtcacgaaccagaggcagaccgggatctgcgtggtgtagaagagttgtcccggcagggcgacgatgcagtccaccaggtcaccctcgatgatgccctttcggatggccagttcggcgttggtcgaggtggagagggagccgttggccatgacgaagccggcgatgccgttgggtgccaggtggtagatgaagtgctggatccaggcgtagttggcgtttccagtgggcggcacgccgtattgccaccggggatcgtccgggagccgctcgccgccccagtcgctcatgttgaagggcggattggccagtagaaagtccaccttgaggtccttgtgcaggtcgttgtggaagctgtcgtcgtggtgggggccgaggtcggcgtcgatacggcggatggccaggttcatcttgcacagccgccaggtggtggggttggactcctggccgtagacggcgatgtcacctattgtgccgccgtgggcctccacgaacttctccgactgcacgaacatgccgcccgagccgcagcaggggtcgtagacacggccgcggtaaggctcgatcatctcgaccagaagctgaactacgcactggggcgtgtagaactcgccgccgcccttgccctcggccgcggcaaagcgtccgaggaaatactcgtacacccggccgagggggtccttgacgccggactccctggccttgaggtcgatgtcgcccacgagtttgacgagttcgccaagccgcaccttgtccagcgtggggcgggagtagtccttggggagcacccccctgagggtaggattctcccgctcgatggcggccatggcctcgtcgattatccgtcctatcgtgggctggggcgcggcggcctggatcttctcccatctggcttcgggcggtacccagaaaacgttggcggcgagatactcgtcgcggtcctcggggtcggtgtactccgtctcttgcttggccttgagttcctcgtaccttgcctggaaggcgtcggagatgtacttgaggaagatgagccccaagaccacgtgcttgtactcggccgcgtccatgtggccgcgcaacttgtcggccatctcccagagtttgttctcaaagcccaggttggcgccgctcggttggtccgtgttcatgctgcctcctcgtcattggcctctttccaccgtgtcgtgtccttgcccggcggcggggcatcgccggcctgccgcgccaggcgcccggcaacgacacgcttcgtgcccttgcgggttcgcggatagtctagcagttcatccacggcctaggacaggccacgttccggatacgcctggtgaaacgcggcccccctctcctcgacggcgcgggtcacgcccatggtggcaaggtacgcctccagctcgccgacgcgggtgccccgccgcgacatggtgatggccccaatcccggcgcggactaccttgaacttgccggtgacccgccctgtcggctggtcgtatcgccgcgcgttgcttcctcccggcggtcgatgggtgcctcacggaaacgacgatggaggccagcctccgggcccgcagggcgacgctggcgctacccgcgggagggcgggcaggcaacgcgtcgatgaccaggacatcccccgcgtgttcatccatggtacgtaccccctctgccgcaaggcagactccgggattataccacgccaggcgggccgggttaccggcgcgccacgccatccaccacattatggcaccatgatgggtggtgacgggacgcgtcgaccagaggcggcggcaaggtatgataagtttctgatgcgcgttcgcgtctcaggagaaccacggcagtgatcacggaaacggtgtacggaaagcaggccgtccgggcctgcctggcggccggcaagcggcagatctaccggctgcgcgccctcgcggacagccgggacgtggaagacatcctccgcctggcagaccggaccggggtgccggtagagcgggtatccaaggacgcgctgaaccggctctcagccaacggcgcgcaccagggcgtcctgctggaagccgccccggttccccgggtgtcgctggaagcctggctggacggcctgcgcgccccccggcaggtcgcggtggccctggacggtatcgaggatccccggaatttcggggcgatcatccgctcggccgcggcattcggcgcggcgggggtgttgttcaccgaacgacggcaggcgccgttgtccccggcggccgtcaaagccgccgcggggggggtggaatacgttccgctggtgacggtgaagaatcttcctgacgccctgggtcgcctgcgggacgcgggcttctggtcgacaggcctcgacatggccggggatcgggacctctggtccgcggacctttccggacgggtcctgctggtcgcggggggagaggggcgcggactgcgcaggctggtgcgggaacgctgcgatttcctggcgcggattcccctgtggccgggggttgaaagcctcaacgtgtcggtggccacggcgatcgcgctggcggccgcgcggcggggagaatcacccgcccccccctacaggccataggcgcgcaacttgtaaatcaggctgcgtcggctgatacccagcagctgggcggccttcgtccggtttcccccggttttttccagggcttcccggatcgcgcgccgctgggcttcttccataaggggccgccccggggcatcgggcctgtccgaacggggcgcgttccgcagggcatcgggcaggtcctcgggtaagatcatgtcgccatcggccagaatggccgcccgttccaccacgttgcgcagttcgcgcgcgttgcccggccaggaccaggccgccaggagacgggccgccgcgggggataacctctttttccagggccccaggaacagttccgcgaggggaataatgtcttctcgccgttcgcgcaaaggcggaatccgcaaagggaacacgttgagccggtaaaacaggtcttcccgaaaccggcccgccgtaacttcccgctccaggtcccggttggtggcggcgatcacccggacattcgcccgccggtccgtggtgcccccaatccgccggaattcacccgtctccagcacgcgcaacagtttcggctgcagggacaggggcagttccccaatttcatccaggaacagcgtgccgccgtcggcctcttcgaacctgcccgcgcggctggtatccgcgccggtaaacgcccctttctcgtggccgaacaactcgctttcggccagttgctcaggcaccgcccccatgttcaccgtgaccatgggaccgctggcccggttgcttcgggcatggatcagccgggcgaagatttccttgcccgtgccgctttcgccggtgagcaggacggcggcagacgtgggggccacccggaaggcctggcgaaacagattacgcagggtctcgctttcggccacgatcccggggggaaggtcgagggcatcctggtcgcgaggaccaaggccaaggcaatcctcgatcaccgtgagcagttcgtccaggtcgacgggtttctccaggtagtccgccgcgcccattttgatggcggccacggcatcccgcacgtcgatataggccgtcagcaagacgaccaccggcggccgcggcagttgccggatcttgtccagcgcctccaggccactcatgccgggcatgcgcacgtccagcagcatgagatcacatcggggagcgagttccacggcctgcctgccgtcttccccacacagcacgcgccacccggctcgctggagggtttcctccagtaaccgacgctgcgccggttcgtcgtctacgaccccgatcacggggggtatggtcatttcaccttttccgatcacgattccccgcgctccgggggttccatcgcgttcatgggtaacgaaacccgctttacgccgcacaaccggacctcggtgccctgtccgggcacagatcgaatcgagaggcgccaaccatgggcgcgggcgatttcctggacgatacttaaccccaggccggtaccctgttcaaatttaccaaaaaagggctccgtcaccctcggcaggtcttcaggatcaatgcccgtcccagtatccaccaccgcgagcgccaccgtgtcccgggtttccggctccaccttcaggataatcgaatctcccggctttccacacgctttcagcgcgttcaaaagaaggttcatcaacgcccgtcgcaacaggtcggcatccgccagcacgcccccctccaactgaacggttaaccgcacctgttgccgcgccgcttcatcccgtaacaggcgttccagggtctggcccagttccccgaggttcacgggttcaggccggggctcgggggggcgggcatatcggaggaaaagattgatccggcgggcggcgcgatcggtttcatccatcagggccgcggccttctccgccaggggagatcccaggggcgcgctgtccagaatggattgcgccagtccacgggccacgccaaggggattcttgatctcgtgggcgagtcccgcgcccagccgggccaggcgggcctgacgcgccacttcctcctgggcctggaccagatcctgacgcatccgtcgctggcggcgcgacgcggcaacagccaacacggccacggcggctgccagcatacccccaagggcgatcagccagccatcccgacgtacctgccacacgtagttatcctcgccccggtccagccagagttcaacgatcaacggtcccggtggtaaaggacgccagggagtatccggccccctggattccatccatcttggaccatgccccggtccccggggcgcgccacgtccaggcatgcccgccgcgggcaaatctgtgatgtcgcgggtaaaccgctccaggtcgggcgaagggtgaggccctggcgtctcaggcacgcccgtggacaataacgtagtccccgcggcatcaaccagccgtaagccagccacttccggcaggctatgcaacgcctcgaataccgtctccacgcccggcacaatcagcgatgggccaggccgcatgtgggcccgtaccccctgctcggcaaggtccagcaggatttcgacccgggcctgctggataaacgcggcctgccgcaagcggtagcgggtgatcccggccgccatgaacagcaccatggcctgcagcagcaacgttaccacaagccacggaagcgcgcgtcgccaagccgtgttcataccaacccgtacctcatcttcccattatccacgcccggaaccattcgaacctatagaccggcgcggacggcctccatggaccgcccgcgcccgatgccgttcggccgcgtgccactcagaaccggccacgtccccagggaccgccatagccccggcctggaccccggaacccccgggccggcggaccagccgggcggttgtcactccagccgtcgccgttctcgtcccggaagttgtcgcaacggccgtctccatccgcgtccgcgtaacccgggcatcccggcgggcatccccgcgccccacggccggcaccggtaccatgccacgccggtggcggtgaaggcgtgccatcaggaccccagccctggccccggaatccccgggccggcggaccagcagggcggttgtcacaccagccgttgccgttctcgtcccggaagttatcacaacggccgtctccatccgcgtccgcgtaacccggacatcccggcgggcatcctcgcaccccacggccggcacccgtgccatgccaaggcggcgggggtggaggcgtgccatcagaaccccagccctggcctcggaatccccggactggcggaccagccgggcggttgtcacaccagccgtcgccgttctcgtcccggaagttgtcacaacggccgtctccatccgcgtccgcgtaatccgggcatcccggggggcaaccccgggtaccccgaccggcacccatgccatgccaaggcggcgggggtgggggcggtggagtgccctgatccacgttctcccggggaggagccggcgctccggaatcggccgggcttggcgcctgctgggcccacgccgtcaccatcaacccggccgccaacaagacggcaccccctattccaaggatccacaatgttttacgtgtcttcatggtcgcgctccttctggtcgcgccatctcgtcccgaaatggcttccagagaacagggggcaattaccgtgccggagtcaacttcgtgaaaacagcgacttttcaggtgatttccggtccctggcttgccgggccgcgcagattttgcgcggtgccgcgcaaatcacaaccgcgccgcggtcatatccggcggcggcacaagatcccggttccgtacccgttcctccggcagcaccgcgcgcaagtccctgaccgatggataggtaatcagcacggtgcgtcgcttcccgtagaacacgacaaacgccccgcaggccgccgcagccgcgcctccccggagcaccacctccgcgatatgctccacagaccccgcgcccccacccgcaatcaccggaatgttcaccgcgtcaaccaccctgcgcacgagatctacatcgtaaccgctcatggtgccgtcgcggtggatcgctgtaaccagcagttcccccgcgcccgcggcttcggcgatccgggccgcttccacgggatcaatgccggcgggccgggttccgcacgccgtgaatacctcgtaacgcccgtctggatgacgcagcgcgtcaatggagaccagcatgcactggctgccgaagcgggacgcgcccgattctatgaggcagggattctccacggcggcggtgttgagcaccacccggtcagcgcccgcttccagcaggcgacgcatgtcatccagcgatcgcacgcccccgcccgcggcgaacggcatcgtggtttcacgggcgatttcctggacatagtccacccgcgtggggcggcagttgggggtagccacgatgtccaccagcaccagttcatccacccggtgcgcgttgaacacccgggccgcgtttcggggacagcccacgtatacccggttgcggaatcccacgcccttttccaggccgcgcgcgccgagcagcaggacgggaatgacccgcgtcttatgcatacgtcctcctcccggcgaattccagaaagttccggagcagacgcaagccgttgacgtaactcttttcagggtgaaactggacccccaggatatggtcccgtgccacggccgccgcgaaagataccccatgtgaactccggcagaggacgcgatcttccggcaaggcgtccacgtgataggaatgggcgaaataaaatgtggctccggcaggaatcccggcgaaaatcgggtgttccccgcgatcgataaggtcgttccagccgatatgcggcaggcgcgcgccgctttcgggtggaggacacagccgtcggaccacgcccccgtccagccagttcaggcccggcgtgtttcctccttcttctccccgggtagccatgagttgcatgcccaggcagatgcccagtacgggaacccggcgctccagcacggcttcacgcaacggccccagccatccgccccgatccagaaacatcatcgcctcggcgaaggcccccacgccgggtaaaaccagcgcgtccgccccagccagcgaaacgggatccctgccgaggatcacctccgttccgagcgattcgaaggcccgggtgacggatcccaggttcccggccccgtagtcgatgatggtcactttcatggttgccccgccgcttcctcgcgcgattgaagcagccgcgtctcacccaggcgcacctgcaagggaaacgaatccttccggctccagctgaacgcgtcatccagcaggtcgcgggtatcggcgaaacggcccaggttcacgatccgccgtcccgacgcgccggcgtgaatagccagcaggtcacccgcggcgaacacggtatcgaaactggttccgtcttccgcctgaacgagcatgggctgttccaggatgctcagcagttcggccagcagggatacggtaatctccggcgtgacgatgagcacggaggtccatccgtctggctggggcttgacggccacgcaaacctttcccccatccacgtaatgggccaacgcgtccgcgtccgggtcttccaccgcgaagcggggagcccagggtgtcgcgtcgccccaggtcgcgtcccgcttgagataggttccgtcaagcacataacgggcggccgtgccccccggccccgcgtccacgacccggatacccgtgatctccgtgatacccgccacagcagaaccctgttcatcgaaatatcccggcgcgtacagccagatcgcgcaggcaccttcccgggctaggcgcgcccgcagcgcccggcgttccgactgggtgagacgaaaagcattggcgaacaggtatactggggtcggcgtgttgacatcctcaaacaagtcctgcagcagaacggtccgggcgggcgcgccactgcggtacacggcatcccgggctgccgccacggtccgggcgtaaagggaggtaccggcgcgcgtcacgaacgccgcgcgttcgctgacgaccagcgtgaccccgggaagaggttccgctggcggaggttccgtccgggggcgtacccgctggtagatcccggcaagccgtcccagctcctgccactggtcgggatcgacaagccagccacgggccagcggatccgaccaggtcaggccgaatccataaacaagggcctgcgcgaagtttcgacgccgcacgtccagcacatcttccagccggatccccttatcccgctcgaacgcgccggtttcggcgttccgttccatgcccgagcggatatcatccaccacgacgtagcgcatgccgcggtcggtgagactctgggccggggccgcgaggtgccccgcgccccccaggccgcgatccccctgggccaggggtgcgatgatgccgctcaagtcgctgtggagcagggcgcccagggcgaaatgtcccgacgcggcgtccgatgcttcgagggtatacccgtacggggcgagaatcagcggcgcgatcaacgagaccgcgcgggtatgggccaccagggcggccagggcgtccgctaccgaatctgaactgtatcgcaggaaatcgctcagcgggcgatcctggggaaacaccatgaacacgccttcgtccggcccgggacccgggggggcgggaatgctaacgctgctcacgtcgaattccggcatgtgccacacctgggcgacgcgcgtctcggtctggtactggcgcaccagccagtcccggaaaccctggcggttgacttccgaccggtcaaatccagctggcaggcgccactggtgatccagcagcccacacagcgcgtagcccaggatccgggaactgaccgcgctgccttccaccgcgccaagcagggcggtcaggccgtccttggccgcgttgatccatgcctgagacgccgccgacggcaaagcgaggggatcggccgtacccaccatcgcctcggcgggattcgcgctcagccactccggcggcgggttcacgtccaccgtcagcagaaaggtcgcttccggatccagtacgatcacctggttgacccgttccacggggtcgggcggctccggcgcgccttcccagcgcagggagaccggtaacaggtactggtgaactcccgcggcagcggccagccggatctcttcggccgcgatgggccaggtctctgccgaaaacccgggaatgctcaggcacaagaggggcgcgtctggattcgcttccaccaccggtttgccgccggccggggtcgttcccgactctgcaaccggcacgccacccggagcctggggcaggtcatccggcaccgaccaccgcgcgaccagaattcccagcactaccgcgacacccagcatgcctgccaggagcaggcccgccagcgcgagtttcacctttgtcatctatcccaactccttgccggaagaatggtctttcccactccgtccatgactacgcctcgagaaatcgcgccaccgggtcaggctccagcgtcacccacgcgcccgtgtcccatggcagcccggattcctcggcccgtgccatgccggacgcctcgagtcggatccgcttagcggactcctggagagcgtacgtctcgcccggcctggccagcaccgcggatggcgtgtcatcctgccagatcgtcacaggacccggaaaaacaccccttaacggggcttccagccggatccgcagccctgccggtggatcttccagccacgcggcgcgactgatcgcccgggctgatcccgtcaccggcgggcgcaggggataaaacccccggactggtaggaccacctcggggccaaaaaggggttcccggcgcgtcaaccgtccatgccgggcgcgatccaaccccaggcgatccatggctcgccggtgcgcgatcgtctcccttgtcgcgagaaggacgtcgtaccatgcccggccatgggccagccatttccaccagtccccatcccgcgcggccgcgcccaacgagcggagttccgccgcgagcgtcgcccatgccgcaccgggcagtgccgaaaccggcgtgttgcgcgccagcagcaagagccgattccgggttgcaagaaaatatttccgccgcgcgcctggcccatggcccatcgacgcactgaacttatgttctaccacggcttcggggcaggtgaccacccgccagccgtcatcccacaggcgcaggcacaggtccaggtcgtccaggtaaatgccgaaccgttcgggaaacagccccacccgttccagggcgtccagccgcagcaggcaggcccctccgcacgcgcctgccacctcttcaggtggaagcaccatgccgtccagccgtcccgcgccgatatcccagcccgcccccgcccggctcatggcgatccccaggctgttcaccacccatggctggtcgaacagtaccattttcagggctaccgcgcccatgcgtggatccgattcggcccggtccacggcgcgcgacaacgcgtccggcgcaatgcgggtatcgttattcagcagcagggcgtaccgcgcgccggcatccatggcccgacgcaggcccgcgttgttaccgccgctccacccccggtttcggtccagtgccagcaaggcacaccgcggatccccaccccatcgttcccggaaaaacgtcaccgaaccgtccgtgctcccgttatccaccagaacggcctcgaaatccgggtaatccgacgccagcaggctgtcaaagcacgcttcgaggtgctcccgcccgttccagttgatgaccagtacatgtacccgcggcgtgtcacccatgggccagagtataccagttcaggtaacccggagatgctttcagggaaccaggcttgctgttcagggacatctgtcgaacaataggacaaaaaatttttttgaatccgccttatgtttccgtacaccggaattttacggaggtatgatcaacataaagacgcactcatacctctttgggaggtcaggacacgacgtatgatcagcattcccggcaagccggattattggccatggctctcggtcattttatccttccgtttgttaacatacccgcttggtatcgccttgcgtgtaaagtcccggcctgaaatcggcagaaggagaaaacgccatgagtgaaacatttcgtttcaacctgctcgatgatccctggattccgctcgtgtatcgggatggaacctgtcagcgcgtcggaatactgcaagccatgaaggatgcccaccttgcctggcgggtcgatacgggcaatcccctggacactttcgccattacccgactgttgctggccgtcctgtactggtgtcgcggcaacccaccggatgatctgctcaccaccctcgacgcgccctttccgggcaactggtttgataaagcgcgcgacaacgcaaggttcttcgaactgctcgcggatgacgccccccgattctttcaggatcaaaatcttcgttcgccaaagaaatatcatcccgtgatgaacctcattcatgagataccgtccggacgcaactatccccattttttccacgtggcagacggtgaaaactggctgtcgccggcggcttgtgccattggcctggttcgcttgcctgtcttcactaccgtgggcggacaaggaaaaagttatggtatcaacaagacgccccccgtgtacctgctgcccgaggctttttcgctagccgggacgttgcggctctcctgggcggttttacgtgatcggcaagcaggttctccggcttgggaaatcccccttcaaacacttcagggagaagtgccattactgactggtctgacgtggttacctcgccgggtctggctgcttcccatacccgcggagaacggtgcccggtgcgtgtttaccggtgacctggtcaaggtgggcattcagcagatggcctttgaggggcgtgaaaagagcgatgtaaacgaggggtatcagtggacagatccgcatgcgatcggaaatctgcagaccatcgacttgttcaatctgtcaaaatatccggacgctctttcccggcaatggcaggacaacctgctcaaaattcacgatgccatctctcatatcgcgccgtggcgcgaccaccggaaatggctcctggtcgatttcaacaccaaccaggcaaagttccaggacgcgcgggccatccggatcgaccttggagcaccagggacaattccggacgacgtgaatccggaggcatccaccccaaccctgaagatcctgttgacaaaatggaaccaagaacggaaaaaacacctgtatgacttccagtgtgcaatcgtccaggcccaggcaagggatgaagaggccaagaaaaaaagggccggtcaggtcaaaaaatcgggcctggcaaaattcgcgctggtacaggccggttatccatcggaggtggggcgcattgccgactggcgcgaactgctggaacagcaacccgccgcgctgtacagggttcccgagcggtccatggcgcctgtctttttccctggggtttccgttcgtgacgtgatcagccagcgcgacctgcagtctcgcccctttctggacatgaaggagtacacccgcgaagcctccgcgggcgtgaagaaattcgtttcccgcctcgtagatcgcaagaatgggatcatctcgctgttgcgtagcagcgcgggcaccggcatcgatcgcgatgccatcgcttttgacctgttcacgggactctggtggcccatacggcagcaccacaaggatacgcctcgccggcatgtcgcctggctggtgtgcaaactttacggctggacgcccctgccccagcaaaacggaaaccgcctgccccgtcaactcgcccgcgcggtcgtgcaacaggcccgcgagaatgcgaaacggggaaacgaaatccgcgaatcgatcatggatcgtttcgatctcttgctgaacacccccgtggaacgaatcgagcctgagttggaatgggcccttgccaccgtggccgatgccctcgacaatcccggtatcgactggaacaagctcatcgatcacctgtcggtctggcatcgccattccgtccggcttttctgggcccaggaattcgcgaacaccttgcccggggaggcccgtgacgccaacccggaggaagaagaaaccttgccagttgaagaaaccggatcatgaaccgagcccaaccggccagaaccaagggagaacaagccatgctgatccagatccacctcatccagaaccacgccccggccaacctgaaccgcgatgacctcggcgcgcccaaaacctgctactttggcggcgtgctgcgttcgcggatttcgagccagtgcctcaagcggtccatccgcttgagtgacgagttcagcgccctgctcggcggcgtccgcacccggcgcctgagccagttgctccggcaggaactggagcgcctggggaaaagggatgcggacatctccgaagtgctgaacgcctgcggcctcgagcagaggaccaggggaggcaaaaaaaacaaggccggggaagaggctgaagacgccgaatcccaggaagaaggcaagatgctcgtgtacaccacgagggaagccatccgcgaaatggcgaaggtcctggcggaaacttcgggcagcaaggatgagaaggcccggaaagtggctgaaatcatcagtaaaaacaccgccgtgcccgacatggccttgtttggccgcatgctcgaagccaaggctgactcgggggcctggaaagacctgaacaacacggtcgaagccgccctgcaggctgcccacgccctctccacgcacaccgcgcgcaaggagatcgactactacgtggctgccgatgacgtgcccggggccgaggaccgcggcgcgggatacgtggacgaggccttgtttgcctccgcctgttattacaagtacttctctatctcctggccgcaactgctcaagaatctccgggacaaccgcgaactggccgcccacacggtcggggcgtttctgcggggcgccgcgctggtgaaccccacgggcaagcagaacagtttcgccgcgcacaacccgccgctgggcattctcgtggagttgcgcaagtaccccgtcaactatgccaacgccttcgtgcaacccgtcgacgtggaggaccgcgaagacctcgtcgccgaatccattgcccggctggccatgcacgtgcaagacctggatacaggctacggagcaccagagaaacgcttctggttctcgccgaacctgcggtatcccctccagtacaacgggaccccggtggtcgacgacaatgcctcgttcagcagcctcaacgacctggtaaacgccctcgttcccgccattgatcccggcctgacctgggcccaggcgcaggcggcggtagtgaaccattcgccggtgggggaggcctgagccatggccgagcacaacaccctgctgatccgcctcgagggacctttccaggcgtgggggctcgcggagtcccgcttcgcgattcggcgcgtggcccccgcgcccaccaagtctggcgtgattggcctgctgtgcgccgcccggggcattccccggtccgaggccaccccggaagtcatgaaacccatggccagtctcaagatggccgtccgggtggatcgccccggtagccgctggctcgactatcacacggtcggcgcgggcggcatctcccggcgatccgcggaaggcgggctccgtcatggcgaaacgatgctgacccttcgcgagtaccttggcgatgcctcgttcctggtggccctgtggggagagccctcgctcatccggcagttacatgacgccctgctcgagcctgtgtggcccctgtaccttggccgaaagtcctgcgtcccctcggtacccctcttcctgaaagaccagggatcgttgcgaaccacagccaacccgatcgaggccctgctctccgtgccgtgggaacagcgttacgctttcgagaaaaaaccggatgtgcttaccgtgtacacggactggcccctgggtaacgtggcgtttgagccttgtgacctggacaccgcccacgacgtgcccgtgcacttcattccccccgcgcccgcctatacgtcgcgggtcgtcgcgcgcaggtttctggaatgtggaacaggggagggacaggtaagactgaccaacaaaaccgaagatgaacttcctaaatcaccccccaggccaagggcggactacaccaacgccgaataccggaatatccgggcaaggcgcctcgagcaggaccatggcctgtgcgtcttctgcaaggccccggccaccacggtacagcacatcacctaccgccacgcagggggtaacgaacgggtcgacgagttacgctccctgtgcaggctctgtcacgacgcgtgcacgatgatcgagtacggccataacatgggcatggaccggattaatccggaagatcccttctggcgcgacctggtcattcagcgccgaagagagattatccggttccgatcccgggaaacccgcgcgcgcctgctgggcgaaaaggtcaaggaataggaggatccgggcatgtacctgtctaccttgctgatcgacgccgggaaggatccggaccggatccgcccgggaagaaactggctgcgtaacgtgtaccgggtgcatcagcggctgagcatggctttccccgcgccggcgcgcaaaaccaccgatccccagtttctccagcccttccggccggaagacttcggcgaacacctgcatataccccggtcggggcaggcgggttttctcttccggatcgatccccagcctggcggtaatccggtcattctggtgcagtccgccatcgagccagactgggattacgcctttcataacgcggattacctgctggcagccccccctgaagtgcgatcctggaacccggtgttccagtccggacaacgctaccgcttccggctcatggccaatgccacgagaaaggtcggcaccctcacggcggcgcaacgcagggaaaacccggacagcgtgatcctcgagccccccggggatctctccgggccttggcgacgcgaccgtcgcacccgcaatggcacgcgcgtgcctgtaccacgggaacagttgcccgactggctgatccggcggggggagaccggaggcttcaaggtcgtgcccggcccggaagctctgaatatccaggtaaattactactacgtgaaccgcgcgggtttcgcgaatgccaacggatcggaacagccaggcagggcctgtattccccagttgttctgcgcgcgctatgaaggcctgctggaagtaacggatccgcgggcattttacgccaccatcgcctcgggaatcgggccagcccgggccttcggttgtggactactcaccatcgcgaaaccgtgaaacctctccccggcgggggcgggatccgtcccgcccccgccggctcatccggttagtgcctcgagcaggatgcatgccttggggtaactggccgtccggcccgtacgtggacggtacgtaacgtatcgggaaaggaacaggtacgaatggcgccttccgatgacctgcgggccctgccccgcttcaccgattcctggtcatacgcttacctggaacacgtcatcgtcgaacgggacgagcacgccatcgtcctgatcgacgccagtgggaaaaccgccgtgccctgcgccggcatcaacctgctcctgttcgggccgggagtcagcgtaacccatgccgccatgagccttctgattgaacatggcgtcctggttgcgtggacgggagaggatgccgtgcgctgctacgccttcggacactccaaggcccgtcacgcgcggaacctgtatcaccaggcgaccctgtgggccaatccacagacccgtttcgaggtagccgtgcgcctgtacggcgtgcgtttccccgatcctgtgccgccgggcatctccatggcccagttgcgcgccatggaaggacgccgcgtccgtcgggtgtacgagtcctgggcacagcagaccggcgtgaactggacggggcgtaactataaggtcgacaactggaatgatgcggatccgataaaccgggccctctctgtcgccaactcgtgtttatatggactctgtcatgccgctattcttgcggggggcttctcgcccgccctcggtttcatccacgtcggcaacatgctctccttcgtctatgacgtcgccgatctttacaagacagagtatactattcccatcgccttccaggtcggcgcgcagaatccctcggaactcgaacgcgtggtccgcatgacctgccggcaatggttctatcagaccaggctgctgagccgggtcatccccgacatccgggccgccctcggcatgtcccggaaaggagaccccgccgccgacattgccgacgctcccctggccctgtgggatcccgacgagggcgaatgccccgccgcccagaactatgatcccgaactcatggaacaacagcccccctctgataccgggtcgtcaaccccgccccctcccccgggagaaactacaccatgacggtcatcatcctcgtctccgcgccacccgccttgcggggcgaagtctcccggtgggccatcgaaccccatcccggcgtattcgtcgccgaaatctccgccctcgtccgtgaaaaactctgggaacgctgctgtaaaaaaatccgtaacggcggcgtgattttcatttatcccgacgccaacgaacagggttataccatccgttctttcggtaacaccaggcgcgatttcatcgacttcgacggtatcgtcctctcgcgacagcccaacgaaaaatgaccttatccggaagaatcaggtataatggatgcgattctactgaaaataactttagccttttccccacgcccgtgggggtgaacccatcgagaaaattttctcgaataggaggaaacacttttccccacgcccgtgggggtgaaccgcggttccacggcaaccggcaggcactgtccgccttttccccacgcccgtgggggtgaacccccgccacacg

SEQ ID NO: 962 - DNA, 103609 bp, Artificial Sequence
  Synthetic Oligonucleotide
  misc_feature (1)..(37301): n is a, c, g, or t
nnnnnnnnnnnnnnnnnnnnnnnnnnnnnnnnnnnnnnnnnnnnnnnnnnnnnnnnnnnnnnnnnnnnnnnnnnnnnnnnnnnnnnnnnnnnnnnnnnnnnnnnnnnnnnnnnnnnnnnnnnnnnnnnnnnnnnnnnnnnnnnnnnnnnnnnnnnnnnnnnnnnnnnnnnnnnnnnnnnnnnnnnnnnnnnnnnnnnnnnnnnnnnnnnnnnnnnnnnnnnnnnnnnnnnnnnnnnnnnnnnnnnnnnnnnnnnnnnnnnnnnnnnnnnnnnnnnnnnnnnnnnnnnnnnnnnnnnnnnnnnnnnnnnnnnnnnnnnnnnnnnnnnnnnnnnnnnnnnnnnnnnnnnnnnnnnnnnnnnnnnnnnnnnnnnnnnnnnnnnnnnnnnnnnnnnnnnnnnnnnnnnnnnnnnnnnnnnnnnnnnnnnnnnnnnnnnnnnnnnnnnnnnnnnnnnnnnnnnnnnnnnnnnnnnnnnnnnnnnnnnnnnnnnnnnnnnnnnnnnnnnnnnnnnnnnnnnnnnnnnnnnnnnnnnnnnnnnnnnnnnnnnnnnnnnnnnnnnnnnnnnnnnnnnnnnnnnnnnnnnnnnnnnnnnnnnnnnnnnnnnnnnnnnnnnnnnnnnnnnnnnnnnnnnnnnnnnnnnnnnnnnnnnnnnnnnnnnnnnnnnnnnnnnnnnnnnnnnnnnnnnnnnnnnnnnnnnnnnnnnnnnnnnnnnnnnnnnnnnnnnnnnnnnnnnnnnnnnnnnnnnnnnnnnnnnnnnnnnnnnnnnnnnnnnnnnnnnnnnnnnnnnnnnnnnnnnnnnnnnnnnnnnnnnnnnnnnnnnnnnnnnnnnnnnnnnnnnnnnnnnnnnnnnnnnnnnnnnnnnnnnnnnnnnnnnnnnnnnnnnnnnnnnnnnnnnnnnnnnnnnnnnnnnnnnnnnnnnnnnnnnnnnnnnnnnnnnnnnnnnnnnnnnnnnnnnnnnnnnnnnnnnnnnnnnnnnnnnnnnnnnnnnnnnnnnnnnnnnnnnnnnnnnnnnnnnnnnnnnnnnnnnnnnnnnnnnnnnnnnnnnnnnnnnnnnnnnnnnnnnnnnnnnnnnnnnnnnnnnnnnnnnnnnnnnnnnnnnnnnnnnnnnnnnnnnnnnnnnnnnnnnnnnnnnnnnnnnnnnnnnnnnnnnnnnnnnnnnnnnnnnnnnnnnnnnnnnnnnnnnnnnnnnnnnnnnnnnnnnnnnnnnnnnnnnnnnnnnnnnnnnnnnnnnnnnnnnnnnnnnnnnnnnnnnnnnnnnnnnnnnnnnnnnnnnnnnnnnnnnnnnnnnnnnnnnnnnnnnnnnnnnnnnnnnnnnnnnnnnnnnnnnnnnnnnnnnnnnnnnnnnnnnnnnnnnnnnnnnnnnnnnnnnnnnnnnnnnnnnnnnnnnnnnnnnnnnnnnnnnnnnnnnnnnnnnnnnnnnnnnnnnnnnnnnnnnnnnnnnnnnnnnnnnnnnnnnnnnnnnnnnnnnnnnnnnnnnnnnnnnnnnnnnnnnnnnnnnnnnnnnnnnnnnnnnnnnnnnnnnnnnnnnnnnnnnnnnnnnnnnnnnnnnnnnnnnnnnnnnnnnnnnnnnnnnnnnnnnnnnnnnnnnnnnnnnnnnnnnnnnnnnnnnnnnnnnnnnnnnnnnnnnnnnnnnnnnnnnnnnnnnnnnnnnnnnnnnnnnnnnnnnnnnnnnnnnnnnnnnnnnnnnnnnnnnnnnnnnnnnnnnnnnnnnnnnnnnnnnnnnnnnnnnnnnnnnnnnnnnnnnnnnnnnnnnnnnnnnnnnnnnnnnnnnnnnnnnnnnnnnnnnnnnnnnnnnnnnnnnnnnnnnnnnnnnnnnnnnnnnnnnnnnnnnnnnnnnnnnnnnnnnnnnnnnnnnnnnnnnnnnnnnnnnnnnnnnnnnnnnnnnnnnnnnnnnnnnnnnnnnnnnnnnnnnnnnnnnnnnnnnnnnnnnnnnnnnnnnnnnnnnnnnnnnnnnnnnnnnnnnnnnnnnnnnnnnnnnnnnnnnnnnnnnnnnnnnnnnnnnnnnnnnnnnnnnnnnnnnnnnnnnnnnnnnnnnnnnnnnnnnnnnnnnnnnnnnnnnnnnnnnnnnnnnnnnnnnnnnnnnnnnnnnnnnnnnnnnnnnnnnnnnnnnnnnnnnnnnnnnnnnnnnnnnnnnnnnnnnnnnnnnnnnnnnnnnnnnnnnnnnnnnnnnnnnnnnnnnnnnnnnnnnnnnnnnnnnnnnnnnnnnnnnnnnnnnnnnnnnnnnnnnnnnnnnnnnnnnnnnnnnnnnnnnnnnnnnnnnnnnnnnnnnnnnnnnnnnnnnnnnnnnnnnnnnnnnnnnnnnnnnnnnnnnnnnnnnnnnnnnnnnnnnnnnnnnnnnnnnnnnnnnnnnnnnnnnnnnnnnnnnnnnnnnnnnnnnnnnnnnnnnnnnnnnnnnnnnnnnnnnnnnnnnnnnnnnnnnnnnnnnnnnnnnnnnnnnnnnnnnnnnnnnnnnnnnnnnnnnnnnnnnnnnnnnnnnnnnnnnnnnnnnnnnnnnnnnnnnnnnnnnnnnnnnnnnnnnnnnnnnnnnnnnnnnnnnnnnnnnnnnnnnnnnnnnnnnnnnnnnnnnnnnnnnnnnnnnnnnnnnnnnnnnnnnnnnnnnnnnnnnnnnnnnnnnnnnnnnnnnnnnnnnnnnnnnnnnnnnnnnnnnnnnnnnnnnnnnnnnnnnnnnnnnnnnnnnnnnnnnnnnnnnnnnnnnnnnnnnnnnnnnnnnnnnnnnnnnnnnnnnnnnnnnnnnnnnnnnnnnnnnnnnnnnnnnnnnnnnnnnnnnnnnnnnnnnnnnnnnnnnnnnnnnnnnnnnnnnnnnnnnnnnnnnnnnnnnnnnnnnnnnnnnnnnnnnnnnnnnnnnnnnnnnnnnnnnnnnnnnnnnnnnnnnnnnnnnnnnnnnnnnnnnnnnnnnnnnnnnnnnnnnnnnnnnnnnnnnnnnnnnnnnnnnnnnnnnnnnnnnnnnnnnnnnnnnnnnnnnnnnnnnnnnnnnnnnnnnnnnnnnnnnnnnnnnnnnnnnnnnnnnnnnnnnnnnnnnnnnnnnnnnnnnnnnnnnnnnnnnnnnnnnnnnnnnnnnnnnnnnnnnnnnnnnnnnnnnnnnnnnnnnnnnnnnnnnnnnnnnnnnnnnnnnnnnnnnnnnnnnnnnnnnnnnnnnnnnnnnnnnnnnnnnnnnnnnnnnnnnnnnnnnnnnnnnnnnnnnnnnnnnnnnnnnnnnnnnnnnnnnnnnnnnnnnnnnnnnnnnnnnnnnnnnnnnnnnnnnnnnnnnnnnnnnnnnnnnnnnnnnnnnnnnnnnnnnnnnnnnnnnnnnnnnnnnnnnnnnnnnnnnnnnnnnnnnnnnnnnnnnnnnnnnnnnnnnnnnnnnnnnnnnnnnnnnnnnnnnnnnnnnnnnnnnnnnnnnnnnnnnnnnnnnnnnnnnnnnnnnnnnnnnnnnnnnnnnnnnnnnnnnnnnnnnnnnnnnnnnnnnnnnnnnnnnnnnnnnnnnnnnnnnnnnnnnnnnnnnnnnnnnnnnnnnnnnnnnnnnnnnnnnnnnnnnnnnnnnnnnnnnnnnnnnnnnnnnnnnnnnnnnnnnnnnnnnnnnnnnnnnnnnnnnnnnnnnnnnnnnnnnnnnnnnnnnnnnnnnnnnnnnnnnnnnnnnnnnnnnnnnnnnnnnnnnnnnnnnnnnnnnnnnnnnnnnnnnnnnnnnnnnnnnnnnnnnnnnnnnnnnnnnnnnnnnnnnnnnnnnnnnnnnnnnnnnnnnnnnnnnnnnnnnnnnnnnnnnnnnnnnnnnnnnnnnnnnnnnnnnnnnnnnnnnnnnnnnnnnnnnnnnnnnnnnnnnnnnnnnnnnnnnnnnnnnnnnnnnnnnnnnnnnnnnnnnnnnnnnnnnnnnnnnnnnnnnnnnnnnnnnnnnnnnnnnnnnnnnnnnnnnnnnnnnnnnnnnnnnnnnnnnnnnnnnnnnnnnnnnnnnnnnnnnnnnnnnnnnnnnnnnnnnnnnnnnnnnnnnnnnnnnnnnnnnnnnnnnnnnnnnnnnnnnnnnnnnnnnnnnnnnnnnnnnnnnnnnnnnnnnnnnnnnnnnnnnnnnnnnnnnnnnnnnnnnnnnnnnnnnnnnnnnnnnnnnnnnnnnnnnnnnnnnnnnnnnnnnnnnnnnnnnnnnnnnnnnnnnnnnnnnnnnnnnnnnnnnnnnnnnnnnnnnnnnnnnnnnnnnnnnnnnnnnnnnnnnnnnnnnnnnnnnnnnnnnnnnnnnnnnnnnnnnnnnnnnnnnnnnnnnnnnnnnnnnnnnnnnnnnnnnnnnnnnnnnnnnnnnnnnnnnnnnnnnnnnnnnnnnnnnnnnnnnnnnnnnnnnnnnnnnnnnnnnnnnnnnnnnnnnnnnnnnnnnnnnnnnnnnnnnnnnnnnnnnnnnnnnnnnnnnnnnnnnnnnnnnnnnnnnnnnnnnnnnnnnnnnnnnnnnnnnnnnnnnnnnnnnnnnnnnnnnnnnnnnnnnnnnnnnnnnnnnnnnnnnnnnnnnnnnnnnnnnnnnnnnnnnnnnnnnnnnnnnnnnnnnnnnnnnnnnnnnnnnnnnnnnnnnnnnnnnnnnnnnnnnnnnnnnnnnnnnnnnnnnnnnnnnnnnnnnnnnnnnnnnnnnnnnnnnnnnnnnnnnnnnnnnnnnnnnnnnnnnnnnnnnnnnnnnnnnnnnnnnnnnnnnnnnnnnnnnnnnnnnnnnnnnnnnnnnnnnnnnnnnnnnnnnnnnnnnnnnnnnnnnnnnnnnnnnnnnnnnnnnnnnnnnnnnnnnnnnnnnnnnnnnnnnnnnnnnnnnnnnnnnnnnnnnnnnnnnnnnnnnnnnnnnnnnnnnnnnnnnnnnnnnnnnnnnnnnnnnnnnnnnnnnnnnnnnnnnnnnnnnnnnnnnnnnnnnnnnnnnnnnnnnnnnnnnnnnnnnnnnnnnnnnnnnnnnnnnnnnnnnnnnnnnnnnnnnnnnnnnnnnnnnnnnnnnnnnnnnnnnnnnnnnnnnnnnnnnnnnnnnnnnnnnnnnnnnnnnnnnnnnnnnnnnnnnnnnnnnnnnnnnnnnnnnnnnnnnnnnnnnnnnnnnnnnnnnnnnnnnnnnnnnnnnnnnnnnnnnnnnnnnnnnnnnnnnnnnnnnnnnnnnnnnnnnnnnnnnnnnnnnnnnnnnnnnnnnnnnnnnnnnnnnnnnnnnnnnnnnnnnnnnnnnnnnnnnnnnnnnnnnnnnnnnnnnnnnnnnnnnnnnnnnnnnnnnnnnnnnnnnnnnnnnnnnnnnnnnnnnnnnnnnnnnnnnnnnnnnnnnnnnnnnnnnnnnnnnnnnnnnnnnnnnnnnnnnnnnnnnnnnnnnnnnnnnnnnnnnnnnnnnnnnnnnnnnnnnnnnnnnnnnnnnnnnnnnnnnnnnnnnnnnnnnnnnnnnnnnnnnnnnnnnnnnnnnnnnnnnnnnnnnnnnnnnnnnnnnnnnnnnnnnnnnnnnnnnnnnnnnnnnnnnnnnnnnnnnnnnnnnnnnnnnnnnnnnnnnnnnnnnnnnnnnnnnnnnnnnnnnnnnnnnnnnnnnnnnnnnnnnnnnnnnnnnnnnnnnnnnnnnnnnnnnnnnnnnnnnnnnnnnnnnnnnnnnnnnnnnnnnnnnnnnnnnnnnnnnnnnnnnnnnnnnnnnnnnnnnnnnnnnnnnnnnnnnnnnnnnnnnnnnnnnnnnnnnnnnnnnnnnnnnnnnnnnnnnnnnnnnnnnnnnnnnnnnnnnnnnnnnnnnnnnnnnnnnnnnnnnnnnnnnnnnnnnnnnnnnnnnnnnnnnnnnnnnnnnnnnnnnnnnnnnnnnnnnnnnnnnnnnnnnnnnnnnnnnnnnnnnnnnnnnnnnnnnnnnnnnnnnnnnnnnnnnnnnnnnnnnnnnnnnnnnnnnnnnnnnnnnnnnnnnnnnnnnnnnnnnnnnnnnnnnnnnnnnnnnnnnnnnnnnnnnnnnnnnnnnnnnnnnnnnnnnnnnnnnnnnnnnnnnnnnnnnnnnnnnnnnnnnnnnnnnnnnnnnnnnnnnnnnnnnnnnnnnnnnnnnnnnnnnnnnnnnnnnnnnnnnnnnnnnnnnnnnnnnnnnnnnnnnnnnnnnnnnnnnnnnnnnnnnnnnnnnnnnnnnnnnnnnnnnnnnnnnnnnnnnnnnnnnnnnnnnnnnnnnnnnnnnnnnnnnnnnnnnnnnnnnnnnnnnnnnnnnnnnnnnnnnnnnnnnnnnnnnnnnnnnnnnnnnnnnnnnnnnnnnnnnnnnnnnnnnnnnnnnnnnnnnnnnnnnnnnnnnnnnnnnnnnnnnnnnnnnnnnnnnnnnnnnnnnnnnnnnnnnnnnnnnnnnnnnnnnnnnnnnnnnnnnnnnnnnnnnnnnnnnnnnnnnnnnnnnnnnnnnnnnnnnnnnnnnnnnnnnnnnnnnnnnnnnnnnnnnnnnnnnnnnnnnnnnnnnnnnnnnnnnnnnnnnnnnnnnnnnnnnnnnnnnnnnnnnnnnnnnnnnnnnnnnnnnnnnnnnnnnnnnnnnnnnnnnnnnnnnnnnnnnnnnnnnnnnnnnnnnnnnnnnnnnnnnnnnnnnnnnnnnnnnnnnnnnnnnnnnnnnnnnnnnnnnnnnnnnnnnnnnnnnnnnnnnnnnnnnnnnnnnnnnnnnnnnnnnnnnnnnnnnnnnnnnnnnnnnnnnnnnnnnnnnnnnnnnnnnnnnnnnnnnnnnnnnnnnnnnnnnnnnnnnnnnnnnnnnnnnnnnnnnnnnnnnnnnnnnnnnnnnnnnnnnnnnnnnnnnnnnnnnnnnnnnnnnnnnnnnnnnnnnnnnnnnnnnnnnnnnnnnnnnnnnnnnnnnnnnnnnnnnnnnnnnnnnnnnnnnnnnnnnnnnnnnnnnnnnnnnnnnnnnnnnnnnnnnnnnnnnnnnnnnnnnnnnnnnnnnnnnnnnnnnnnnnnnnnnnnnnnnnnnnnnnnnnnnnnnnnnnnnnnnnnnnnnnnnnnnnnnnnnnnnnnnnnnnnnnnnnnnnnnnnnnnnnnnnnnnnnnnnnnnnnnnnnnnnnnnnnnnnnnnnnnnnnnnnnnnnnnnnnnnnnnnnnnnnnnnnnnnnnnnnnnnnnnnnnnnnnnnnnnnnnnnnnnnnnnnnnnnnnnnnnnnnnnnnnnnnnnnnnnnnnnnnnnnnnnnnnnnnnnnnnnnnnnnnnnnnnnnnnnnnnnnnnnnnnnnnnnnnnnnnnnnnnnnnnnnnnnnnnnnnnnnnnnnnnnnnnnnnnnnnnnnnnnnnnnnnnnnnnnnnnnnnnnnnnnnnnnnnnnnnnnnnnnnnnnnnnnnnnnnnnnnnnnnnnnnnnnnnnnnnnnnnnnnnnnnnnnnnnnnnnnnnnnnnnnnnnnnnnnnnnnnnnnnnnnnnnnnnnnnnnnnnnnnnnnnnnnnnnnnnnnnnnnnnnnnnnnnnnnnnnnnnnnnnnnnnnnnnnnnnnnnnnnnnnnnnnnnnnnnnnnnnnnnnnnnnnnnnnnnnnnnnnnnnnnnnnnnnnnnnnnnnnnnnnnnnnnnnnnnnnnnnnnnnnnnnnnnnnnnnnnnnnnnnnnnnnnnnnnnnnnnnnnnnnnnnnnnnnnnnnnnnnnnnnnnnnnnnnnnnnnnnnnnnnnnnnnnnnnnnnnnnnnnnnnnnnnnnnnnnnnnnnnnnnnnnnnnnnnnnnnnnnnnnnnnnnnnnnnnnnnnnnnnnnnnnnnnnnnnnnnnnnnnnnnnnnnnnnnnnnnnnnnnnnnnnnnnnnnnnnnnnnnnnnnnnnnnnnnnnnnnnnnnnnnnnnnnnnnnnnnnnnnnnnnnnnnnnnnnnnnnnnnnnnnnnnnnnnnnnnnnnnnnnnnnnnnnnnnnnnnnnnnnnnnnnnnnnnnnnnnnnnnnnnnnnnnnnnnnnnnnnnnnnnnnnnnnnnnnnnnnnnnnnnnnnnnnnnnnnnnnnnnnnnnnnnnnnnnnnnnnnnnnnnnnnnnnnnnnnnnnnnnnnnnnnnnnnnnnnnnnnnnnnnnnnnnnnnnnnnnnnnnnnnnnnnnnnnnnnnnnnnnnnnnnnnnnnnnnnnnnnnnnnnnnnnnnnnnnnnnnnnnnnnnnnnnnnnnnnnnnnnnnnnnnnnnnnnnnnnnnnnnnnnnnnnnnnnnnnnnnnnnnnnnnnnnnnnnnnnnnnnnnnnnnnnnnnnnnnnnnnnnnnnnnnnnnnnnnnnnnnnnnnnnnnnnnnnnnnnnnnnnnnnnnnnnnnnnnnnnnnnnnnnnnnnnnnnnnnnnnnnnnnnnnnnnnnnnnnnnnnnnnnnnnnnnnnnnnnnnnnnnnnnnnnnnnnnnnnnnnnnnnnnnnnnnnnnnnnnnnnnnnnnnnnnnnnnnnnnnnnnnnnnnnnnnnnnnnnnnnnnnnnnnnnnnnnnnnnnnnnnnnnnnnnnnnnnnnnnnnnnnnnnnnnnnnnnnnnnnnnnnnnnnnnnnnnnnnnnnnnnnnnnnnnnnnnnnnnnnnnnnnnnnnnnnnnnnnnnnnnnnnnnnnnnnnnnnnnnnnnnnnnnnnnnnnnnnnnnnnnnnnnnnnnnnnnnnnnnnnnnnnnnnnnnnnnnnnnnnnnnnnnnnnnnnnnnnnnnnnnnnnnnnnnnnnnnnnnnnnnnnnnnnnnnnnnnnnnnnnnnnnnnnnnnnnnnnnnnnnnnnnnnnnnnnnnnnnnnnnnnnnnnnnnnnnnnnnnnnnnnnnnnnnnnnnnnnnnnnnnnnnnnnnnnnnnnnnnnnnnnnnnnnnnnnnnnnnnnnnnnnnnnnnnnnnnnnnnnnnnnnnnnnnnnnnnnnnnnnnnnnnnnnnnnnnnnnnnnnnnnnnnnnnnnnnnnnnnnnnnnnnnnnnnnnnnnnnnnnnnnnnnnnnnnnnnnnnnnnnnnnnnnnnnnnnnnnnnnnnnnnnnnnnnnnnnnnnnnnnnnnnnnnnnnnnnnnnnnnnnnnnnnnnnnnnnnnnnnnnnnnnnnnnnnnnnnnnnnnnnnnnnnnnnnnnnnnnnnnnnnnnnnnnnnnnnnnnnnnnnnnnnnnnnnnnnnnnnnnnnnnnnnnnnnnnnnnnnnnnnnnnnnnnnnnnnnnnnnnnnnnnnnnnnnnnnnnnnnnnnnnnnnnnnnnnnnnnnnnnnnnnnnnnnnnnnnnnnnnnnnnnnnnnnnnnnnnnnnnnnnnnnnnnnnnnnnnnnnnnnnnnnnnnnnnnnnnnnnnnnnnnnnnnnnnnnnnnnnnnnnnnnnnnnnnnnnnnnnnnnnnnnnnnnnnnnnnnnnnnnnnnnnnnnnnnnnnnnnnnnnnnnnnnnnnnnnnnnnnnnnnnnnnnnnnnnnnnnnnnnnnnnnnnnnnnnnnnnnnnnnnnnnnnnnnnnnnnnnnnnnnnnnnnnnnnnnnnnnnnnnnnnnnnnnnnnnnnnnnnnnnnnnnnnnnnnnnnnnnnnnnnnnnnnnnnnnnnnnnnnnnnnnnnnnnnnnnnnnnnnnnnnnnnnnnnnnnnnnnnnnnnnnnnnnnnnnnnnnnnnnnnnnnnnnnnnnnnnnnnnnnnnnnnnnnnnnnnnnnnnnnnnnnnnnnnnnnnnnnnnnnnnnnnnnnnnnnnnnnnnnnnnnnnnnnnnnnnnnnnnnnnnnnnnnnnnnnnnnnnnnnnnnnnnnnnnnnnnnnnnnnnnnnnnnnnnnnnnnnnnnnnnnnnnnnnnnnnnnnnnnnnnnnnnnnnnnnnnnnnnnnnnnnnnnnnnnnnnnnnnnnnnnnnnnnnnnnnnnnnnnnnnnnnnnnnnnnnnnnnnnnnnnnnnnnnnnnnnnnnnnnnnnnnnnnnnnnnnnnnnnnnnnnnnnnnnnnnnnnnnnnnnnnnnnnnnnnnnnnnnnnnnnnnnnnnnnnnnnnnnnnnnnnnnnnnnnnnnnnnnnnnnnnnnnnnnnnnnnnnnnnnnnnnnnnnnnnnnnnnnnnnnnnnnnnnnnnnnnnnnnnnnnnnnnnnnnnnnnnnnnnnnnnnnnnnnnnnnnnnnnnnnnnnnnnnnnnnnnnnnnnnnnnnnnnnnnnnnnnnnnnnnnnnnnnnnnnnnnnnnnnnnnnnnnnnnnnnnnnnnnnnnnnnnnnnnnnnnnnnnnnnnnnnnnnnnnnnnnnnnnnnnnnnnnnnnnnnnnnnnnnnnnnnnnnnnnnnnnnnnnnnnnnnnnnnnnnnnnnnnnnnnnnnnnnnnnnnnnnnnnnnnnnnnnnnnnnnnnnnnnnnnnnnnnnnnnnnnnnnnnnnnnnnnnnnnnnnnnnnnnnnnnnnnnnnnnnnnnnnnnnnnnnnnnnnnnnnnnnnnnnnnnnnnnnnnnnnnnnnnnnnnnnnnnnnnnnnnnnnnnnnnnnnnnnnnnnnnnnnnnnnnnnnnnnnnnnnnnnnnnnnnnnnnnnnnnnnnnnnnnnnnnnnnnnnnnnnnnnnnnnnnnnnnnnnnnnnnnnnnnnnnnnnnnnnnnnnnnnnnnnnnnnnnnnnnnnnnnnnnnnnnnnnnnnnnnnnnnnnnnnnnnnnnnnnnnnnnnnnnnnnnnnnnnnnnnnnnnnnnnnnnnnnnnnnnnnnnnnnnnnnnnnnnnnnnnnnnnnnnnnnnnnnnnnnnnnnnnnnnnnnnnnnnnnnnnnnnnnnnnnnnnnnnnnnnnnnnnnnnnnnnnnnnnnnnnnnnnnnnnnnnnnnnnnnnnnnnnnnnnnnnnnnnnnnnnnnnnnnnnnnnnnnnnnnnnnnnnnnnnnnnnnnnnnnnnnnnnnnnnnnnnnnnnnnnnnnnnnnnnnnnnnnnnnnnnnnnnnnnnnnnnnnnnnnnnnnnnnnnnnnnnnnnnnnnnnnnnnnnnnnnnnnnnnnnnnnnnnnnnnnnnnnnnnnnnnnnnnnnnnnnnnnnnnnnnnnnnnnnnnnnnnnnnnnnnnnnnnnnnnnnnnnnnnnnnnnnnnnnnnnnnnnnnnnnnnnnnnnnnnnnnnnnnnnnnnnnnnnnnnnnnnnnnnnnnnnnnnnnnnnnnnnnnnnnnnnnnnnnnnnnnnnnnnnnnnnnnnnnnnnnnnnnnnnnnnnnnnnnnnnnnnnnnnnnnnnnnnnnnnnnnnnnnnnnnnnnnnnnnnnnnnnnnnnnnnnnnnnnnnnnnnnnnnnnnnnnnnnnnnnnnnnnnnnnnnnnnnnnnnnnnnnnnnnnnnnnnnnnnnnnnnnnnnnnnnnnnnnnnnnnnnnnnnnnnnnnnnnnnnnnnnnnnnnnnnnnnnnnnnnnnnnnnnnnnnnnnnnnnnnnnnnnnnnnnnnnnnnnnnnnnnnnnnnnnnnnnnnnnnnnnnnnnnnnnnnnnnnnnnnnnnnnnnnnnnnnnnnnnnnnnnnnnnnnnnnnnnnnnnnnnnnnnnnnnnnnnnnnnnnnnnnnnnnnnnnnnnnnnnnnnnnnnnnnnnnnnnnnnnnnnnnnnnnnnnnnnnnnnnnnnnnnnnnnnnnnnnnnnnnnnnnnnnnnnnnnnnnnnnnnnnnnnnnnnnnnnnnnnnnnnnnnnnnnnnnnnnnnnnnnnnnnnnnnnnnnnnnnnnnnnnnnnnnnnnnnnnnnnnnnnnnnnnnnnnnnnnnnnnnnnnnnnnnnnnnnnnnnnnnnnnnnnnnnnnnnnnnnnnnnnnnnnnnnnnnnnnnnnnnnnnnnnnnnnnnnnnnnnnnnnnnnnnnnnnnnnnnnnnnnnnnnnnnnnnnnnnnnnnnnnnnnnnnnnnnnnnnnnnnnnnnnnnnnnnnnnnnnnnnnnnnnnnnnnnnnnnnnnnnnnnnnnnnnnnnnnnnnnnnnnnnnnnnnnnnnnnnnnnnnnnnnnnnnnnnnnnnnnnnnnnnnnnnnnnnnnnnnnnnnnnnnnnnnnnnnnnnnnnnnnnnnnnnnnnnnnnnnnnnnnnnnnnnnnnnnnnnnnnnnnnnnnnnnnnnnnnnnnnnnnnnnnnnnnnnnnnnnnnnnnnnnnnnnnnnnnnnnnnnnnnnnnnnnnnnnnnnnnnnnnnnnnnnnnnnnnnnnnnnnnnnnnnnnnnnnnnnnnnnnnnnnnnnnnnnnnnnnnnnnnnnnnnnnnnnnnnnnnnnnnnnnnnnnnnnnnnnnnnnnnnnnnnnnnnnnnnnnnnnnnnnnnnnnnnnnnnnnnnnnnnnnnnnnnnnnnnnnnnnnnnnnnnnnnnnnnnnnnnnnnnnnnnnnnnnnnnnnnnnnnnnnnnnnnnnnnnnnnnnnnnnnnnnnnnnnnnnnnnnnnnnnnnnnnnnnnnnnnnnnnnnnnnnnnnnnnnnnnnnnnnnnnnnnnnnnnnnnnnnnnnnnnnnnnnnnnnnnnnnnnnnnnnnnnnnnnnnnnnnnnnnnnnnnnnnnnnnnnnnnnnnnnnnnnnnnnnnnnnnnnnnnnnnnnnnnnnnnnnnnnnnnnnnnnnnnnnnnnnnnnnnnnnnnnnnnnnnnnnnnnnnnnnnnnnnnnnnnnnnnnnnnnnnnnnnnnnnnnnnnnnnnnnnnnnnnnnnnnnnnnnnnnnnnnnnnnnnnnnnnnnnnnnnnnnnnnnnnnnnnnnnnnnnnnnnnnnnnnnnnnnnnnnnnnnnnnnnnnnnnnnnnnnnnnnnnnnnnnnnnnnnnnnnnnnnnnnnnnnnnnnnnnnnnnnnnnnnnnnnnnnnnnnnnnnnnnnnnnnnnnnnnnnnnnnnnnnnnnnnnnnnnnnnnnnnnnnnnnnnnnnnnnnnnnnnnnnnnnnnnnnnnnnnnnnnnnnnnnnnnnnnnnnnnnnnnnnnnnnnnnnnnnnnnnnnnnnnnnnnnnnnnnnnnnnnnnnnnnnnnnnnnnnnnnnnnnnnnnnnnnnnnnnnnnnnnnnnnnnnnnnnnnnnnnnnnnnnnnnnnnnnnnnnnnnnnnnnnnnnnnnnnnnnnnnnnnnnnnnnnnnnnnnnnnnnnnnnnnnnnnnnnnnnnnnnnnnnnnnnnnnnnnnnnnnnnnnnnnnnnnnnnnnnnnnnnnnnnnnnnnnnnnnnnnnnnnnnnnnnnnnnnnnnnnnnnnnnnnnnnnnnnnnnnnnnnnnnnnnnnnnnnnnnnnnnnnnnnnnnnnnnnnnnnnnnnnnnnnnnnnnnnnnnnnnnnnnnnnnnnnnnnnnnnnnnnnnnnnnnnnnnnnnnnnnnnnnnnnnnnnnnnnnnnnnnnnnnnnnnnnnnnnnnnnnnnnnnnnnnnnnnnnnnnnnnnnnnnnnnnnnnnnnnnnnnnnnnnnnnnnnnnnnnnnnnnnnnnnnnnnnnnnnnnnnnnnnnnnnnnnnnnnnnnnnnnnnnnnnnnnnnnnnnnnnnnnnnnnnnnnnnnnnnnnnnnnnnnnnnnnnnnnnnnnnnnnnnnnnnnnnnnnnnnnnnnnnnnnnnnnnnnnnnnnnnnnnnnnnnnnnnnnnnnnnnnnnnnnnnnnnnnnnnnnnnnnnnnnnnnnnnnnnnnnnnnnnnnnnnnnnnnnnnnnnnnnnnnnnnnnnnnnnnnnnnnnnnnnnnnnnnnnnnnnnnnnnnnnnnnnnnnnnnnnnnnnnnnnnnnnnnnnnnnnnnnnnnnnnnnnnnnnnnnnnnnnnnnnnnnnnnnnnnnnnnnnnnnnnnnnnnnnnnnnnnnnnnnnnnnnnnnnnnnnnnnnnnnnnnnnnnnnnnnnnnnnnnnnnnnnnnnnnnnnnnnnnnnnnnnnnnnnnnnnnnnnnnnnnnnnnnnnnnnnnnnnnnnnnnnnnnnnnnnnnnnnnnnnnnnnnnnnnnnnnnnnnnnnnnnnnnnnnnnnnnnnnnnnnnnnnnnnnnnnnnnnnnnnnnnnnnnnnnnnnnnnnnnnnnnnnnnnnnnnnnnnnnnnnnnnnnnnnnnnnnnnnnnnnnnnnnnnnnnnnnnnnnnnnnnnnnnnnnnnnnnnnnnnnnnnnnnnnnnnnnnnnnnnnnnnnnnnnnnnnnnnnnnnnnnnnnnnnnnnnnnnnnnnnnnnnnnnnnnnnnnnnnnnnnnnnnnnnnnnnnnnnnnnnnnnnnnnnnnnnnnnnnnnnnnnnnnnnnnnnnnnnnnnnnnnnnnnnnnnnnnnnnnnnnnnnnnnnnnnnnnnnnnnnnnnnnnnnnnnnnnnnnnnnnnnnnnnnnnnnnnnnnnnnnnnnnnnnnnnnnnnnnnnnnnnnnnnnnnnnnnnnnnnnnnnnnnnnnnnnnnnnnnnnnnnnnnnnnnnnnnnnnnnnnnnnnnnnnnnnnnnnnnnnnnnnnnnnnnnnnnnnnnnnnnnnnnnnnnnnnnnnnnnnnnnnnnnnnnnnnnnnnnnnnnnnnnnnnnnnnnnnnnnnnnnnnnnnnnnnnnnnnnnnnnnnnnnnnnnnnnnnnnnnnnnnnnnnnnnnnnnnnnnnnnnnnnnnnnnnnnnnnnnnnnnnnnnnnnnnnnnnnnnnnnnnnnnnnnnnnnnnnnnnnnnnnnnnnnnnnnnnnnnnnnnnnnnnnnnnnnnnnnnnnnnnnnnnnnnnnnnnnnnnnnnnnnnnnnnnnnnnnnnnnnnnnnnnnnnnnnnnnnnnnnnnnnnnnnnnnnnnnnnnnnnnnnnnnnnnnnnnnnnnnnnnnnnnnnnnnnnnnnnnnnnnnnnnnnnnnnnnnnnnnnnnnnnnnnnnnnnnnnnnnnnnnnnnnnnnnnnnnnnnnnnnnnnnnnnnnnnnnnnnnnnnnnnnnnnnnnnnnnnnnnnnnnnnnnnnnnnnnnnnnnnnnnnnnnnnnnnnnnnnnnnnnnnnnnnnnnnnnnnnnnnnnnnnnnnnnnnnnnnnnnnnnnnnnnnnnnnnnnnnnnnnnnnnnnnnnnnnnnnnnnnnnnnnnnnnnnnnnnnnnnnnnnnnnnnnnnnnnnnnnnnnnnnnnnnnnnnnnnnnnnnnnnnnnnnnnnnnnnnnnnnnnnnnnnnnnnnnnnnnnnnnnnnnnnnnnnnnnnnnnnnnnnnnnnnnnnnnnnnnnnnnnnnnnnnnnnnnnnnnnnnnnnnnnnnnnnnnnnnnnnnnnnnnnnnnnnnnnnnnnnnnnnnnnnnnnnnnnnnnnnnnnnnnnnnnnnnnnnnnnnnnnnnnnnnnnnnnnnnnnnnnnnnnnnnnnnnnnnnnnnnnnnnnnnnnnnnnnnnnnnnnnnnnnnnnnnnnnnnnnnnnnnnnnnnnnnnnnnnnnnnnnnnnnnnnnnnnnnnnnnnnnnnnnnnnnnnnnnnnnnnnnnnnnnnnnnnnnnnnnnnnnnnnnnnnnnnnnnnnnnnnnnnnnnnnnnnnnnnnnnnnnnnnnnnnnnnnnnnnnnnnnnnnnnnnnnnnnnnnnnnnnnnnnnnnnnnnnnnnnnnnnnnnnnnnnnnnnnnnnnnnnnnnnnnnnnnnnnnnnnnnnnnnnnnnnnnnnnnnnnnnnnnnnnnnnnnnnnnnnnnnnnnnnnnnnnnnnnnnnnnnnnnnnnnnnnnnnnnnnnnnnnnnnnnnnnnnnnnnnnnnnnnnnnnnnnnnnnnnnnnnnnnnnnnnnnnnnnnnnnnnnnnnnnnnnnnnnnnnnnnnnnnnnnnnnnnnnnnnnnnnnnnnnnnnnnnnnnnnnnnnnnnnnnnnnnnnnnnnnnnnnnnnnnnnnnnnnnnnnnnnnnnnnnnnnnnnnnnnnnnnnnnnnnnnnnnnnnnnnnnnnnnnnnnnnnnnnnnnnnnnnnnnnnnnnnnnnnnnnnnnnnnnnnnnnnnnnnnnnnnnnnnnnnnnnnnnnnnnnnnnnnnnnnnnnnnnnnnnnnnnnnnnnnnnnnnnnnnnnnnnnnnnnnnnnnnnnnnnnnnnnnnnnnnnnnnnnnnnnnnnnnnnnnnnnnnnnnnnnnnnnnnnnnnnnnnnnnnnnnnnnnnnnnnnnnnnnnnnnnnnnnnnnnnnnnnnnnnnnnnnnnnnnnnnnnnnnnnnnnnnnnnnnnnnnnnnnnnnnnnnnnnnnnnnnnnnnnnnnnnnnnnnnnnnnnnnnnnnnnnnnnnnnnnnnnnnnnnnnnnnnnnnnnnnnnnnnnnnnnnnnnnnnnnnnnnnnnnnnnnnnnnnnnnnnnnnnnnnnnnnnnnnnnnnnnnnnnnnnnnnnnnnnnnnnnnnnnnnnnnnnnnnnnnnnnnnnnnnnnnnnnnnnnnnnnnnnnnnnnnnnnnnnnnnnnnnnnnnnnnnnnnnnnnnnnnnnnnnnnnnnnnnnnnnnnnnnnnnnnnnnnnnnnnnnnnnnnnnnnnnnnnnnnnnnnnnnnnnnnnnnnnnnnnnnnnnnnnnnnnnnnnnnnnnnnnnnnnnnnnnnnnnnnnnnnnnnnnnnnnnnnnnnnnnnnnnnnnnnnnnnnnnnnnnnnnnnnnnnnnnnnnnnnnnnnnnnnnnnnnnnnnnnnnnnnnnnnnnnnnnnnnnnnnnnnnnnnnnnnnnnnnnnnnnnnnnnnnnnnnnnnnnnnnnnnnnnnnnnnnnnnnnnnnnnnnnnnnnnnnnnnnnnnnnnnnnnnnnnnnnnnnnnnnnnnnnnnnnnnnnnnnnnnnnnnnnnnnnnnnnnnnnnnnnnnnnnnnnnnnnnnnnnnnnnnnnnnnnnnnnnnnnnnnnnnnnnnnnnnnnnnnnnnnnnnnnnnnnnnnnnnnnnnnnnnnnnnnnnnnnnnnnnnnnnnnnnnnnnnnnnnnnnnnnnnnnnnnnnnnnnnnnnnnnnnnnnnnnnnnnnnnnnnnnnnnnnnnnnnnnnnnnnnnnnnnnnnnnnnnnnnnnnnnnnnnnnnnnnnnnnnnnnnnnnnnnnnnnnnnnnnnnnnnnnnnnnnnnnnnnnnnnnnnnnnnnnnnnnnnnnnnnnnnnnnnnnnnnnnnnnnnnnnnnnnnnnnnnnnnnnnnnnnnnnnnnnnnnnnnnnnnnnnnnnnnnnnnnnnnnnnnnnnnnnnnnnnnnnnnnnnnnnnnnnnnnnnnnnnnnnnnnnnnnnnnnnnnnnnnnnnnnnnnnnnnnnnnnnnnnnnnnnnnnnnnnnnnnnnnnnnnnnnnnnnnnnnnnnnnnnnnnnnnnnnnnnnnnnnnnnnnnnnnnnnnnnnnnnnnnnnnnnnnnnnnnnnnnnnnnnnnnnnnnnnnnnnnnnnnnnnnnnnnnnnnnnnnnnnnnnnnnnnnnnnnnnnnnnnnnnnnnnnnnnnnnnnnnnnnnnnnnnnnnnnnnnnnnnnnnnnnnnnnnnnnnnnnnnnnnnnnnnnnnnnnnnnnnnnnnnnnnnnnnnnnnnnnnnnnnnnnnnnnnnnnnnnnnnnnnnnnnnnnnnnnnnnnnnnnnnnnnnnnnnnnnnnnnnnnnnnnnnnnnnnnnnnnnnnnnnnnnnnnnnnnnnnnnnnnnnnnnnnnnnnnnnnnnnnnnnnnnnnnnnnnnnnnnnnnnnnnnnnnnnnnnnnnnnnnnnnnnnnnnnnnnnnnnnnnnnnnnnnnnnnnnnnnnnnnnnnnnnnnnnnnnnnnnnnnnnnnnnnnnnnnnnnnnnnnnnnnnnnnnnnnnnnnnnnnnnnnnnnnnnnnnnnnnnnnnnnnnnnnnnnnnnnnnnnnnnnnnnnnnnnnnnnnnnnnnnnnnnnnnnnnnnnnnnnnnnnnnnnnnnnnnnnnnnnnnnnnnnnnnnnnnnnnnnnnnnnnnnnnnnnnnnnnnnnnnnnnnnnnnnnnnnnnnnnnnnnnnnnnnnnnnnnnnnnnnnnnnnnnnnnnnnnnnnnnnnnnnnnnnnnnnnnnnnnnnnnnnnnnnnnnnnnnnnnnnnnnnnnnnnnnnnnnnnnnnnnnnnnnnnnnnnnnnnnnnnnnnnnnnnnnnnnnnnnnnnnnnnnnnnnnnnnnnnnnnnnnnnnnnnnnnnnnnnnnnnnnnnnnnnnnnnnnnnnnnnnnnnnnnnnnnnnnnnnnnnnnnnnnnnnnnnnnnnnnnnnnnnnnnnnnnnnnnnnnnnnnnnnnnnnnnnnnnnnnnnnnnnnnnnnnnnnnnnnnnnnnnnnnnnnnnnnnnnnnnnnnnnnnnnnnnnnnnnnnnnnnnnnnnnnnnnnnnnnnnnnnnnnnnnnnnnnnnnnnnnnnnnnnnnnnnnnnnnnnnnnnnnnnnnnnnnnnnnnnnnnnnnnnnnnnnnnnnnnnnnnnnnnnnnnnnnnnnnnnnnnnnnnnnnnnnnnnnnnnnnnnnnnnnnnnnnnnnnnnnnnnnnnnnnnnnnnnnnnnnnnnnnnnnnnnnnnnnnnnnnnnnnnnnnnnnnnnnnnnnnnnnnnnnnnnnnnnnnnnnnnnnnnnnnnnnnnnnnnnnnnnnnnnnnnnnnnnnnnnnnnnnnnnnnnnnnnnnnnnnnnnnnnnnnnnnnnnnnnnnnnnnnnnnnnnnnnnnnnnnnnnnnnnnnnnnnnnnnnnnnnnnnnnnnnnnnnnnnnnnnnnnnnnnnnnnnnnnnnnnnnnnnnnnnnnnnnnnnnnnnnnnnnnnnnnnnnnnnnnnnnnnnnnnnnnnnnnnnnnnnnnnnnnnnnnnnnnnnnnnnnnnnnnnnnnnnnnnnnnnnnnnnnnnnnnnnnnnnnnnnnnnnnnnnnnnnnnnnnnnnnnnnnnnnnnnnnnnnnnnnnnnnnnnnnnnnnnnnnnnnnnnnnnnnnnnnnnnnnnnnnnnnnnnnnnnnnnnnnnnnnnnnnnnnnnnnnnnnnnnnnnnnnnnnnnnnnnnnnnnnnnnnnnnnnnnnnnnnnnnnnnnnnnnnnnnnnnnnnnnnnnnnnnnnnnnnnnnnnnnnnnnnnnnnnnnnnnnnnnnnnnnnnnnnnnnnnnnnnnnnnnnnnnnnnnnnnnnnnnnnnnnnnnnnnnnnnnnnnnnnnnnnnnnnnnnnnnnnnnnnnnnnnnnnnnnnnnnnnnnnnnnnnnnnnnnnnnnnnnnnnnnnnnnnnnnnnnnnnnnnnnnnnnnnnnnnnnnnnnnnnnnnnnnnnnnnnnnnnnnnnnnnnnnnnnnnnnnnnnnnnnnnnnnnnnnnnnnnnnnnnnnnnnnnnnnnnnnnnnnnnnnnnnnnnnnnnnnnnnnnnnnnnnnnnnnnnnnnnnnnnnnnnnnnnnnnnnnnnnnnnnnnnnnnnnnnnnnnnnnnnnnnnnnnnnnnnnnnnnnnnnnnnnnnnnnnnnnnnnnnnnnnnnnnnnnnnnnnnnnnnnnnnnnnnnnnnnnnnnnnnnnnnnnnnnnnnnnnnnnnnnnnnnnnnnnnnnnnnnnnnnnnnnnnnnnnnnnnnnnnnnnnnnnnnnnnnnnnnnnnnnnnnnnnnnnnnnnnnnnnnnnnnnnnnnnnnnnnnnnnnnnnnnnnnnnnnnnnnnnnnnnnnnnnnnnnnnnnnnnnnnnnnnnnnnnnnnnnnnnnnnnnnnnnnnnnnnnnnnnnnnnnnnnnnnnnnnnnnnnnnnnnnnnnnnnnnnnnnnnnnnnnnnnnnnnnnnnnnnnnnnnnnnnnnnnnnnnnnnnnnnnnnnnnnnnnnnnnnnnnnnnnnnnnnnnnnnnnnnnnnnnnnnnnnnnnnnnnnnnnnnnnnnnnnnnnnnnnnnnnnnnnnnnnnnnnnnnnnnnnnnnnnnnnnnnnnnnnnnnnnnnnnnnnnnnnnnnnnnnnnnnnnnnnnnnnnnnnnnnnnnnnnnnnnnnnnnnnnnnnnnnnnnnnnnnnnnnnnnnnnnnnnnnnnnnnnnnnnnnnnnnnnnnnnnnnnnnnnnnnnnnnnnnnnnnnnnnnnnnnnnnnnnnnnnnnnnnnnnnnnnnnnnnnnnnnnnnnnnnnnnnnnnnnnnnnnnnnnnnnnnnnnnnnnnnnnnnnnnnnnnnnnnnnnnnnnnnnnnnnnnnnnnnnnnnnnnnnnnnnnnnnnnnnnnnnnnnnnnnnnnnnnnnnnnnnnnnnnnnnnnnnnnnnnnnnnnnnnnnnnnnnnnnnnnnnnnnnnnnnnnnnnnnnnnnnnnnnnnnnnnnnnnnnnnnnnnnnnnnnnnnnnnnnnnnnnnnnnnnnnnnnnnnnnnnnnnnnnnnnnnnnnnnnnnnnnnnnnnnnnnnnnnnnnnnnnnnnnnnnnnnnnnnnnnnnnnnnnnnnnnnnnnnnnnnnnnnnnnnnnnnnnnnnnnnnnnnnnnnnnnnnnnnnnnnnnnnnnnnnnnnnnnnnnnnnnnnnnnnnnnnnnnnnnnnnnnnnnnnnnnnnnnnnnnnnnnnnnnnnnnnnnnnnnnnnnnnnnnnnnnnnnnnnnnnnnnnnnnnnnnnnnnnnnnnnnnnnnnnnnnnnnnnnnnnnnnnnnnnnnnnnnnnnnnnnnnnnnnnnnnnnnnnnnnnnnnnnnnnnnnnnnnnnnnnnnnnnnnnnnnnnnnnnnnnnnnnnnnnnnnnnnnnnnnnnnnnnnnnnnnnnnnnnnnnnnnnnnnnnnnnnnnnnnnnnnnnnnnnnnnnnnnnnnnnnnnnnnnnnnnnnnnnnnnnnnnnnnnnnnnnnnnnnnnnnnnnnnnnnnnnnnnnnnnnnnnnnnnnnnnnnnnnnnnnnnnnnnnnnnnnnnnnnnnnnnnnnnnnnnnnnnnnnnnnnnnnnnnnnnnnnnnnnnnnnnnnnnnnnnnnnnnnnnnnnnnnnnnnnnnnnnnnnnnnnnnnnnnnnnnnnnnnnnnnnnnnnnnnnnnnnnnnnnnnnnnnnnnnnnnnnnnnnnnnnnnnnnnnnnnnnnnnnnnnnnnnnnnnnnnnnnnnnnnnnnnnnnnnnnnnnnnnnnnnnnnnnnnnnnnnnnnnnnnnnnnnnnnnnnnnnnnnnnnnnnnnnnnnnnnnnnnnnnnnnnnnnnnnnnnnnnnnnnnnnnnnnnnnnnnnnnnnnnnnnnnnnnnnnnnnnnnnnnnnnnnnnnnnnnnnnnnnnnnnnnnnnnnnnnnnnnnnnnnnnnnnnnnnnnnnnnnnnnnnnnnnnnnnnnnnnnnnnnnnnnnnnnnnnnnnnnnnnnnnnnnnnnnnnnnnnnnnnnnnnnnnnnnnnnnnnnnnnnnnnnnnnnnnnnnnnnnnnnnnnnnnnnnnnnnnnnnnnnnnnnnnnnnnnnnnnnnnnnnnnnnnnnnnnnnnnnnnnnnnnnnnnnnnnnnnnnnnnnnnnnnnnnnnnnnnnnnnnnnnnnnnnnnnnnnnnnnnnnnnnnnnnnnnnnnnnnnnnnnnnnnnnnnnnnnnnnnnnnnnnnnnnnnnnnnnnnnnnnnnnnnnnnnnnnnnnnnnnnnnnnnnnnnnnnnnnnnnnnnnnnnnnnnnnnnnnnnnnnnnnnnnnnnnnnnnnnnnnnnnnnnnnnnnnnnnnnnnnnnnnnnnnnnnnnnnnnnnnnnnnnnnnnnnnnnnnnnnnnnnnnnnnnnnnnnnnnnnnnnnnnnnnnnnnnnnnnnnnnnnnnnnnnnnnnnnnnnnnnnnnnnnnnnnnnnnnnnnnnnnnnnnnnnnnnnnnnnnnnnnnnnnnnnnnnnnnnnnnnnnnnnnnnnnnnnnnnnnnnnnnnnnnnnnnnnnnnnnnnnnnnnnnnnnnnnnnnnnnnnnnnnnnnnnnnnnnnnnnnnnnnnnnnnnnnnnnnnnnnnnnnnnnnnnnnnnnnnnnnnnnnnnnnnnnnnnnnnnnnnnnnnnnnnnnnnnnnnnnnnnnnnnnnnnnnnnnnnnnnnnnnnnnnnnnnnnnnnnnnnnnnnnnnnnnnnnnnnnnnnnnnnnnnnnnnnnnnnnnnnnnnnnnnnnnnnnnnnnnnnnnnnnnnnnnnnnnnnnnnnnnnnnnnnnnnnnnnnnnnnnnnnnnnnnnnnnnnnnnnnnnnnnnnnnnnnnnnnnnnnnnnnnnnnnnnnnnnnnnnnnnnnnnnnnnnnnnnnnnnnnnnnnnnnnnnnnnnnnnnnnnnnnnnnnnnnnnnnnnnnnnnnnnnnnnnnnnnnnnnnnnnnnnnnnnnnnnnnnnnnnnnnnnnnnnnnnnnnnnnnnnnnnnnnnnnnnnnnnnnnnnnnnnnnnnnnnnnnnnnnnnnnnnnnnnnnnnnnnnnnnnnnnnnnnnnnnnnnnnnnnnnnnnnnnnnnnnnnnnnnnnnnnnnnnnnnnnnnnnnnnnnnnnnnnnnnnnnnnnnnnnnnnnnnnnnnnnnnnnnnnnnnnnnnnnnnnnnnnnnnnnnnnnnnnnnnnnnnnnnnnnnnnnnnnnnnnnnnnnnnnnnnnnnnnnnnnnnnnnnnnnnnnnnnnnnnnnnnnnnnnnnnnnnnnnnnnnnnnnnnnnnnnnnnnnnnnnnnnnnnnnnnnnnnnnnnnnnnnnnnnnnnnnnnnnnnnnnnnnnnnnnnnnnnnnnnnnnnnnnnnnnnnnnnnnnnnnnnnnnnnnnnnnnnnnnnnnnnnnnnnnnnnnnnnnnnnnnnnnnnnnnnnnnnnnnnnnnnnnnnnnnnnnnnnnnnnnnnnnnnnnnnnnnnnnnnnnnnnnnnnnnnnnnnnnnnnnnnnnnnnnnnnnnnnnnnnnnnnnnnnnnnnnnnnnnnnnnnnnnnnnnnnnnnnnnnnnnnnnnnnnnnnnnnnnnnnnnnnnnnnnnnnnnnnnnnnnnnnnnnnnnnnnnnnnnnnnnnnnnnnnnnnnnnnnnnnnnnnnnnnnnnnnnnnnnnnnnnnnnnnnnnnnnnnnnnnnnnnnnnnnnnnnnnnnnnnnnnnnnnnnnnnnnnnnnnnnnnnnnnnnnnnnnnnnnnnnnnnnnnnnnnnnnnnnnnnnnnnnnnnnnnnnnnnnnnnnnnnnnnnnnnnnnnnnnnnnnnnnnnnnnnnnnnnnnnnnnnnnnnnnnnnnnnnnnnnnnnnnnnnnnnnnnnnnnnnnnnnnnnnnnnnnnnnnnnnnnnnnnnnnnnnnnnnnnnnnnnnnnnnnnnnnnnnnnnnnnnnnnnnnnnnnnnnnnnnnnnnnnnnnnnnnnnnnnnnnnnnnnnnnnnnnnnnnnnnnnnnnnnnnnnnnnnnnnnnnnnnnnnnnnnnnnnnnnnnnnnnnnnnnnnnnnnnnnnnnnnnnnnnnnnnnnnnnnnnnnnnnnnnnnnnnnnnnnnnnnnnnnnnnnnnnnnnnnnnnnnnnnnnnnnnnnnnnnnnnnnnnnnnnnnnnnnnnnnnnnnnnnnnnnnnnnnnnnnnnnnnnnnnnnnnnnnnnnnnnnnnnnnnnnnnnnnnnnnnnnnnnnnnnnnnnnnnnnnnnnnnnnnnnnnnnnnnnnnnnnnnnnnnnnnnnnnnnnnnnnnnnnnnnnnnnnnnnnnnnnnnnnnnnnnnnnnnnnnnnnnnnnnnnnnnnnnnnnnnnnnnnnnnnnnnnnnnnnnnnnnnnnnnnnnnnnnnnnnnnnnnnnnnnnnnnnnnnnnnnnnnnnnnnnnnnnnnnnnnnnnnnnnnnnnnnnnnnnnnnnnnnnnnnnnnnnnnnnnnnnnnnnnnnnnnnnnnnnnnnnnnnnnnnnnnnnnnnnnnnnnnnnnnnnnnnnnnnnnnnnnnnnnnnnnnnnnnnnnnnnnnnnnnnnnnnnnnnnnnnnnnnnnnnnnnnnnnnnnnnnnnnnnnnnnnnnnnnnnnnnnnnnnnnnnnnnnnnnnnnnnnnnnnnnnnnnnnnnnnnnnnnnnnnnnnnnnnnnnnnnnnnnnnnnnnnnnnnnnnnnnnnnnnnnnnnnnnnnnnnnnnnnnnnnnnnnnnnnnnnnnnnnnnnnnnnnnnnnnnnnnnnnnnnnnnnnnnnnnnnnnnnnnnnnnnnnnnnnnnnnnnnnnnnnnnnnnnnnnnnnnnnnnnnnnnnnnnnnnnnnnnnnnnnnnnnnnnnnnnnnnnnnnnnnnnnnnnnnnnnnnnnnnnnnnnnnnnnnnnnnnnnnnnnnnnnnnnnnnnnnnnnnnnnnnnnnnnnnnnnnnnnnnnnnnnnnnnnnnnnnnnnnnnnnnnnnnnnnnnnnnnnnnnnnnnnnnnnnnnnnnnnnnnnnnnnnnnnnnnnnnnnnnnnnnnnnnnnnnnnnnnnnnnnnnnnnnnnnnnnnnnnnnnnnnnnnnnnnnnnnnnnnnnnnnnnnnnnnnnnnnnnnnnnnnnnnnnnnnnnnnnnnnnnnnnnnnnnnnnnnnnnnnnnnnnnnnnnnnnnnnnnnnnnnnnnnnnnnnnnnnnnnnnnnnnnnnnnnnnnnnnnnnnnnnnnnnnnnnnnnnnnnnnnnnnnnnnnnnnnnnnnnnnnnnnnnnnnnnnnnnnnnnnnnnnnnnnnnnnnnnnnnnnnnnnnnnnnnnnnnnnnnnnnnnnnnnnnnnnnnnnnnnnnnnnnnnnnnnnnnnnnnnnnnnnnnnnnnnnnnnnnnnnnnnnnnnnnnnnnnnnnnnnnnnnnnnnnnnnnnnnnnnnnnnnnnnnnnnnnnnnnnnnnnnnnnnnnnnnnnnnnnnnnnnnnnnnnnnnnnnnnnnnnnnnnnnnnnnnnnnnnnnnnnnnnnnnnnnnnnnnnnnnnnnnnnnnnnnnnnnnnnnnnnnnnnnnnnnnnnnnnnnnnnnnnnnnnnnnnnnnnnnnnnnnnnnnnnnnnnnnnnnnnnnnnnnnnnnnnnnnnnnnnnnnnnnnnnnnnnnnnnnnnnnnnnnnnnnnnnnnnnnnnnnnnnnnnnnnnnnnnnnnnnnnnnnnnnnnnnnnnnnnnnnnnnnnnnnnnnnnnnnnnnnnnnnnnnnnnnnnnnnnnnnnnnnnnnnnnnnnnnnnnnnnnnnnnnnnnnnnnnnnnnnnnnnnnnnnnnnnnnnnnnnnnnnnnnnnnnnnnnnnnnnnnnnnnnnnnnnnnnnnnnnnnnnnnnnnnnnnnnnnnnnnnnnnnnnnnnnnnnnnnnnnnnnnnnnnnnnnnnnnnnnnnnnnnnnnnnnnnnnnnnnnnnnnnnnnnnnnnnnnnnnnnnnnnnnnnnnnnnnnnnnnnnnnnnnnnnnnnnnnnnnnnnnnnnnnnnnnnnnnnnnnnnnnnnnnnnnnnnnnnnnnnnnnnnnnnnnnnnnnnnnnnnnnnnnnnnnnnnnnnnnnnnnnnnnnnnnnnnnnnnnnnnnnnnnnnnnnnnnnnnnnnnnnnnnnnnnnnnnnnnnnnnnnnnnnnnnnnnnnnnnnnnnnnnnnnnnnnnnnnnnnnnnnnnnnnnnnnnnnnnnnnnnnnnnnnnnnnnnnnnnnnnnnnnnnnnnnnnnnnnnnnnnnnnnnnnnnnnnnnnnnnnnnnnnnnnnnnnnnnnnnnnnnnnnnnnnnnnnnnnnnnnnnnnnnnnnnnnnnnnnnnnnnnnnnnnnnnnnnnnnnnnnnnnnnnnnnnnnnnnnnnnnnnnnnnnnnnnnnnnnnnnnnnnnnnnnnnnnnnnnnnnnnnnnnnnnnnnnnnnnnnnnnnnnnnnnnnnnnnnnnnnnnnnnnnnnnnnnnnnnnnnnnnnnnnnnnnnnnnnnnnnnnnnnnnnnnnnnnnnnnnnnnnnnnnnnnnnnnnnnnnnnnnnnnnnnnnnnnnnnnnnnnnnnnnnnnnnnnnnnnnnnnnnnnnnnnnnnnnnnnnnnnnnnnnnnnnnnnnnnnnnnnnnnnnnnnnnnnnnnnnnnnnnnnnnnnnnnnnnnnnnnnnnnnnnnnnnnnnnnnnnnnnnnnnnnnnnnnnnnnnnnnnnnnnnnnnnnnnnnnnnnnnnnnnnnnnnnnnnnnnnnnnnnnnnnnnnnnnnnnnnnnnnnnnnnnnnnnnnnnnnnnnnnnnnnnnnnnnnnnnnnnnnnnnnnnnnnnnnnnnnnnnnnnnnnnnnnnnnnnnnnnnnnnnnnnnnnnnnnnnnnnnnnnnnnnnnnnnnnnnnnnnnnnnnnnnnnnnnnnnnnnnnnnnnnnnnnnnnnnnnnnnnnnnnnnnnnnnnnnnnnnnnnnnnnnnnnnnnnnnnnnnnnnnnnnnnnnnnnnnnnnnnnnnnnnnnnnnnnnnnnnnnnnnnnnnnnnnnnnnnnnnnnnnnnnnnnnnnnnnnnnnnnnnnnnnnnnnnnnnnnnnnnnnnnnnnnnnnnnnnnnnnnnnnnnnnnnnnnnnnnnnnnnnnnnnnnnnnnnnnnnnnnnnnnnnnnnnnnnnnnnnnnnnnnnnnnnnnnnnnnnnnnnnnnnnnnnnnnnnnnnnnnnnnnnnnnnnnnnnnnnnnnnnnnnnnnnnnnnnnnnnnnnnnnnnnnnnnnnnnnnnnnnnnnnnnnnnnnnnnnnnnnnnnnnnnnnnnnnnnnnnnnnnnnnnnnnnnnnnnnnnnnnnnnnnnnnnnnnnnnnnnnnnnnnnnnnnnnnnnnnnnnnnnnnnnnnnnnnnnnnnnnnnnnnnnnnnnnnnnnnnnnnnnnnnnnnnnnnnnnnnnnnnnnnnnnnnnnnnnnnnnnnnnnnnnnnnnnnnnnnnnnnnnnnnnnnnnnnnnnnnnnnnnnnnnnnnnnnnnnnnnnnnnnnnnnnnnnnnnnnnnnnnnnnnnnnnnnnnnnnnnnnnnnnnnnnnnnnnnnnnnnnnnnnnnnnnnnnnnnnnnnnnnnnnnnnnnnnnnnnnnnnnnnnnnnnnnnnnnnnnnnnnnnnnnnnnnnnnnnnnnnnnnnnnnnnnnnnnnnnnnnnnnnnnnnnnnnnnnnnnnnnnnnnnnnnnnnnnnnnnnnnnnnnnnnnnnnnnnnnnnnnnnnnnnnnnnnnnnnnnnnnnnnnnnnnnnnnnnnnnnnnnnnnnnnnnnnnnnnnnnnnnnnnnnnnnnnnnnnnnnnnnnnnnnnnnnnnnnnnnnnnnnnnnnnnnnnnnnnnnnnnnnnnnnnnnnnnnnnnnnnnnnnnnnnnnnnnnnnnnnnnnnnnnnnnnnnnnnnnnnnnnnnnnnnnnnnnnnnnnnnnnnnnnnnnnnnnnnnnnnnnnnnnnnnnnnnnnnnnnnnnnnnnnnnnnnnnnnnnnnnnnnnnnnnnnnnnnnnnnnnnnnnnnnnnnnnnnnnnnnnnnnnnnnnnnnnnnnnnnnnnnnnnnnnnnnnnnnnnnnnnnnnnnnnnnnnnnnnnnnnnnnnnnnnnnnnnnnnnnnnnnnnnnnnnnnnnnnnnnnnnnnnnnnnnnnnnnnnnnnnnnnnnnnnnnnnnnnnnnnnnnnnnnnnnnnnnnnnnnnnnnnnnnnnnnnnnnnnnnnnnnnnnnnnnnnnnnnnnnnnnnnnnnnnnnnnnnnnnnnnnnnnnnnnnnnnnnnnnnnnnnnnnnnnnnnnnnnnnnnnnnnnnnnnnnnnnnnnnnnnnnnnnnnnnnnnnnnnnnnnnnnnnnnnnnnnnnnnnnnnnnnnnnnnnnnnnnnnnnnnnnnnnnnnnnnnnnnnnnnnnnnnnnnnnnnnnnnnnnnnnnnnnnnnnnnnnnnnnnnnnnnnnnnnnnnnnnnnnnnnnnnnnnnnnnnnnnnnnnnnnnnnnnnnnnnnnnnnnnnnnnnnnnnnnnnnnnnnnnnnnnnnnnnnnnnnnnnnnnnnnnnnnnnnnnnnnnnnnnnnnnnnnnnnnnnnnnnnnnnnnnnnnnnnnnnnnnnnnnnnnnnnnnnnnnnnnnnnnnnnnnnnnnnnnnnnnnnnnnnnnnnnnnnnnnnnnnnnnnnnnnnnnnnnnnnnnnnnnnnnnnnnnnnnnnnnnnnnnnnnnnnnnnnnnnnnnnnnnnnnnnnnnnnnnnnnnnnnnnnnnnnnnnnnnnnnnnnnnnnnnnnnnnnnnnnnnnnnnnnnnnnnnnnnnnnnnnnnnnnnnnnnnnnnnnnnnnnnnnnnnnnnnnnnnnnnnnnnnnnnnnnnnnnnnnnnnnnnnnnnnnnnnnnnnnnnnnnnnnnnnnnnnnnnnnnnnnnnnnnnnnnnnnnnnnnnnnnnnnnnnnnnnnnnnnnnnnnnnnnnnnnnnnnnnnnnnnnnnnnnnnnnnnnnnnnnnnnnnnnnnnnnnnnnnnnnnnnnnnnnnnnnnnnnnnnnnnnnnnnnnnnnnnnnnnnnnnnnnnnnnnnnnnnnnnnnnnnnnnnnnnnnnnnnnnnnnnnnnnnnnnnnnnnnnnnnnnnnnnnnnnnnnnnnnnnnnnnnnnnnnnnnnnnnnnnnnnnnnnnnnnnnnnnnnnnnnnnnnnnnnnnnnnnnnnnnnnnnnnnnnnnnnnnnnnnnnnnnnnnnnnnnnnnnnnnnnnnnnnnnnnnnnnnnnnnnnnnnnnnnnnnnnnnnnnnnnnnnnnnnnnnnnnnnnnnnnnnnnnnnnnnnnnnnnnnnnnnnnnnnnnnnnnnnnnnnnnnnnnnnnnnnnnnnnnnnnnnnnnnnnnnnnnnnnnnnnnnnnnnnnnnnnnnnnnnnnnnnnnnnnnnnnnnnnnnnnnnnnnnnnnnnnnnnnnnnnnnnnnnnnnnnnnnnnnnnnnnnnnnnnnnnnnnnnnnnnnnnnnnnnnnnnnnnnnnnnnnnnnnnnnnnnnnnnnnnnnnnnnnnnnnnnnnnnnnnnnnnnnnnnnnnnnnnnnnnnnnnnnnnnnnnnnnnnnnnnnnnnnnnnnnnnnnnnnnnnnnnnnnnnnnnnnnnnnnnnnnnnnnnnnnnnnnnnnnnnnnnnnnnnnnnnnnnnnnnnnnnnnnnnnnnnnnnnnnnnnnnnnnnnnnnnnnnnnnnnnnnnnnnnnnnnnnnnnnnnnnnnnnnnnnnnnnnnnnnnnnnnnnnnnnnnnnnnnnnnnnnnnnnnnnnnnnnnnnnnnnnnnnnnnnnnnnnnnnnnnnnnnnnnnnnnnnnnnnnnnnnnnnnnnnnnnnnnnnnnnnnnnnnnnnnnnnnnnnnnnnnnnnnnnnnnnnnnnnnnnnnnnnnnnnnnnnnnnnnnnnnnnnnnnnnnnnnnnnnnnnnnnnnnnnnnnnnnnnnnnnnnnnnnnnnnnnnnnnnnnnnnnnnnnnnnnnnnnnnnnnnnnnnnnnnnnnnnnnnnnnnnnnnnnnnnnnnnnnnnnnnnnnnnnnnnnnnnnnnnnnnnnnnnnnnnnnnnnnnnnnnnnnnnnnnnnnnnnnnnnnnnnnnnnnnnnnnnnnnnnnnnnnnnnnnnnnnnnnnnnnnnnnnnnnnnnnnnnnnnnnnnnnnnnnnnnnnnnnnnnnnnnnnnnnnnnnnnnnnnnnnnnnnnnnnnnnnnnnnnnnnnnnnnnnnnnnnnnnnnnnnnnnnnnnnnnnnnnnnnnnnnnnnnnnnnnnnnnnnnnnnnnnnnnnnnnnnnnnnnnnnnnnnnnnnnnnnnnnnnnnnnnnnnnnnnnnnnnnnnnnnnnnnnnnnnnnnnnnnnnnnnnnnnnnnnnnnnnnnnnnnnnnnnnnnnnnnnnnnnnnnnnnnnnnnnnnnnnnnnnnnnnnnnnnnnnnnnnnnnnnnnnnnnnnnnnnnnnnnnnnnnnnnnnnnnnnnnnnnnnnnnnnnnnnnnnnnnnnnnnnnnnnnnnnnnnnnnnnnnnnnnnnnnnnnnnnnnnnnnnnnnnnnnnnnnnnnnnnnnnnnnnnnnnnnnnnnnnnnnnnnnnnnnnnnnnnnnnnnnnnnnnnnnnnnnnnnnnnnnnnnnnnnnnnnnnnnnnnnnnnnnnnnnnnnnnnnnnnnnnnnnnnnnnnnnnnnnnnnnnnnnnnnnnnnnnnnnnnnnnnnnnnnnnnnnnnnnnnnnnnnnnnnnnnnnnnnnnnnnnnnnnnnnnnnnnnnnnnnnnnnnnnnnnnnnnnnnnnnnnnnnnnnnnnnnnnnnnnnnnnnnnnnnnnnnnnnnnnnnnnnnnnnnnnnnnnnnnnnnnnnnnnnnnnnnnnnnnnnnnnnnnnnnnnnnnnnnnnnnnnnnnnnnnnnnnnnnnnnnnnnnnnnnnnnnnnnnnnnnnnnnnnnnnnnnnnnnnnnnnnnnnnnnnnnnnnnnnnnnnnnnnnnnnnnnnnnnnnnnnnnnnnnnnnnnnnnnnnnnnnnnnnnnnnnnnnnnnnnnnnnnnnnnnnnnnnnnnnnnnnnnnnnnnnnnnnnnnnnnnnnnnnnnnnnnnnnnnnnnnnnnnnnnnnnnnnnnnnnnnnnnnnnnnnnnnnnnnnnnnnnnnnnnnnnnnnnnnnnnnnnnnnnnnnnnnnnnnnnnnnnnnnnnnnnnnnnnnnnnnnnnnnnnnnnnnnnnnnnnnnnnnnnnnnnnnnnnnnnnnnnnnnnnnnnnnnnnnnnnnnnnnnnnnnnnnnnnnnnnnnnnnnnnnnnnnnnnnnnnnnnnnnnnnnnnnnnnnnnnnnnnnnnnnnnnnnnnnnnnnnnnnnnnnnnnnnnnnnnnnnnnnnnnnnnnnnnnnnnnnnnnnnnnnnnnnnnnnnnnnnnnnnnnnnnnnnnnnnnnnnnnnnnnnnnnnnnnnnnnnnnnnnnnnnnnnnnnnnnnnnnnnnnnnnnnnnnnnnnnnnnnnnnnnnnnnnnnnnnnnnnnnnnnnnnnnnnnnnnnnnnnnnnnnnnnnnnnnnnnnnnnnnnnnnnnnnnnnnnnnnnnnnnnnnnnnnnnnnnnnnnnnnnnnnnnnnnnnnnnnnnnnnnnnnnnnnnnnnnnnnnnnnnnnnnnnnnnnnnnnnnnnnnnnnnnnnnnnnnnnnnnnnnnnnnnnnnnnnnnnnnnnnnnnnnnnnnnnnnnnnnnnnnnnnnnnnnnnnnnnnnnnnnnnnnnnnnnnnnnnnnnnnnnnnnnnnnnnnnnnnnnnnnnnnnnnnnnnnnnnnnnnnnnnnnnnnnnnnnnnnnnnnnnnnnnnnnnnnnnnnnnnnnnnnnnnnnnnnnnnnnnnnnnnnnnnnnnnnnnnnnnnnnnnnnnnnnnnnnnnnnnnnnnnnnnnnnnnnnnnnnnnnnnnnnnnnnnnnnnnnnnnnnnnnnnnnnnnnnnnnnnnnnnnnnnnnnnnnnnnnnnnnnnnnnnnnnnnnnnnnnnnnnnnnnnnnnnnnnnnnnnnnnnnnnnnnnnnnnnnnnnnnnnnnnnnnnnnnnnnnnnnnnnnnnnnnnnnnnnnnnnnnnnnnnnnnnnnnnnnnnnnnnnnnnnnnnnnnnnnnnnnnnnnnnnnnnnnnnnnnnnnnnnnnnnnnnnnnnnnnnnnnnnnnnnnnnnnnnnnnnnnnnnnnnnnnnnnnnnnnnnnnnnnnnnnnnnnnnnnnnnnnnnnnnnnnnnnnnnnnnnnnnnnnnnnnnnnnnnnnnnnnnnnnnnnnnnnnnnnnnnnnnnnnnnnnnnnnnnnnnnnnnnnnnnnnnnnnnnnnnnnnnnnnnnnnnnnnnnnnnnnnnnnnnnnnnnnnnnnnnnnnnnnnnnnnnnnnnnnnnnnnnnnnnnnnnnnnnnnnnnnnnnnnnnnnnnnnnnnnnnnnnnnnnnnnnnnnnnnnnnnnnnnnnnnnnnnnnnnnnnnnnnnnnnnnnnnnnnnnnnnnnnnnnnnnnnnnnnnnnnnnnnnnnnnnnnnnnnnnnnnnnnnnnnnnnnnnnnnnnnnnnnnnnnnnnnnnnnnnnnnnnnnnnnnnnnnnnnnnnnnnnnnnnnnnnnnnnnnnnnnnnnnnnnnnnnnnnnnnnnnnnnnnnnnnnnnnnnnnnnnnnnnnnnnnnnnnnnnnnnnnnnnnnnnnnnnnnnnnnnnnnnnnnnnnnnnnnnnnnnnnnnnnnnnnnnnnnnnnnnnnnnnnnnnnnnnnnnnnnnnnnnnnnnnnnnnnnnnnnnnnnnnnnnnnnnnnnnnnnnnnnnnnnnnnnnnnnnnnnnnnnnnnnnnnnnnnnnnnnnnnnnnnnnnnnnnnnnnnnnnnnnnnnnnnnnnnnnnnnnnnnnnnnnnnnnnnnnnnnnnnnnnnnnnnnnnnnnnnnnnnnnnnnnnnnnnnnnnnnnnnnnnnnnnnnnnnnnnnnnnnnnnnnnnnnnnnnnnnnnnnnnnnnnnnnnnnnnnnnnnnnnnnnnnnnnnnnnnnnnnnnnnnnnnnnnnnnnnnnnnnnnnnnnnnnnnnnnnnnnnnnnnnnnnnnnnnnnnnnnnnnnnnnnnnnnnnnnnnnnnnnnnnnnnnnnnnnnnnnnnnnnnnnnnnnnnnnnnnnnnnnnnnnnnnnnnnnnnnnnnnnnnnnnnnnnnnnnnnnnnnnnnnnnnnnnnnnnnnnnnnnnnnnnnnnnnnnnnnnnnnnnnnnnnnnnnnnnnnnnnnnnnnnnnnnnnnnnnnnnnnnnnnnnnnnnnnnnnnnnnnnnnnnnnnnnnnnnnnnnnnnnnnnnnnnnnnnnnnnnnnnnnnnnnnnnnnnnnnnnnnnnnnnnnnnnnnnnnnnnnnnnnnnnnnnnnnnnnnnnnnnnnnnnnnnnnnnnnnnnnnnnnnnnnnnnnnnnnnnnnnnnnnnnnnnnnnnnnnnnnnnnnnnnnnnnnnnnnnnnnnnnnnnnnnnnnnnnnnnnnnnnnnnnnnnnnnnnnnnnnnnnnnnnnnnnnnnnnnnnnnnnnnnnnnnnnnnnnnnnnnnnnnnnnnnnnnnnnnnnnnnnnnnnnnnnnnnnnnnnnnnnnnnnnnnnnnnnnnnnnnnnnnnnnnnnnnnnnnnnnnnnnnnnnnnnnnnnnnnnnnnnnnnnnnnnnnnnnnnnnnnnnnnnnnnnnnnnnnnnnnnnnnnnnnnnnnnnnnnnnnnnnnnnnnnnnnnnnnnnnnnnnnnnnnnnnnnnnnnnnnnnnnnnnnnnnnnnnnnnnnnnnnnnnnnnnnnnnnnnnnnnnnnnnnnnnnnnnnnnnnnnnnnnnnnnnnnnnnnnnnnnnnnnnnnnnnnnnnnnnnnnnnnnnnnnnnnnnnnnnnnnnnnnnnnnnnnnnnnnnnnnnnnnnnnnnnnnnnnnnnnnnnnnnnnnnnnnnnnnnnnnnnnnnnnnnnnnnnnnnnnnnnnnnnnnnnnnnnnnnnnnnnnnnnnnnnnnnnnnnnnnnnnnnnnnnnnnnnnnnnnnnnnnnnnnnnnnnnnnnnnnnnnnnnnnnnnnnnnnnnnnnnnnnnnnnnnnnnnnnnnnnnnnnnnnnnnnnnnnnnnnnnnnnnnnnnnnnnnnnnnnnnnnnnnnnnnnnnnnnnnnnnnnnnnnnnnnnnnnnnnnnnnnnnnnnnnnnnnnnnnnnnnnnnnnnnnnnnnnnnnnnnnnnnnnnnnnnnnnnnnnnnnnnnnnnnnnnnnnnnnnnnnnnnnnnnnnnnnnnnnnnnnnnnnnnnnnnnnnnnnnnnnnnnnnnnnnnnnnnnnnnnnnnnnnnnnnnnnnnnnnnnnnnnnnnnnnnnnnnnnnnnnnnnnnnnnnnnnnnnnnnnnnnnnnnnnnnnnnnnnnnnnnnnnnnnnnnnnnnnnnnnnnnnnnnnnnnnnnnnnnnnnnnnnnnnnnnnnnnnnnnnnnnnnnnnnnnnnnnnnnnnnnnnnnnnnnnnnnnnnnnnnnnnnnnnnnnnnnnnnnnnnnnnnnnnnnnnnnnnnnnnnnnnnnnnnnnnnnnnnnnnnnnnnnnnnnnnnnnnnnnnnnnnnnnnnnnnnnnnnnnnnnnnnnnnnnnnnnnnnnnnnnnnnnnnnnnnnnnnnnnnnnnnnnnnnnnnnnnnnnnnnnnnnnnnnnnnnnnnnnnnnnnnnnnnnnnnnnnnnnnnnnnnnnnnnnnnnnnnnnnnnnnnnnnnnnnnnnnnnnnnnnnnnnnnnnnnnnnnnnnnnnnnnnnnnnnnnnnnnnnnnnnnnnnnnnnnnnnnnnnnnnnnnnnnnnnnnnnnnnnnnnnnnnnnnnnnnnnnnnnnnnnnnnnnnnnnnnnnnnnnnnnnnnnnnnnnnnnnnnnnnnnnnnnnnnnnnnnnnnnnnnnnnnnnnnnnnnnnnnnnnnnnnnnnnnnnnnnnnnnnnnnnnnnnnnnnnnnnnnnnnnnnnnnnnnnnnnnnnnnnnnnnnnnnnnnnnnnnnnnnnnnnnnnnnnnnnnnnnnnnnnnnnnnnnnnnnnnnnnnnnnnnnnnnnnnnnnnnnnnnnnnnnnnnnnnnnnnnnnnnnnnnnnnnnnnnnnnnnnnnnnnnnnnnnnnnnnnnnnnnnnnnnnnnnnnnnnnnnnnnnnnnnnnnnnnnnnnnnnnnnnnnnnnnnnnnnnnnnnnnnnnnnnnnnnnnnnnnnnnnnnnnnnnnnnnnnnnnnnnnnnnnnnnnnnnnnnnnnnnnnnnnnnnnnnnnnnnnnnnnnnnnnnnnnnnnnnnnnnnnnnnnnnnnnnnnnnnnnnnnnnnnnnnnnnnnnnnnnnnnnnnnnnnnnnnnnnnnnnnnnnnnnnnnnnnnnnnnnnnnnnnnnnnnnnnnnnnnnnnnnnnnnnnnnnnnnnnnnnnnnnnnnnnnnnnnnnnnnnnnnnnnnnnnnnnnnnnnnnnnnnnnnnnnnnnnnnnnnnnnnnnnnnnnnnnnnnnnnnnnnnnnnnnnnnnnnnnnnnnnnnnnnnnnnnnnnnnnnnnnnnnnnnnnnnnnnnnnnnnnnnnnnnnnnnnnnnnnnnnnnnnnnnnnnnnnnnnnnnnnnnnnnnnnnnnnnnnnnnnnnnnnnnnnnnnnnnnnnnnnnnnnnnnnnnnnnnnnnnnnnnnnnnnnnnnnnnnnnnnnnnnnnnnnnnnnnnnnnnnnnnnnnnnnnnnnnnnnnnnnnnnnnnnnnnnnnnnnnnnnnnnnnnnnnnnnnnnnnnnnnnnnnnnnnnnnnnnnnnnnnnnnnnnnnnnnnnnnnnnnnnnnnnnnnnnnnnnnnnnnnnnnnnnnnnnnnnnnnnnnnnnnnnnnnnnnnnnnnnnnnnnnnnnnnnnnnnnnnnnnnnnnnnnnnnnnnnnnnnnnnnnnnnnnnnnnnnnnnnnnnnnnnnnnnnnnnnnnnnnnnnnnnnnnnnnnnnnnnnnnnnnnnnnnnnnnnnnnnnnnnnnnnnnnnnnnnnnnnnnnnnnnnnnnnnnnnnnnnnnnnnnnnnnnnnnnnnnnnnnnnnnnnnnnnnnnnnnnnnnnnnnnnnnnnnnnnnnnnnnnnnnnnnnnnnnnnnnnnnnnnnnnnnnnnnnnnnnnnnnnnnnnnnnnnnnnnnnnnnnnnnnnnnnnnnnnnnnnnnnnnnnnnnnnnnnnnnnnnnnnnnnnnnnnnnnnnnnnnnnnnnnnnnnnnnnnnnnnnnnnnnnnnnnnnnnnnnnnnnnnnnnnnnnnnnnnnnnnnnnnnnnnnnnnnnnnnnnnnnnnnnnnnnnnnnnnnnnnnnnnnnnnnnnnnnnnnnnnnnnnnnnnnnnnnnnnnnnnnnnnnnnnnnnnnnnnnnnnnnnnnnnnnnnnnnnnnnnnnnnnnnnnnnnnnnnnnnnnnnnnnnnnnnnnnnnnnnnnnnnnnnnnnnnnnnnnnnnnnnnnnnnnnnnnnnnnnnnnnnnnnnnnnnnnnnnnnnnnnnnnnnnnnnnnnnnnnnnnnnnnnnnnnnnnnnnnnnnnnnnnnnnnnnnnnnnnnnnnnnnnnnnnnnnnnnnnnnnnnnnnnnnnnnnnnnnnnnnnnnnnnnnnnnnnnnnnnnnnnnnnnnnnnnnnnnnnnnnnnnnnnnnnnnnnnnnnnnnnnnnnnnnnnnnnnnnnnnnnnnnnnnnnnnnnnnnnnnnnnnnnnnnnnnnnnnnnnnnnnnnnnnnnnnnnnnnnnnnnnnnnnnnnnnnnnnnnnnnnnnnnnnnnnnnnnnnnnnnnnnnnnnnnnnnnnnnnnnnnnnnnnnnnnnnnnnnnnnnnnnnnnnnnnnnnnnnnnnnnnnnnnnnnnnnnnnnnnnnnnnnnnnnnnnnnnnnnnnnnnnnnnnnnnnnnnnnnnnnnnnnnnnnnnnnnnnnnnnnnnnnnnnnnnnnnnnnnnnnnnnnnnnnnnnnnnnnnnnnnnnnnnnnnnnnnnnnnnnnnnnnnnnnnnnnnnnnnnnnnnnnnnnnnnnnnnnnnnnnnnnnnnnnnnnnnnnnnnnnnnnnnnnnnnnnnnnnnnnnnnnnnnnnnnnnnnnnnnnnnnnnnnnnnnnnnnnnnnnnnnnnnnnnnnnnnnnnnnnnnnnnnnnnnnnnnnnnnnnnnnnnnnnnnnnnnnnnnnnnnnnnnnnnnnnnnnnnnnnnnnnnnnnnnnnnnnnnnnnnnnnnnnnnnnnnnnnnnnnnnnnnnnnnnnnnnnnnnnnnnnnnnnnnnnnnnnnnnnnnnnnnnnnnnnnnnnnnnnnnnnnnnnnnnnnnnnnnnnnnnnnnnnnnnnnnnnnnnnnnnnnnnnnnnnnnnnnnnnnnnnnnnnnnnnnnnnnnnnnnnnnnnnnnnnnnnnnnnnnnnnnnnnnnnnnnnnnnnnnnnnnnnnnnnnnnnnnnnnnnnnnnnnnnnnnnnnnnnnnnnnnnnnnnnnnnnnnnnnnnnnnnnnnnnnnnnnnnnnnnnnnnnnnnnnnnnnnnnnnnnnnnnnnnnnnnnnnnnnnnnnnnnnnnnnnnnnnnnnnnnnnnnnnnnnnnnnnnnnnnnnnnnnnnnnnnnnnnnnnnnnnnnnnnnnnnnnnnnnnnnnnnnnnnnnnnnnnnnnnnnnnnnnnnnnnnnnnnnnnnnnnnnnnnnnnnnnnnnnnnnnnnnnnnnnnnnnnnnnnnnnnnnnnnnnnnnnnnnnnnnnnnnnnnnnnnnnnnnnnnnnnnnnnnnnnnnnnnnnnnnnnnnnnnnnnnnnnnnnnnnnnnnnnnnnnnnnnnnnnnnnnnnnnnnnnnnnnnnnnnnnnnnnnnnnnnnnnnnnnnnnnnnnnnnnnnnnnnnnnnnnnnnnnnnnnnnnnnnnnnnnnnnnnnnnnnnnnnnnnnnnnnnnnnnnnnnnnnnnnnnnnnnnnnnnnnnnnnnnnnnnnnnnnnnnnnnnnnnnnnnnnnnnnnnnnnnnnnnnnnnnnnnnnnnnnnnnnnnnnnnnnnnnnnnnnnnnnnnnnnnnnnnnnnnnnnnnnnnnnnnnnnnnnnnnnnnnnnnnnnnnnnnnnnnnnnnnnnnnnnnnnnnnnnnnnnnnnnnnnnnnnnnnnnnnnnnnnnnnnnnnnnnnnnnnnnnnnnnnnnnnnnnnnnnnnnnnnnnnnnnnnnnnnnnnnnnnnnnnnnnnnnnnnnnnnnnnnnnnnnnnnnnnnnnnnnnnnnnnnnnnnnnnnnnnnnnnnnnnnnnnnnnnnnnnnnnnnnnnnnnnnnnnnnnnnnnnnnnnnnnnnnnnnnnnnnnnnnnnnnnnnnnnnnnnnnnnnnnnnnnnnnnnnnnnnnnnnnnnnnnnnnnnnnnnnnnnnnnnnnnnnnnnnnnnnnnnnnnnnnnnnnnnnnnnnnnnnnnnnnnnnnnnnnnnnnnnnnnnnnnnnnnnnnnnnnnnnnnnnnnnnnnnnnnnnnnnnnnnnnnnnnnnnnnnnnnnnnnnnnnnnnnnnnnnnnnnnnnnnnnnnnnnnnnnnnnnnnnnnnnnnnnnnnnnnnnnnnnnnnnnnnnnnnnnnnnnnnnnnnnnnnnnnnnnnnnnnnnnnnnnnnnnnnnnnnnnnnnnnnnnnnnnnnnnnnnnnnnnnnnnnnnnnnnnnnnnnnnnnnnnnnnnnnnnnnnnnnnnnnnnnnnnnnnnnnnnnnnnnnnnnnnnnnnnnnnnnnnnnnnnnnnnnnnnnnnnnnnnnnnnnnnnnnnnnnnnnnnnnnnnnnnnnnnnnnnnnnnnnnnnnnnnnnnnnnnnnnnnnnnnnnnnnnnnnnnnnnnnnnnnnnnnnnnnnnnnnnnnnnnnnnnnnnnnnnnnnnnnnnnnnnnnnnnnnnnnnnnnnnnnnnnnnnnnnnnnnnnnnnnnnnnnnnnnnnnnnnnnnnnnnnnnnnnnnnnnnnnnnnnnnnnnnnnnnnnnnnnnnnnnnnnnnnnnnnnnnnnnnnnnnnnnnnnnnnnnnnnnnnnnnnnnnnnnnnnnnnncgaatgatttcggcaccctgataaaactactccgattcaactcctccaacccctgcttcgccccgaatacccacgcaaacatgattacgagcaccaacgcactcaacaccgggaacagtgtccctccccaaaaatcaagttcatccagtgtgccatacgccagtgtcgcttttaccaagagtgaaacaaccagtgtcaatccccccacgatgagtgtcgctttcttccgcgtcaatcccagttcatcttgaataaaagtcaataccggttgtatcaatgcaaccgatgaagtaaacgacgccagcgtcaacagcaaaaaccacgcaaacccgattacgcccggtatgggaagcttattgaaaatgagcggcatcgtaacgaaaccaagattgaatgcaccgctttgcgcgacatcctgcgcccctgccgcaccaagaaaaacgaatgccgccggaataataatcgaaccactcaaaatcacttcgacaaattcattcgttgccgccgatgagagcgctgaatgcgcaatatcgtcattctttttcaagtaactcgagtatgcgagtatcgcccctacacctactgacagcgtgaagaaaatctgtcccgccgccgccacccatacatctacattcaatagtgcatgaaagttcgggttccacaaaaatccaagtccattgacaatattctgttccggaaatgccgggtccggcgtccctaacatgaatacccgcactgtcaaaaatatcgcgagtatcaaaagcaacggcatacaaattttatttaaccgttcgattcccgcaacaattcctctcgacacaatccaataattcgcaataaacgttattccgaaaaacatcaacgcccacggaaatgtccccaactggcgcggtggtaacaatccttgaaattcctgtaggaaatctttcatgtctgccggattggtgatatttcccaaccatccgatgacactaaacgcggcgtatgcgaggcaccacgattcaatgatgaggtagtagaagttgatgacgagtggaacgaataatccgaaaattccagcgtactttgcccacggttttcgtgcaattacatggaacacccccggtgccgacccacgtccgtactgaccgctgaatcgccccagtgtccattcggcaaatgcaatcggtatccctaaaaaaaggaacgcgatgaagtacggcaccatgaaagcaccgccgccattttgtacgacttgagtggggaaccgcaggaaatttccgagacccgcggcgccaccggcgacggccaaaataatgccgatccggcttccccaattctcacgtgttcctgccataaagtaagtttaggtattgggtgtagtgtgaatttatcggttataagataatcaaagatacaacatactggttacaatttccgctacccgttcaatatctgattcgaaaaccccttcgtccgcgcaatggtacggaaatatcgccggttcaatcgcaatcgatggtatcgctcgtcctgtaccttcattcaatattttgccgtattcgagataatcgtttgtattgttcctatgcacaacatctggatacattttcgcgaaccattcttcaatcatagccgttttttctattaattctgttgtcggtgtcagtccattgaattcccaatgccggctatataatgcgacaccccgctcccccttgaaaaacggtgtcgtatccaccgtaatcacgactttcggcaatcgcttcgttttcactaaatttgccgccaaacgtcgcgctcccatcccgtgtgagtacccctcaccattgttcttcaacaaactcggcgcttgtttcagccccgtcccttcttccatttccgagaacaaaaagtacagcgtcggtgtttccatcttcgaacattcttgtatcaaatacaacaacgtccccactccggttgcatcatccaataatcccgtcaacttcccatcttcacgcactaccgagagttcgtctgtcctgtccatcccgaaatgattgattttatccaaatgtgccgttacggcaattgcttctccactcttcttccccggcacggtcaccatcagattattatccgccacaatctccaacttcgcacctggacacttcgccaccgcactcttcaccagtggatgcaatcgctcctcgtaactgctgaacgacgccactttcgccgcttccattacccattcaattagattcatttctattctacttctctttgatgaaaaatttctaaaactttttccgccgtaacttccgccgcatcatccttacctacatccacccactgcactccgtcagtatgcctgaaccaactcatttgccgctttgcatattgtcgcgtcacaatattgattgcgttttccgcttcttccagcgtcacttcatttcgcaagtaagatgccagttcccggtacccgtgaaatttctcccgctcaatcgcttcaccgtaccccgcatgcaccagttcctcaacttcttccacccacccctcttgcaacatggcgtgtgttcgttgtgcgatacgttcaatgacattcggccgttcccgcttcaatcccacatagacaggctcatcaccgaacctttctgaaccctgttcccaccattgcgacagcggtgtacccgatgcataaaaaacttccagtccccgttcgattcgtggatagtcatgcggttgaatttttaccgcgagcgttgggtccagtaaaagcaattcgttatgcaacgccggtacgccgaatttttttgcccgttcccttagttcactgcgatatgcttcattaatcggcgggccttgaaataacccttcgaacaacgcgcgaaaataaagtcccgatcctccgaccaaaacgatattctttccatatttcttcagttcgtttattttcgcacgtgccagctttgcatatgcccccgctgtaaacgggatgttcgcatcctgaaaatcaactaagtgatgcgcaactcgctcattttcttcctgcgtcggttgcgctgttcctatccgaaatccgcgatacacttgccgcgaatctaccgacacaatttccgcatgcaatttttccgcaacacaaattccgactgcggtctttccgctcccggtcggtcccacgatgcacagcagtcgtttcacccgcccgaccgcccaaaacgtcggtctaattcatctatcgtgagttgaattaaaaccggtcttccatgtggacacacgtaaggtaaatcgcaccgaaacaattcttccaataacgtctgcatttccgatattgccaacggcattcccgctttcactgccgctttgcatgcaaatgttgccgctaacctatccatctgttccggtcgcgcttcaaaatctcttcggtacaaatctaaaatctgttttaccatcacttcatcttgcgtaatgtgcttcaatccttgcggtgtgccgctcaaaatcaatgtcgttgcgtcttttactgcgattcgaaatcccaacttcgcaaattcctcaatcaattctcctgctaccgccacatcatccgggcttgccgtaatttctaccgggaacaacaactcctgaactttccacccatctctcgacatctctttcacagcccgttcatacaaaattcgttcgtgcgcgacgtgttgatcgacaatcaccaacccagacggtacttgtacgagtatgtatttcccttgaatctgccacagtgaacttgcttcgcctctctcaaatcccgccgccagctgttgcaacgccgtgtcgtccgccgcactcgccagttccccgccgccccccgtcgcagtatcccaatcccgttttgtttcgagtaatgaatattgcgaagccggacgttctcgataccgtaccggtacatatccctgtggttggtcgaagaaccccgaaggtcgcttcaccggcgcgttcggctcacgtacgacattcggttccgggtaattttccgaaactgtttttgttccggtgtgctcctcttcaaaccggtgggtcggttgttccaacccgccactccgcaaagcatcgcgtaccgcatccaccacaattctgcgaattaacggctcattatcgaactttacttcttctttcgaggggtgaacgttcacatcaaattgtttcggcgtcaactcgataaacagaatgtagaagggaaacatccccggttccgcaatctgtcccaatcctgccgttacggcattcgtgatgaacggtgagcgaatgagccggttattgagaaacaggtgttgatcgccccgttgcatcctgagtaaaggtgccgttccaaccattccggtcaatcgaagtccttgctcttcccaaccgatgggacgcaaatccgccgcgactttttccccgaatacctgtgtaacccgctcttccaatgtaccgggagccagcgtgtagagcacttcatcgtcgttggtaaatttccattctatttcagggcgtgacaacgcgaatcgtttgaaccggacgtgaatgtgtccgaattcggttgcattcgatttgaggaatcgtcgtcgtgcgggaacattataaaacaaatttttaatgctgaatgttgagccgactggcaccgcgatttgttcaattcgtacgacacgcccggcatcgatggcaagataccatcccgtctcttcatctgcggatcgtgacttcacttccactcgtgcgaccgatgcgatggatggcagcgcctccccccggaaaccaagtgtcaacagtgcttcaaggtcttcaaattggcggattttactcgttgcgtgtcgttcgaatgccaataaaagatcttcgcgatccatcccgagtccattgtcgacaacttgaattagattccttcctgcacctcgaatctgaatctcgattcgcgtcgattccgcatcgatagcattttcgacgagttctttcagcaccgatgccgggcgctcgaccacttcaccggcggcgatgcggttcgctacgatttccgacaatacccgaattcgcggcatacatccttccaattattcatcctaatatactacggtcatcgttaaaacagtacgtccgacattcttgtcaggcgattcgtaggacaggcactcttgcctgtccaattagatttgcgaggaatgaaacgaagtatcctgcgaagcagatacgtagtgaaatgacgtgacgatcttttgcttgtagccttttttatagtcatttttgaagcttagtacacccacatcttttaccggtaactggcgaccggcaaccatcttccccctacttcttttttgccgctaccttcagcccctcacgattgagcaatttcaataccccctgctggctcataagtgaattgagatactcatcgctcgctagtcgctttcgccgattctcacttgactcaatcatgatacggtagttatccgtcgtgacatttaatgtcgtctccggtttgatgcccagcatcaacaaaagcgacttatcgagaacgatagcataactaccacctaacttgattaatttcttccgtatcattcccatctcctttgtttttgttcttccctgaactcattgccccattctttttttatcttttccccattccctattacctgttccctatccccccatccttttccgtactctgtcccaaaaaagtttgtgaaaactttttgagagttatccacaatttaatataaaatatatatcttatatatacaatttccaattattgcgagttagtcgcaaccaatttcccttccaaacttttattattcaattctttccattattgcgactccttcgcgcaaaacaaattccccgtttttcgacttctattattttgattattcaacctttctttttttcgtcttttcctaaccgaatcccaaatcctgaatctctaatccaatatccttcctttccccgaccccagtcccctgtcccccgtcccccgtccccaaaatgcccgtggtgctgccacttttatctccccccttccccgattagattgtgttccatacgtaataccagaaactccgggatttcacttgaacacaaaccaatccgaagctatccaaaccattgccgaaccgggcgagcgcattcttgtcctcgatttcggctcgcaatatacccagcttatcgcccgccgaatccgcgaattaggcgttttttccgaaattgttcgccacaattacacccgcgaagagctgtctgcccgccaacccatcggtttggtgctctccggcggccccgcatcggtatatgacaatggtgcgccgttactggatcctagcgtcctcgattgggatatcccgattttgggaatttgttacggcttgcaggcgcttgcccatcagaccggcggtcaggtcgaacccagcgaccatcgtgaatttggtcgcgcttttgtttctgacacccacacctcacggctattgacttcgcttccagccgaatttgaagtatggatgagccatggcgaccgcatcctgcaactccccgatggctacactaccattggtagcagcggcagtaccgcccattgtatcatcgaaaatattgccaaaaaccgctttggtgtgcagttccaccctgaagtaacccacactccgcttggtagcactatcctgcacaatttcttgtatgatatctgccacgcgaaagggaattggacgactgaagcctttatcaataccgctacgcggcatttaaccgaacgaatcggcgataaaaaagttttactcggtctttccggaggtgtcgattcgtcagtcaccgccgcccttctcggtcgtgccatcggtgaccgtctccttccgatttttgtcgataacggcctcttacgcaagaatgaaggggatcaggtcgaggcggcattccgcgatttgggtctgaaaattgagcgcgtaaacgccgaacatgaatttctgagcgagttagcgggagttagcgaaccggaaaagaaacgtaaaattatcggccgtgtcttcatcgagacctttgccaatgctgctaagaagcatgaaggtatcggatggctggcacagggaaccctttaccccgatgtcatcgaaagttcccccgttcgcggcccttccgctaccatcaaatcccatcataacgttggtggtttacccgaaatactaccttttcctttgttagagcccctccgcgagcttttcaaagatgaagtccgaaaagtaggtcgtgcgcttggtttacccgcaaaccttgtcgaccgtcaccccttccccggccccggtctggccgttcgctatcttggtgctgtcgaaaaagaggggcttgacattttgcgcgagtgcgatgctatcttcatcgaagaacttcgtcgcgataaattgtaccacgacgtttcacaggcatttgtcgtactacttccaatccgaagtgtcggtgtacaaggtgattaccgcacctatgagcgggctgttgctatccggagcgtcaacaccaacgactttatgactgccgatttctcgcgtttttcttgggatttccttgcccgtgttgccaatcgcattaccaatgaaatccggcaagtcaatcgtattgtttacgatattacatctaaaccaccggcaacagtggaatgggaatagtttccttgatttatctataaaaaggtgaaaatgagaaaaggtctgagtattggcgttataaccgtgttattgctaccgatttgcattttagccgtcgctggttccccgcaaaccccagtagatactggcattgcggaaccagtctatcaattcacctacctgcaggcattgattctcggtatcgtcgaaggcctgaccgaatttcttcccgtatccagtaccggacaccttgtcctgactgccgattggatgggaatgtcaaaatctgccaaaaatgccgtcgatgattttaacgttatcattcagggtgccgctgtcctcgcaattattggtctgtatcgaaaacgaatcgctgaaatgtggaatggtgtggttcatgccgatccggctggacgtaaactcattttgaacctatttatcagtttttgtcccgcggcatttgtcggtgtattgtttcaccacgctatcaaagagaaattgttcaatccgacctctatcgctggtgcgcttatcgttggcggtatcctgatgattattttggagcgcatccaccgtaaaaaaagtggaacatccggtgttagtgttggtgaagtgacatggaagatggctttgattataggaatagcgcagattgcttcgctttggccaggaacttcccgctctatggctacaattcttggtggcatgcttgccggtttatcgctcgcggcggctgcggaatactcgttcttacttgcactccccgtaatcttagctgcgacagtatttgaattggcaaagagctacaaggaagtcttccatcatgccagtatcggcgttttcactgttggtatggttgccagcgccgtagttgccgcctttgccgtcaaaggttttgtcaaattccttcaacgcggtggtctttctccgttcggttggtatcgaatagcagcaggaatactggtactttggttcgtatcttaatgattactctatattcgtaactttactacacattttcgataatctcactgaaacaatccatgtatagatttattatcacacttctcctcctattcactacgcttttcatcgcaaatgcgcaagaatttaaattcggggatacccatccattcgatgctttaatcggaatcgacggtacaactgattccacgaaaataatttcgttaaacggtgaatggaatattttcggtggctctactccagctaccctccgcgttccgttcagttacaatggaaccgatcccgtcaaaatctcgcggatatttcgtgtaccgtctcgactggctaattatcaatttcgcttaattttcctcggcatcggacaagatgcttccgtcacattaaacggtgagttcttggcgctcggacgtggcgctgatgcgatgtttatcgacattcccccgaatcaactccgttacgataccgacaacactttaagcattgaactgcaagcagaagtgagccggtcagatgagtttcccctcccggctggtttctatacaccaaaacgttactcgggtatatttcgcgacgcgtatcttcttgccctacctttacgccgcatcgaatcttattcggtgaatactgtcgctggaaccggcggtggacgtttgcaattgacttatttaattcgcgattctaaaccattaccttcgtatgcgctacctgccggcacgcccacacaattgcaattacgctggacgctaactcctttctcttccgacgaattgattgcgtcgaatagcatcgacatcgaattaccgcaacgctctatcaaacaaggtactgcgacatatactgttccgaatgtactgtcttggagtccggtacaacccaatctttatcgtttaaatttgcggttatatgaccaagagcaacttcttcatgagattactgaatatgtcggtttccgggacattgaagttacaccttccggtttttttacacactccggtcaaccaataaaaatagtagctgccaattatgtcgaagaatttcccgagacggggtggtcagcaactccctttcaactcgaacgtgacatttttgcagcaaaatcacttggtctgaatacactacgcataatcggaaaacttccccatccttatctaattcacctggctgaccgctatggcttgtatttattggtggaaacaccggtttcgcttcctcctgcccgcatcctacgtggtgaagaatttcgccagtacatcgtctctattttacgtcaattcgcggatcattctggcaaccacccatccatactcggcgttagtcccgggtttggactcccaactgatgatttagatgaagaatacgcagatatctttcaaaaaattcgtcacgaaaccggacatttagtatttctttcaactccaaaaccgctaactacaagaatagccgatttccagatatgggagcgattacccggcctgactgcacagaatctcacgttgccggaaggtgctagtccattgttagcgggtaccataggtattttactcgacccactaacgcaaaaaggaaacgatgctgcttccgaattgcgtcaatccttgtcgttgataaaaacgcttgaccaaactgccgttcattcttgcgctggctttgtgttaggcggtttaaatgactatcaaacccagtatccgcttttaaatcgaacacctgatgaatcaccatacacattaccggttggagtgatttcttatcaacgcaatgaacgtacgacttttgtgacattgcgagattatttaaacggtataccggtcaaacccacaccggtcagtgatgcacccgcctcgagcgcggcaactttcatcgtctctggtttgcttgtgttactgcttttcgcattttccgtcggtcaaaataaagtactgcgaatgcacgtcacacggagtcttttacatccaggtggtttctttactgatgtccgtgatggtcggatattccaatttggtgaaactgtaatcattggtttgttaatttcactaataactgcaacacttggtgctgcaaccatttttgggctacggcacgattactcgttcgatgtatttcttactacacttatcggtaaccccattgttaaagtctgggctaacctgataatctggaatcctgcgatttgtattgcgtttctattagttttctttaccgtaattgcaggcatctttggaattatattatcattcgtttcgatttttacccgtcaaagaattgcacttaccaaagcaatttcatatctcacatggggtttcgctaaccacttactattactaccgcttagtttgattttggtcggacaactttctgcacattctatcagtatcggttggttggtagtggcattcttctttctgctatggggtttgtaccgtgacattaccgctatactaactgcatttagaaattcaacgcgggcggctactttcctattgattgtcgtgttggccggtagcagtataggtgtatggtactggttggtaaaggtaaaagcgattggtatggtatggatgtcgttccgtgccgccggttggtagaaaaagatgcgttccgcatttcggaaatattgtaagaaaaggaaataatatgagcactttacacaaaaaaatcttaggtgaaacacttactttcgacgatgtactccttataccagctaaatcggaagttgtgccgcgggatgtggagctttcgactcgtctaacgaaaaatattcgcctaaaccttccgattgtttccgcagcgatggacacagttactactgctccgttagctatcgctatcgcccgcgagggtggaattggtataattcataaaaatatgaccccgcaggaacaagctgttgaagttgatcgggtgaaacgctcggaatctgcgattgtcgcaaaacctatcacactttcccctgaaaagaccatcgctcaggcacttcagttaatggcggaaaccggtgtatctggcttcccggtcgtcgatcatggcaagttagtcggtatgttgactaatcgtgatttacggtttgaaacacgccttgatgaaaaagtaaagaaggtgatgacacggaaattaattactggtcgtccaggaatgtcgcttgacgacgcagtggaaatcctgcaacaacaccgtgtcgagaaattaccattagtagatgatgaaggtaaactcgttggcttaatcaccgtaaaggacatcctccgaaaacggcaattcccgatagcatgtaaagattcacatggacgtctgcgggtaggtgcggcagtcggcgtcggtgacgctactatcgaacgagcaagcctgcttattgaagcgggttgcgatgtgattattgtcgattctgcacatggacacagcatcggtgtaattaaaacggtcgaatctttacgcgaattgtttccgaaaattgatttagtcgcagggaatgttgttacaaaggaaggggtcgcggacttaatttctgcgggagtggatgcggtaaaaatcggagttggtcccggttcgatttgcaccacgcgtgtcgtcgcaggtgtcggagcagcacagattactgcagtattggaaagtgctgaagaagctgcgaaacataatattccggtaattgcggacggtggcatcaagtactccggtgatatcgcgaaagcgcttgcagcaggtgctgaaacagtcatgattggttctctgtttgccggggtggaagaatcgcccggtgagcatatcctttttgaggggcgttcgtttaaagtgtatcatggtatgggctcattggcggcaatgaagaaaggttcttcggatcgttactttcaacacggcacggaaccggagaaacttgtaccggaaggtatcgaggggcgtgttccttatcgcgggccactggctgacactgtacatcaattgatgggcggacttcgagctgcgatgggatattgcggcacacctacaatacatgacttaattacgaatgctaaatttgttcggattaccagtgccggcctgcgtgagtcacatccacacgacattatcattacgaaagaagcaccgaactactctgtaaattcgaataatgattagtggagatacagttttcaactcaattatacacataagggatgctgataaatatcggttattccgaatcttatcagagcgtagtgatagaagctagtttcgggttcaattttggccgagttgcgtaattgacttgaacggtctatattaacggctggtctcactaatgagaccttggcgcggggtggagcagtctggtagctcgttgggctcataacccaaaggtcgtaggttcaaatcctacccccgctaccataattaaagaagacataaggtatttaccttgtgtctttttttatgccctcgcctctcggttccggtcaaaagtgacgaaaatcatagggtcgatatggacagaaaagatgacagaaaaaatgtattcagaaccggtgcatcgcgctcgattttgtgacgaatgtcataacctcgcagtagacaaaaatacaacccgcgccgggactgggtttcaagatatcatcttctcagaaaaagccgccaattccacactcagtgtaaaaagagttgtgtcacctcagccagttgtcctttgattttggggatcgtacttcgcagatcaaaaaatagaggcaggttttcgtctatccagaattaatatgacgtttttacttaacaattcagcctagatttgcttgacattacattcacaagagtttatattttgtaaagcttaatattctcgaaaatcattctttccttcaagtggaagacaaattgatggttatctgcggtaaatattctgcagttgtatgtgttgtccttcttttcgtcgcactaattcctacggcgcaagctcaaactttactctccggttccttatctggaacattaacccgaatcggtaatccttatatcgttaccgacagctgttgggttgccaccgattcgcaattgacgcttcaagcaggcgtcaacattctttttcgccgaaacatgataattacaattaacggcacactccaagttctcggcacacttggtgattcagttttctttgcaccggagtcggcaaatgtgcaatggtggtgtttgaattttcattctggtactcatcttcctactatacgatatgcctcgttcatcggcgcacaatatgggatttatgcggtcaactcaccgattgatttacatcactgctttttcgacaacaattgttccttcgcaagtcatagtagttcgattacagcggattcttgttggtttatcgacaatgtaagtagttactgtgatggcagcggaacgctcacaaactgtcggattgaaagtttggatggcgttcaattctttggtacaggtacatacacgaactgtctctttgtatatgggaattcagttagtggtaaccccacggtaatgacagatgtacattttgccgctggtggtaatcttggcggcgagagtgtatcggtttctcttacccgcgtaaccggccatccttcggtacggatcgccgatgcgaatggtggacatagcagcacctttattgattgccaattgcgtcaactttggtacgagggttctggcagtacgattactgtgaatcactgtgttttggattcttggttatatgttgcagtatggccgtcaaatggcaacggtcttactgttcagattgattcgacaagggggccgacgcttgaattgattctcatcaataactcgcaggcaaccattcggaattccgttttttataaccaaactcccacatccgatgtttctccttttgcttgtcttcagtttagcaacacacaagcccttatcgaccgctgtacaattgttcagcgccagtggttttttccccgcgatacagcattgatccaaattggcgaaggaaatactcgtccggtaaccatccaaaacagcgtgctctatcacgccactcatcctattattgttcggggaaatggcgcttcaccaccgattctacgttataatgcatttcaatctccacgtccgttttacaatgttacagcagacagtacgaatcgaatcggatggctacgattacaaaacataagttctggaaacgattcactacgactctattcgatagcaattgatggtgcagatcctttattaccacatgatgccgacagcagttgcgccgactgcggtgcgataccgttcgaccatcgcgcgattcatccaattgaggcatggcaggatacaacaagaagacaatcctgggtattcacttccgatacgcttaaaaattatgtcgtgacactatgggataccttaccgagtgtttcagtacaggtacttccgacattgggtccaacaccgctcgtcaatttccggcaaccagttcggagttgggatacattgcaaatagctctgcatgcaaatggcgattcattagcaagtggaacataccgtatgattgttgcgaacggagtgacaatgccggatacggtatcgatcggttaccggttctatccgagtttaccgtcgatactgcatgatacagtactcaccagagcacacagtccttattggatttgtcgtccggtaacaattccgcgcggtgataccgttaaaatagattctggcgtcacggtgtatcatacgttaacacccgggacacaaccggtatggcaagtatacgggacgcttcaaatcaacggaacacccaatgacagtgttcgttttcaacaggtgtttccgtttgatgctcatgcttggattggaagtatggttgtcgattcagggggaagtttactcgcggattattggaatttggatacgacagaaggattttacttgacgaagagaggtaatggcagtttagttttgcgaagttcgagactaccggttctgttattactttctacgaaaggcacaaatttacttcgtagttcagagttctttagatacccttattacacttatggtggcatcgaattctttgcagattcggattcagttgcaataataagtacaaaattccattttcgttgttttttagaaatatacgatttctaccatcatgcttcttacttaattgatagttgtatgtttatgaatgctggtattgagcttgatgattcggttaaggtaacccattcggtattttacaactcttttcaaacttatgatggaagcgttaccatacaactaaaacgaaacttgctgataggtgctcaatccgtcatcacgaaaaccgtgaattctatacccagtcccctcccacctgtgacagttgtgaattctttattcttgaatactatacgacctttacgtcagtacaataatgctgtaccacaatacgatgttcgcggttgcctgttttggcagtgcgacacaaatcaattacaagatgtacgcttcgggcaactcacaagaattaatcggaatggcgattcaactgactttttcggaaacctctttcagaatcctctgttcaccgattccacaaccatcccttggcagttcgctctccattcaccgattcgaaatggtggtgtttttgatagcttgccctaccttggctccgctcctgatatcggaccgtgggaaattgatacgtctgtctcagcagtaaaagaaaccgtaacagctttaccgacaactttttcggttgggaagccctatcccaatccgaccaacgggatgttcaaggttacgattcaaagcccacgtgcaaatggtatggaattgactttttacaattgtcttggacaaacgattcttcaccagtttttgcatgttatcgccggtaaaaactcttttacaatccggtgcccagacaccctgccgaccggattatactttgtacaggttggcggggagaatgcacgatttccgattttgttgctcaaatgagcatgaggaggattcgatgtctcgtttttcaactttttccgtagttctttatttgatgctttgtgtagtatttcacagcgcttacgcccaaccaatctcatttttgcgtgcaaatgtcgacatgacagcgcgaacattagtgccagacagtatatatgtgattgtcggagatagtagaaaccccgatacaatcaaggtaactagcactttgacgattcaggcaggtgtcaagattctgtgtgatacaagcactctggttaatcaaacaaattcactaagaaagaaaaaagtgattttgatcagcgacggcggtagcattcatgctaatggaacttcatcatcgcctattctcttcaacggaattattgatagtcgccgttacgcacacatgattcaattcaatttcgatcatccgcacgcatccagctggctccagcactgctatatttatagccatgattcactaaatgtatatccaagtacgttcgattcgaacatcgtcatccgggtaaaagcgaacctagatactgcaattctgcatttgaataactgtagcatcaattatccggatgattatttgatctatccgaatttgaacaatctaccgtccgctaaaacactcattttattggattcgacaaagaatgttgtaatcgattcctgctccttttttggtaacaacggtccctacacgccaggggatcaaacagtggcgattcattcaaccacttcaagaaatgctcttatttcgaattcacagtttttgtcgtgcaatgtcatgtgttcaggtgacagatcgggtcagttcctcttgaattccataagcaaccctgaatatatcgttacttatccactcgtgcttgcgaactctcagttaatgacaattaccgaaaataatatagcaaacttcgattcattcggcatttcgatcgttcattgtgacagcattttcatgagctttgatagtattgttactgcaccatccgacatcacctcgcttgtaggagtctttattgacagctcgcaacattgttacgacagttcttcatttgttgcgtttgttcaacaagatggatggtcggttaatcgtacgaattcgagtcgattctcgaattgttatgcaacctgttgttcgcaggcagattacggcgattcgaccaatggttatgctggatttcattttcgaatggttcataatttattaatcgactcgtgtacatcaacgtgtaacgggcatgggtattcacctgaaagccataaaccatctaacggatacggttggggtatgatctttttctgcgatacagtcaacaacgcacaacacgatacactcacacccaatgataatacatttttctccgttgccgtatctcgaagttatatttacaaaaatcctaatgcgagcgccgatgtttcgatcaattgtgacagtggcgtggtactacagggtttgaaaggcggaggtatctgggtacaaaatcactcgcgtatttcaattgatacttgtcatattcgatacaatgctatcggcatcaaggtctcgacaggtgcgtcaccgctggtgcgcgattgcctaattgattcaaatttcatgttacatcgtattccgggtaacgatggcaaaactacaatccagtcttcaccaggtctctttttcgacaatcatccgtatgggtcttatctccgcaatcgaatatataataattctattggtatagttgctttaggtggtgatagttatagtaaccctgactcgctaacgaattgcaatttgccttgggtatggaattgtgtgattgatcgctccgagttatcgggagttacatcgagatctggtggaattcgtctcagcaattcaattctgtatcacaactatttgtcagcagatatgctcgccgattccgcgcatgcaactgtattaattgatacccctacagttgctaatcaatttgtaactgataactgtgtgtatgtccggaatcgaaacggtgaattcgatttgaaatgcttaggtggtgttaatcaatttcaggttcgatacacctattatcaacagaaagacaatctgcattttaatcagattccgggtggtactggtgcacgaatcagtagtcctgagtttatgaatccactctgttggaattggcatgattttgttcttaccgcaaattcacctggtatcgatcaaggcgattctttaacgtttttccatgatctatatcctgaaacgaataatcccaggaatgatcttggttgctgtggtgggccgaatgcaaaactgaattgtggcggcccttctgacatagtcggaggaagcccatttattacagttatttccgggcaaattacgcacgatacaacgattacaagagatgtacatgttaatggtgatcttttcatttataacaatgccagattgactattctttctggtgttcatgtgtttctcgatcaagggcactcggttactgtcaaaggtggaattatctgcaatggcagtacgtatggtaaaatctttttcgatgtatatcacttaaatgactggtcgggcgaatactggcaagggatcatattttctggaaatttcgatgcacaacattctatttttggacatgtagtaattcgccatgcactcacaggaatggaattcgattggttaagcggaccatacggtatttctcccaattttgtcacaattagtgatggcgaaatgggagtcgtagtatatgggagttatgtttcaatgaaatctgatactattcgaaatatgatcttccatgggtgtcagatttacaatggggctttcgacttaacgaattcatgtatcgaaaactgtggtggatacgggttatacatatatgtatgcaaccccttattgatgaacaatgtgattcgtaataatgggtctttgggttttcctggggtttactgtcttggcgcgtcccccgatattcgcaagagtggatcttctgtcaacatcttcatgaacaacgggccaacaaccggttctccttacaatcaggcagaactgctcttaaccggagaatcgtacccgctcatgaaggaaagtcatgcggatatttacgataaacgcacacctggtcagccttatgattgcaggtttgcggtattcaataattcggcaaagatatccgtgtgtaataactatttcggttccgacgttcaaacagttaccgatgagaaaaaccacaccacgtatgatacattggttaattggggtgtacccgataccttaccaaatcgaattttggatgtcaatgagttgatgaatgcattagcacttaaagactccggacgttttatcgaggcaattccaattttccaatcaataatttcagaatatgctgattctgctgatggttactttgcaatcggtcaactctgtgaatgttggaatcaaactgggttatcacaggatagtttacgacaatggttactaacggagtctattttacatagttcggcatatcgacgagttctcgaacgaaatgctagttggtgtctcgactatacacgctcgtatgatagtgctttaagggaattcgatagcgctcgcgtacaggcaccacgcttaacagattcagtagttgctgttctcaacattgaattaacgaatattttgcgaggtatgcgttctggtggcaataccacacagagtttaggtaattcaagtgaacgacttgaaacatatcgcgagcatgttcttcaattaacacagctgattaatcagcggtcgtatcagtcgatgcacaaacaagacccgacgctcccgaccgagttttcattggcaaaaccatatcccaatccattcaactcgacaacaagaattaaattcagtgttccagttaatcaccacgttgttttggaagtgtatgatcgtcttgggcgtgaggtagctacgattgcaaacaaggatttccaagcaggcaagtatcttatagactgggatggaaaaaactcaagcggacagaaagtcagttccggtgtgtactttatacacatgaatgcagggatgttttcggccacgcaaaagtcagtaatggtaaagtaagtaatcggaacaatatatttgaccgcctcacagcccgtggggcggtttctttatacattcccaataaccgtttctactacactctccatacccgctgtctctttcaacccgggtatcagtacaaaatcggcggtgaatgaggaactcaccggatcactctgaatcttttccacgaacgcccgaataaacaatcgcttctcctcgattgttcccgactcgaatacttgcttgaaattcttcgccagctcgattgcctgctcgatgacgcgtcccgcttcaatccggttactcccggcggaggcaagttctaattgcttcgactcgagtaccgccagctcccgttttaattcaagcaatcggacgtcgacgtaatcccggttagccgaggtaagattatcgatgagattatttgttgtcgtttttatctcacgaatacggttgtgaacctgatcgatttcgtcgccgagttgtggtgtcatctcaatcgcgatacgctcgaccatgctccgcagattttggatgccctccggtgtacaaaaatgtttctggagcatcgcgtcgattttctcaaccacccattgctccaatttttctttcccgattaaatgccgtttacatactttctgccccttggtcacgtatccattacaacagtaatacagagtcttgacattcgatccatcgagtcgtttgcgtcctttctgaatggtgtatccgatccaattgtgaccgcattgttcgcaatgtatcatgccggtgagtaaaaatggcgaacgtgctccgcgaccgcagttgtatgtattgccatttccattcttggaagtgtattcgcgacgtttctgggattcatcgtatcgggtccgggtgataattgccggatgcgcatcgcgtgtcacgatccaatcttcctccccattcttcaaaggagagtgtcccggaaaattacggatcggaatggcggcatgatttgagatacggtggaacttggcgaacgatgtgcggttccacaccatatcgccggtgtagatcgggtttttcagaatcaccgcgatagacgattgtccccatccgtctttaaaattcggagcacgaaaattaccaaacggtcggtcggtctcttgctggttgagacgctttgcgatacctttgaacccgataccatcgacgacataccaatcgtacatcgttttcacaagttgaatccgctcaggtgaactcaaaactaatcgagaacggtcacgcttggtaaattggagtgagtctcctttcggaaccgcacgaaccaattctccctgctcgtttaatatgctacgcgaaccatcggacataaaccgcacagtacagaggtactcgttggtgcgagaataatacgccagatcgtaaccgaatggtggaactccaccgagccaccacccaccttcggcgcgagtcaataatccgcgtatcgttactttcgacaggtctttcaactcttgccgggcttgccattgcttgaccggacgcagtaaatcgtcggtatcgtcaccgttgaatccctccgacacatatatgatctcgataccacgtgttttcagttgatgccggtagtatcccgcctcgtcattatcgactcttccaaaccgctttatatcgtacacgaggacctgcttgaacggacacgatttcagtttcgcgtccgcgatcaatttcaagaatgctgttcgtccatcggtcgatgctccgctaatcgcatcgtcggtgtagaagttcaatatctcaatcccatgattgagagcgtaaccttcgatggtgcggcgttgatctccgatggattgttcctgccgatcggtggaacgtctcaagtatcccaccgccggatgatagttgttattactcagaaccattatcgtactcctccagttgaatcgttattgagtgctggaagggtgcaatcaaggggtgtcgaagtcaaggcggggtcgggcgctccggctgccggaggattgcgtgcgcctgcattagactgtcgctgtaacgctgtagacaatgaccattttgccaacactcgaaacgcgagatgctgacgttccatttcctcttcgttcggagtgcgatacatcgcaatgagttttatctcggtctgttgtattccgtgtgcagttaatgtttttgaatttttcattacctttttccgatcaatcaatactgcactctattaaggcaaccggcgtgccagttttttttatgacagaattgatgtaatcagaaacggtaagtagcgaggaaatcaagaggaggtattactgcggaaaacaaaacgagttatccaccgcttaaaataggcggtcgcaaagccaagccctgtctgacgaccgttcaaaatgagcgctgaattttggtaaaaacgttcattttcggcggtcgttctgtaatcagtaacacttcatagcggtgaaaaaaatatccaccgcctaaaataagcggtctctaactcaatgcctgcttgacagtgcctaaaatgagcggtggataaacccctaaaaacgagcaaaataggcgctccggttcatagcgggttatgatattcctcacattaacgactcccggaaaccagcaccattagcatcttccagtacttacaacattccggacaatcttggcacgatgattgcgtttagtcgtttcggacacttgcgatgaatcaattcttacgtcgcagacaaatagggaaatcgaaatgtgctggtgcaatggagtggacgaaaagtttgaacagactaagcgactgatccaaatccgcgatatggctgcggagcagattcgtgaattggaatcaattcgtcggacccgcgacctcgtccttgcggaacggttacgactggaacgtctgcaacgcgagcatgatcgtattcaaaccgccatcacagaaattaaaatggaaagcagtaaaaaatgagtctatccaattctcacatatctgaagataccgatgaaaaggaacttgctccgtcgcggatcgggcagggtgtttcgaatgagtgagctaaaaccgaatgtgcaattgacggcaacgatttgtatcgaattgacgccggaggaagcagatgcattgctactgattctgaatgcgtaccgcgaacaactgccgttaccagtcgatgacgatttgtaccgcgaactgatccgaaaattgggaactattcatgaagcaaggcaaaatcatgcgtgaccattgtgtcgaattattgcagcattatttcttctcgcgcaccgacaaagtggcgtttcgcaatggctctggcaaaccgaatccggcgctcgccggtgagttgctccccgcgcttctggcggcacatgttcgcggtaaggaacttccgaaagtaactatcgaatcgatccacagccgggggacaacgaaagttactggacactttcgcattggttcctacacaccaaatgccgaaggattaacgaaatggctttgcatcgatttcgatggcggaccggaacatcccaatggactggtcgatcccaaacaagcagtattattgtcacagcgatgcgcaaacgattttgggattccttcttacatcgaacgctcgggtggtggtcaagggtggcacctgtgggttttattcgaaccaatggttccggcatttatggcaagacaactgggtctggcgctttacccggaagatgcacgactcgctaacggcgaatctgccgatgctaaagtgaatcgcggcatcgaggtatttccgaaacaagcaacaatcaaacccgaaggctatggcaatttgctatggctcccatggtggcatcaagcagcgcctggtggtaacgaattttatatcgcatccatgttgggaaaactcgatccatttctaccggaacaattcgataccgtttccccgaaacagttggaacagacattaacggcacaccatcgcaattcaccagaattggcacccacccgtcggaacaccgcaacgacaccgtcgccacacccgacaaagaccaccacatcggaatgggacgaatggcgaactactgcactagagaaactcacactgaccgatgtttatggtgatttattgactggcagtcaatccggtgcggaatggttggaatgccgcgacccggcttcccccaccggcgaccgcaatccatcggcgggagtggcgaccggcaccggtactatcgagcgtggatcgtttcattcctttctcaccggtgaaacgatctcggtcttcgatttccttattcggattggtaaagcgaaacatttccgcgattcctgccaatggatttcccggcaaacaggtataccgctaccaacgcggcaagcgaccacagaacctgcaaatgatttgccggaaattgtcgtcaacaaccggcaactttctgtgatcttgtccgatgcttgggacgcactcattgctgcgaatcaaccaccgcgcgtttttcggcgaacgaatcacctcatccgcatcaaaatcaatactaccgaagacaaagcttatccacaaatcctcgatgatgtcgatatcttcggtctgctattccggtgtgcccgttgggttcgtatgaccgaaaccggaatctccgacagccaaccaccgcacgacattgcgcgcgacattacgcgggaaatcgatgagcgcattccgtggttcgacgatattgtccagaccccggtctttgccgccaatggtattttactcaatacccccggttattatccggaggaacatctctatgttcacctcccggacaatctcaccggaattgctgtgccatcgcatccctctccgaaagaaattaaatcggcgcgcgattatttactggatgagttactggtcgattttccgtttgttactgacagcgaccgcgcgcatgcggtagcggcattgttccaaccattcatccgacccttgatacaaggttgttcgccactccatttgatcgaatcgccggtgcccggttcgggtaaagggctgctttgtaacattatttccctcattgccaccggcagtattaccggtgcccgcacaatacctaatgacgaagacgagttccgcaaagcgatcactgccgaattgctgaaagacgattccataatcttactcgataatattaacgagcagcgctcactcaacagtaccaatctggcaacagttttgacctcaacggtttggtctgaccgcttactaggggcaaccactaaaatatcgattcgcaatcatgcactctggcttatgaccggcaacaatctgaagatgtcgctggatttaatccggcggatggtgcgctgccggatcgatcctcacctcgagcaaccgtggctgagggagaaatttaaacatgccgatttgccgctatgggtacgcaaacagcgacgcgaattggtgcacgcaatcctagtactcattcaggcatgggtcgatgcgggcatgccgccctataccaaaccgctcggttcgttcgagcattggtcgcaaatgatcggtggcattctcgatgtggttgggatacccggttttctcggtaatctgcagtcgcaatacgaatctgccgatcccgaccatgcgatctggcgagaatttgtctcggcatggtgggaaaagtaccgggaaaaaccagtcaagatttccgagttgaatgaattctgcgaaacgaatgaattgctcgctgccttgcgcagcgacggtacgacccgctcgcaacagaccaagctgggacatgccctgcgcagaatggtcgaccgcaacttcgccggttaccgcatccggcaggcgaccgaaggggtgagtcagagccgctacaatttttatttcctcacgccggagaatgcatgaaccagcgcactcaaccgtttgtgcggcagaccttgaacgcaggtaaatgcttgtcattccgtcaaggtctgcagatgtatgcagcaaggtctgcacaccggaatccttactggatgcgcttttccggtcgtatgcagacctcagcagacctcgattgtacccctcctgcgagcgtgcgtgcctgtgcccgcgcgggtgagaacaggttatacgataaggtgtgcagaggtctgctcgccatcgcaacgtccgattcctacagcgaatgcgagtacagacctcaggttataaggtctgaatcaggtacgaaaaggtctgaagagaataacaaaaagaatttcattcaccaccatgattcgaatggaaaccggtaatgaagaaatccaataatgacagtacttccagtaaaaagcaccgcgtcaaggcgcgctcgctaactgcgctggttccagatacgcaagaacgctcaggtgttacaggtactctgaatggtaataccgtctgtggtgtcgtcacgaagaaaggaactcaatgccgacaaccagcacaggcgaatggcaggtgccggtttcatggtggcaaatacgaaggcgcgatcatggcgcgtccgggaaatcgcaatgctgttattcatggtgcgtatttaccggagctacaggatgagcgcgaaaagaaagcgttcgatttgttccttgccgatttgtacgaggtcttccccgatctgaataaggcgagcgacctgcggcatgcgcaacttgccgcgattacctatatccgtttgctgcgtgcgttgtggggcgatgcttccagttcgactatcgacgatctatcacgcgcgttcacgcggcaccttgcggcaatccgtgtaaaccgtgaccaacgggtggttgatggcgagggtgcggcaggtccgaaatcacctgccgagtatgcggtcgagattattcagcaagtacggatgtactcgaaaggcggcaaagttccagtgccaatcgatccggctctgatcggtttaggtccatcggcggagatactacccgatgaatagtaggaacatgccggaaaattttcgcaaaccatcgcagagggtcgcagtgtcggtgcgaaaacacaagagttacaacgacgcagtgccgaactcaatcgcagagtcactattctacgggcattgggagctggtgagaacctggcagtgtcgcgggtgttagtctgaacatggtctgtgcaatgacaggtagagaaagccaagagttaggcgaatttccgaatcagtgtctcggaaattctggtgcgcaccacaggtgtgtgttggatcatgttctgacgtcattccgcctaactatcgaagaaaccaaacgtatggaaaaatgctgcacatgttcttccgatctgttaggaccgttgtcgtcaccgcatgtcgagttgggtgcgagtgcgcaggagaaagtcgtgttaggtgattcatttatgacttttttcaacacccacacccatacaggcaatctcggttctccgacgtcaccaccgatcgaaccaatgagcgactcgctgttatcgcaggtcgctaagacggagtgattcattgtcttgttgtcgctttagacaatggtgtaataaacaccacgtccttttccgtgcggtatcagttgtccgctacgaacgagggcttccaaatgctttttgatcgtgttgcggttgaaccggtaatggctgacaacatccgacatcgtaatacgaccacgctctttgactaggcggataattgcttcgggaatcggtaacgactgttgctcgcgttgcgattcgacccgctcgagtaaacgatccttttgccgcttgagtgtgagcaggaagaactcattccaagcgggatcgcagaggtctaattgggtctttcgtagcgccagataatagtcctgcttttgcagttcaatttgttgttcgagtgaactgtactggacatagtcgtatccggcacgcaacaacaataggttggtaagcacgcgcgagacgcgtccattgccatcttgaaagggatgaatggcgagaaaacgaaccgtgaactcggagattgtcaataacgggtgttccgattctgcccttaagcgttgtccgatatcggcaattagttcgcgcatcaaatgcggagtttccaacggtgaagatgtttcgaaaatcacaccgacttcgtgaccggtttcgtcgaatgccgagacatggttgggatgctgtttgtattcgccgagatgccactgatccttgctggaatgcgcaagcaaaattttatgcaattgcttcacgtggttttcggtcaagtcgatttcagcaaacgactcggttatcaatcgcatcgcatcagcgtatccggcgacttcttcttcgtcacggttgcggaaagaatgaatatcgatgccgcgcaggagcatttccacttctgaattggaaagttttgccccttcgattcgcgtcgaagaaccaatcgattcgatggttgcaaacatccggagggttcgcagcgcatcggtcgataatgaagaaactccgcgccagtaacccttgaactcatcgatttcagcgatgagtcggacaatctggggagtgagtgtgatagacatgggtaatccaatttgatacacaattatatccaattatacccaataagtaccgcgactgcaaatttaatgggtctatatgggtaacaatgggtatagcaataatgtaggattttttatgtttgagcatctcggcaccgatttagcattcgataatgatggcgaccttgtcgtttcggcgactggagattttgccctcgtaaccggacgcgactgtctgctccacgatctcgccgatgcattgcgcaccctaccgggagaactatttccgcatcctgaatacggttgcggattgcttggtatgctaggatgcaacgacactccgctcaaccgggcactggcacagcgctatatcacacagaccatcgagcgcgatccccgcgttgttgcctcgacgattcgggtggaagcgatctcgtttgaaagtattgagaaatcgtttcgggcaagttttcaagcggtcggtgacgaagacacccatacactcgtttggggttatggaataaagagtatcgatgatttgaaacggaatgcaacaaagtgaaatcgtacactgacattcgcgatgaattgattgaacgggttgcaagtaaaacaccattcaccaatttctcgacctcgagcggaatccgcaatctgctggagattttcgcgtatgtcatcgcatcgctgtacaactttgtattcaaggtggcacaacagggctttctgatgagcgccaccggtgaatggctcgacctgcgcgcacgcgagtgcggagtcgaacggttgcccggcaataaagcgcaactctggatcacattcaatcggacggcatcagcaaatcccttgacgattccggcaggtaatattgtcaaaagccgagctgattcatccggtaatgaataccggttttcgacgatacaaccggcgacaattcctgcaaatgaatcattcgttcgggtgctggcggaagcggaagcgattggcactgcttacaacattggtagtggaacggttacgcgactggtgacatcgatctccggaattaccagtgtcatcaatgacgattttttactcgcaaatgggaaaacggtatcaaccctctatcgcgaggggagtgacatcgagactgatggtgcattgcgcaagcgtgcccaacttgcgtggcaggcaatcggtgtcggtggtaaccgtgccgcctacgagcaatgggcattgtcagtcccgggtgttcggtcggtacagatcctcgatgattttccctttggacccgggacggttggagttgtggtcttgggtgtcgatggcatgccatcatcgcaattgttgtcggatgtattgctctatctgcggcaacgtaaaccactcactagtgacgtacgggtcgtgggtcccagcaagcgcaccatcgacgtatcggtcaatgtatggcgcttctctgatgccgatcgtgaaaccatcgataatacagcgcgtcaagtgattcaaattcacactgacaaattgctgttgggtgagggattgttagttgcgcgcttgctgcaagcgattctgaatatcgatggcgtgtacaacgtccgattactcttgcctgcgcaggatctgctctgtggtcccactgaatttttggaactgggagcgcttactatcgagcatttcctcaagggacgcagttaccaggacactggtatcattatcgaaccagtcgagaccaccgatggcgaatccgttccggcactcaagcgggagaatttctactgatgagtgtgatcggcgatttcctctggatgctgttgcccggtatccgcaaacaaaaggacacagaaaatagtgctttgtacgggttactctcggcgattggagaagtgctcgacgatgcgaaaagcgatatccgcagaattcggttgtcatggtatgcgcaggtagtggagccggacgatggttattacgcattgccggaacgtaatagcgatctcgataccattgccctcggacgcgggactcgccgttatccggtagaatcgaatgagtcactggctcttcggctcaccgattggccgaatacctgccggtggattggcaccaagccgggattaaaggcattaattgaatcgcacggttttgtctgccgggagatcgtcgaaagttatgccgacccgcagggaatgattttgctgtctattaacgatcaaccgctggaagcggaaatcaatctgacgcatctcttttccgaagaggatgccggtaaaaccgactatgtcgaataccgccagaatcgggtctaccgtgccagtgagctggtctggaatttctgctttacggtgagtattggcagcaatggactgccggaacaccggcgcgagcaattgcaacaagcgatatatgactttaaacccgcgcacacccaaacgcaaatattattcgtggactaagaaaagcaaatgaagaaactactatacttctccggtataaagccgaccatcgaagacctcgagtaccagcaagacgggattgaggaagcgctgtcgtccatgcaatccgatctggtgagtgatggtgtggtgcggggattgcttgtttccaagggaatccaagactacctctgcgcatccggtgtcgcttatatcagttgcaaacggattgaattaatagaaacgacatcctttcaatcgacagcgaatcgttatgtctttttacaatacacgacaatatcaagtcacgaagtatcgcactttctgactggcgacaaatacaacatctatggcgacgactcctttagtattgtatcacgcaccgacaacaccccgcaatccggtgaggtactgctcgcccacattgaaaccgatggttcggttaccgatctgcgggagccagtttcgctattgatcgatgaacggttgcatgcaccgaacaccgatacccatacaactgcttcggaatttcgcatcggaggtgccgatggacctgtcggccttaccgtggaaaatattctctcagtttatcccgagctaaggaatttattacgtaacggactgatcaacttccaagatggcaatggtgaccagttgctactcacccgcaagattccttcgcaaccaaacgcaccggtgctttcgctttcgaatgctcaactgaaactgtacccgaccagtcaacgatcaagtgaactatcgctggcactcgattcgtatcaagcggcatcaatagcgagtcagcaaatatcggcgcacttatcgtcgctgcaggaactgcgcgcgctggtcattgccaaacaaatcgcaggttatactttcgagcaactgcgcggcaataccgctttgcccggtggctcctttgattttgaagtgcgcaataccaagaatgacttgattcgcaacggtgtgttatcgaatatgcgcctaccgggaacggtttctctctcaagcggttcacaggcgatggttggcaacggcaccagtttcgatagttcctatatcggcaagcgaaccctaatcgatccgggggcgaatagttccccactcgaatttactatttcggcagtcactgatagcactcatgccacactttccactacggcaaccggcaatattgccaatgcagtgttttatttttccgatgtcccggagatcggttttggtggttcgattacaaccattaccggaatgctggctggcatcgatgcggttaaatccggcaaggagcaaaaccgttcgctggcgctccaacaacagacccactctaccaatctgatcggcgatagtgccgcagttatctcccaaccgcaaagcaaccagtatgtattattttttagttggacaaaaccgttactgttcgaccacgaagagatcgtgcaatatctcgttcgtgtctatgaattgttgcccaataccggatcgctaccggtcgatatatcagttgctgtgctcgaagcaaatcacaccgatgccatcgttcgtgtaaatgaatcaccaactaaacagcgccgccagatcgaaaccgacgatgcgaccacaacggttgggaatggctccactacgagtgaaatcatctataccggcactatgtcttttcaaccgaatcaacgaatcatcgtcggtaacgaaagcggaatagttcgcactgtcgatcccggcaccaagaccataacgctgttatcaccacttaccaatgctcccatctccggcaccacactcaccggtaagaaactactctatgaatccgatgtccgcaccgagtcgttctccatcgaagtaaacccgggacaacgattgctactgttcgttcggtcaatgtccgagtacaatgtcgtgagcaactggagcaatagtctcgccattaccgtcgatgcgctccagagtggcgatggcaagacggtagcacagcttgccgatgctgatcgcaaagcgatgacgaccatcaaacagatcgagcgtgagcaagtaacgcgtgatttatccgaacaggtctttactctccaacgcgccattgccgaagccccgactcaagagcaattagatgcgctggcggcagctatgccaacgggagcgaactaatggcagaccggatattgacattaagtggtcttcccgtgggcagaagcgcagtgttgtatgacctgctggcaagagtgcaacgcgatgggaaatggtgctcgctgccggtgcgggtagtgacagtggcaaccgatggcacactcaccatcaccggactgcgcgacagtcgctatgcattgctctttaccgctcctgcgctggtcgtgttttcgcgttatcgaatcgaagttggcgagcccggaaattatcgcacccgctatctcggcgatgcggtggagacacctttgttaacacaggtatcgtcagtggtagcgaataatgagattggtctgcaattcaagtggtcgctgcgcaacgattacggcgtcactcattatgaattgtatgccgagcgtcaagatgtcgatgcggctggtgtgccagtaattatcccgggacgtaatgcacgttccggtattcttcccgcagttcaaccggagacacagtacgaatgttacctcgttgcctgcggactgcgattgaaaagtaaaccttcacaccgcatttcagtgacaactccgcagtgcccaatagcggaaccaaatttaattattaatggcaattttgaacaaatggtctggtgaaaggataacctgacatggcaaatcaaatcacaatttcaacaactgaaaagttattcggcacccaatcgatggagattactaccgatagtgcgatggcttcattgctcaccgatccggataaaaccaattttgtaaatgtcaccggactctcggcagtcactgtctcgtgctatctctatatcaagacctacactgccggatacatcgtagcgcgcaccctgttttatgatgtgaatggtaatttgctcggtaaccatgactgggttttacaatcggcgattaatgccggattcacccgtttctaccagacctaccggttggatcaatctccggttccaaccggaacggttaagctgaaactgcaattcggtggtattcagaagtcgagtgcgaatccgaacttcgatctatttattgatggtgtgaaagcggagcagggggacaaactcactgccttctccgactatactctaaaggagaacgattcgctcgatctggtcggtgacggtgtcgtcttcaagaaggttgctggtgtcaataccgaccaccggatcacgagtgactctattgagtccgcagccgtgaccacaactaaactggcggatagtgcagtcgatgccaccaagctcgccaatggcgcagtcgataataccaaacttgcggataatgcggtcaccagtatcaaaattcaagacggtacgattacaaatgctaaagttgcagaaagcacccttactgaagaccggctaaacagcggcatggtcacgaaactttcgaaattgaagtcggatggtgatttccaaggtgacctcttcgcttccgatggcactaccaagctcattgattccgcttctggcaaggtaaccacagcactccagaccagtagtggcgcttccatcgacgaccggatcgaacaattctacaccgatatctataataaggatatcgcgattcccctgctcgataaagatgtaaccaaatccgcagtccatccgacttacttgacctaccgtcccggttttactaccggagatatcaatatcggtaacatcggcgatagttgggacagtatgttcgatctgacgcgcgccgataatggtgaggatttacttgatgcttccggcaatccgattaaggtggtcgcgctctggcagaaacagaataagaccaatgcgataactgccgggagtgatccgcacgggtcgggtcccggttggtcccgcaacgacggcgatggcagcaataactcgacatggatcgaactctcggtaataccggttgtcaacttcacgattgcttattcagtacggaaaaaattatcgcaactcgcaacccgcgatttggtcaccgttggtgtaatcaaagggggacaatccgatgccaatgttaccactgcgctgcaggaactcaagggtactccgaattggaacgatgcggttcccagtggtcgcaaattaatcgaacttaccaccaccaaagatggcgggataacctacgtcatcgccgatggcaaggtgaaagggacttcgattgccagcaatgaagtcggtaacactcaccttgttgataatgcggttactacccagaaaattgatgcgaatgcggtcactggaaataaaattgctagcggtgcggtggggaatacacagattgccaatgccgccatcaatgacaccaaacttgccgatggcgcggtaaccgctatcaaagtcgcgaatcaagccatcgatgcaagcaagctggcgagtagcgcagttactacggtaaagattgcaccgaatgccgtcgatggtagtaagctggcaagtgattcagtcgatactacccacctagtcaataatgcggttgatgcatcgaagctggcaagtaattctgtcactgccgggaaaattgctaattctgcggtcggtacagcgaatcttgccgatggcgcagtaatcgataccaaaatttccgatggtgcaataactaccaacaaactgaatgcgactgcactggcagcattcgatgcacataatttggtgcagaacccatcgttcgaatcgggagcatgggtctgatgagtttcttcgatacgacgaccgattactcggtatttggtggtagttcactgcgattggttggtgattctgcgccaccgaatgtcatcaccggacgcagcaatccgatcccggtgcacgggcgcgatgctatcgtcgtatccgcttacgtcttcgcccaggcaattatcaccggaaccgaattttcaggattactgacttcctatgataacaacggcaatgaactcagcaccatcgaatggttaaagcttactgccggtaatggacagtttatccggtattatttggtacaagacattagcaaactcccctataacacctcttcaatccggctctcgttcgcactttctgatccgtcaaataaacctgccggacaagtctatgtcgattgtgtgaagtgcgaatatggtaatcgggtcaccggttattcggagtccgtgttttacgaagagatctgcaaacacatcggtggatttggtgttccgacaatcggcacggcacagttagcgaatgattgtgtaacaagcgggcaactggtaaccgaccccgcctccctcggaaagttgaccggagaggcgttgcaatataatggtgcggcactgaatgccaatgtcccgctcaatgtgaataatggactaaatgcactcggaaaaaccggtattactcagatgatacaagtatcgaatccctggggcggaataattaacattgaaatcactaatggcattattacgagcatcgcatgagtgaatttgaacacacttccggtgaacatctcgaaccaccctattcctgccagtaccatctggctaaagtggagcagattgtacagcaactgcaggacttaaaagaatcgattcaaaccgtgcaaacggaagcgaaggaagaacgcaaggaagtccatgctgcattgaaggaattaaacgatgcgatcaaaggcaacggaaaggaagggctcgttgtgcagatggatcgcaatactaacttccggctcatgatgacgaagctgctctgggtattattcacgccactttacggtggattgatcgcactcgttataaatctatttctatccaaatcattgaggtgaatgatgagtattctcacagcaatccccattgtgggacaaattatcgataaagccgaaggcatcatcgacaagttagtgtcggataaagaccttgcggcgaaactgaatcacgacctgcagacgcagatgctcgcactcgattatggtgcgctggaaaaagagatcgatgccaaggcgaaggtactggtcgcagaggtacaagggcagagttggctgcagcgcaactggcgaccgctcttgatgttggtgtttacatacatcgttgctcacaactttgtgattgcaccgatctttggcattacctccgtgccggtgccggagcagatgtggacgttactcaatatcggaatcggtggctatatcgtcggacgcagtgctgagaaaattgcgacctcattaaagaaggatgactcaaaatgactctggacgacatcgaatttattcctgcggcaagaaccaacgcatattcccgaccaaggaatatcgtgattgacacggttgtcattcattatactgccaatggtagcattgaggatacgattgcgtggttccagaattccgcaaataaagtatcggcgcattatgtaatcggcacagacggacgcattgtccgaatggtgccggacgacaagcgcgcttatcatgctggtgtttccgaatggcagggtcgtccgagtgtcaatgccttttcgattggaatcgaactcgtcaactggggtccgctcaagctgcgcgatgaatcctttttcgcttggcctaatgattataccgaacgctatgatggcgatgagccggtattgatcggcaccgaatattggcagtcgttcccggagctacagcttgctgctcttgagcaactgctcgtgctcctccgcgaagagcacccaatccagtggctggtcggtcataatgaaatagcccccggacgcaagattgacccgggtcccgcgtttccatgggagcgctttcgacctaacgtttgaccctgtcaaccgttcgataatctctcctttcccaatctagttagctaacctacaagccgctacagtagcggctttaacggttattgccttgccttgacttcgcaagaccccgcgcttaaggtgttgccaacaagtaaatccaacgcaaggcattatcatgaaatacacaatacacaaccagaagttcggagtcgagatagagactgccggatgcgagcggaagcgaatcgccgaagcgatcaagactatcgtcaacgggcgagtcacccaagagttcggaacctttcaagcatcgctggtcacgcaacctgatggtcgcatctggcgagtccaaaacgatgcatcaataacaaccatccgcggtcacaagggttccgagattgtatcgccgattctgacctacgacgatatcccgacgctccaattaatcatcatcgcggttaagggaatcggctgtatcgcccatcggagttgctccgtgcatgttcatgtcgatgcgacaccgcataccgcacagtccttaaccaatctggcgaagatggtctatcgcaatgaggatttactcttccaagcgatcggcacctcaccggaacgcagagcacattacactaagccgatggagcaggagttcatcgaccggttgcttcagagtaaaccggatacgatgaccgatttgaaccgggcatggtatggacatgctaatcaaaacccgcaacactatgaccagagccgctatcgaggtcttaattacaacaatttgtaccgctcaatccacacgattgaattccggtatttccaagcctccttaaactcagaacgaattacttcctggattcaactggtgctcgcaatgtcggcaaaagccctcgacctcaaaaagacgactcactccaaaattgaaaccgacaatcccaagttcaacttccgggtcttcatggttgccggtctgggaatgaagggcaacgagttcaaaaccgcacgaaccatcctgcttaagaacctgccgggcaatagtgcatggcgatatggcaagccgcaaaagaatacggaggtcgccaatgtccaataaagcgacgattccctatttcgcgtatggagcgaatctcaatctcgacgatatggaatggcgttgcccggggcatctgcctcgctgcgtcgcctatatcgaaaactaccggcttgtctttcgcggggtggcatcgattgaaccagcaaaaggacatcgtgtttacggtgcgttgtatctgctcaccaaatccgacctcgacgcactagaccggtttgaaggatatccccggttgtatcaccgcaaaattttaccgctccgcaaatccggaaacaatcacaatacgaaagcgtgggtgtacataatgaatgccgaccgtaacggttactatcccccttccggtggatacctcgagacgatacttgacggttgccgtgactggtgtattcctgatttctatcgcaagcaaatcctcaacgttgcaaggaggcaacacaaatgatcaataagcacgaactcgtcaatgaaaatgcggtcttcgtcggcactgccgtcgagatcgtcgaacaactccggacgcagggatacttcgaacggtcgcttccgttccggcagtatctgcggcaactggtcgacaccatcgaaatcgcgggaggtcccaatctttacaaagggatcttcaatgaatcagagaaaatatccgacgaggagttggcggaacggtttatccgcgaactcattaacaacggtctattcaaggaagcgtgagcatctgctcactcaatcgtaatcatcaaatccaaatcaatcactcaacactctcttgaaaggagaacagcatgagtaccacaacaaccaaaaccaagaagcaaatcggcgaccgtgtcgttatcaccggtggctcccgcaagggcattcaaggaaacatcatcgcattgcagggattgaaagcgaccctgcgcaccgacgatggcgaagagattccggcaatgctcgcctggatcgataaaatcgaatcaactcaaccggcacaggaaaccgtagagacacccagcgaacccgtcgagacactggtcgtggagaccacttccgatacgacgaccgaaccacccgaaccgccacaaccgacagtatccgagccggttgctgaatcctcttcacccgaaactgagacagcaccgatagtgaagaagcgaggtcggaaacccaagccagatgccgcatcaacggcaacggtgcaatccgaaccggcagaaacgacagaatcggcaccgactacggaaactgcgacagtcgcaccggaggcaataccggtcgcaccgaagcggacacgcaagcccaaatccaacccggcaccggaaattgcccctgaatcgaacgtggcgcaaaacccctacgaacaaatgacagtagtcgagttgcagaagcttgccaaagagcgtgatatttcaattgctcggacaaaagccgactttgtccgcatcataaaggaaatggagcccgattgcgataccgaggcactcaagggtccggcactctttaacaaggtatccgaactgcacatctcgcggctccggtcgaagaaggatttggtggagttgctctcggtttaataaattttcacgatagtacaagcggatgctcacgacgggcatccgttttttttctgttcaaattttacttgtgtgattccgtattaccacatgctgagattcaacagtggccttcaacatatcaactacagatcgaagattgttggaatcgactgacgatgaatgtattaaatcagtaaatttctctgccctcaccaatgactcatcgatcaatatgtagccttggtataacttcacaaagcataataccgtctcactcgttagagtatccgtgtttatcaacacaccagattttttataggaatgcaccgtaattccaagacaattgagctgatttcggtatcgatgtacagaaacgatatcaacctcgagctgctttgcgatgtcctcgtattgtaatcgattatttttattatttaagcaaatatttacaaattctatcaaccgcctaccatgttcgatgttgctgaataatttttgccacttggttttcctcatcatgctctctttagtcgtaaaaaattctcactagttgatagttatcgtccaaaatgtcatgagtaccttgtggtttgggaaacttcgcgaagcttagttcgcgtgcttccattgattaacggtttcaagggtaaactgtccctaacggctttcatgaatacatttatcgataacaaactatcaactactctcaagctgcatgcggtggcttatctgcgtaagtcgacccgcgagatgcaggaaaactcgattttgaaccagcgcaaagcgattgacgcatttgccgaacatcataacattcacattctgaagtacttcatcgacgacggtatatccggtctaacgatgtcgaaacgggatgcttttaaggagttgattaacgagtacgtcattggcggaaaactgagttttagcatcatccttgtattggatgtaacgcggtggggtcgtttccaggatatcgacgaatcggcgcatttggagtttatttgccgtaagcacggtaaggaaatcatttatgttacggaagagttcaagaacgacaactcgatcatggactctttaattaaagcgttgaaacgagcgatggcggcggagtactcgaagaatttaagcgataaggtgttagccggatcgctgactatcgcgcggcaggggttccgggtcggtgcacctgcgccgtacggttttgaaaggatgcggctcgatcagcaaagaaatccagttggcattttgcacgatggtgagcggaaagcgattgccaatgagcgggttacgttggtgcccggtaatgcagaggaagtggagacgataaaacatatttttggtttatttaccagacgggggctacgggaaggaaacattgcaatcgaactgaatgagcggaaaataccttctcctgggggtggcgaatggacagagaatacaatacgagtgatgcttcgagatgagacgtacaccgggaccttacgatataaccgcacatcttcgcggctgcatggacctacccgcaagaatccgcgtgaccgctgggtattggttccacaggcgtttgaagcgattgtctcacccgacacatttctcgaagcgcagcagatatttcagaaacgacatccggtttggagcgatcaagatatcctacttcgtttgcaggaactattccagacgcacgggaagctcaccggtctgatcatcgagtcgacaccacaaatgccctccaccaatattctaaagaaacggttcggttcgctgttcaatgcttacaaattagtcggatatgtacctccctatgatatccggtttttcgaattgaaagagttggtgaaatccattgaggaacggttgtggcaggaagtatttgccgcattggtggaaatgggactcactgtggtcgaccacggcacacatctctgtttgaacgaccagttgaacattcaacttatggcatcaagtattcgcaacaacaatggcaaaaagcgttgggtgtatcgttttgaccggcaagtagacatcgatcttacgctcgcagttcggcttgccgacgatgcgggaaatatcctcgatttctattgtttcccatctatcgccatggaaaccgacaagttatttgtgtcatggtcgaatggtatctatctcgatgcataccgtttcgacaaaataatcgatgtgtacgatttattcggcgatagcggacatatcaataaggagaaaacctgcgatgaaatcggtacgtgatgtgattgaaattaaaatcgataagatcaaaattatcaatccccgacaacgcgatccggcaaaatttgaagaaaacgtcgaatcgattcggcgacagggattaaagcgtccaatcgtggtgaatacccgatatatccctgaacatagtaaatatgaattggtttgcgggcaaggtcgaattgaggcgtttcaaaaattgggacacacgacgattcctgccttgaccgtcgatgtcgaccgtgaaacggcgtatgtaatgtccatcgctgaaaatgctacacggatgacacccccgcccatttggttcgcgcaagtaattaaaggactcgcggacactgggatgccgattgaacaaatttccgttattcttgaccgtacaccggacaagatcaaggattatctcttattaatcgagcatggggacaaattactaatcgaggcggttgaacaaggaaaagtgagtgccagtgcggcatttatgatcgtaaaagagccgattcccgaattacaacggttgctaactgattgcgtcgaaaacaatgtattcgattattccgatgtaccggcggtgcgaaaattaattaagcaacgtcttcgttttcagcaggaaaataactcgaatcgatccggcaagaccccttatggcgaattatctatcgaaacattgcgtaaagagattcgacgaactctcgacaagcaagaaaacttcgttcgcaggtcgcgccgatacgagaaccaaatcatgattctgatagaagcattcactcgtttgaacaacgatcccgattgggtgtctttgctgcgaaatcaaaaattaacggattttccgaaactcaaagggaagcatttgcaggacctgtttgcaaacttttcaaaaagtgaggccgcatgaacaatatctcttttcgtaccggaacagtgaccttgccggtgaataatctgtatcccctgtttccgcgaaagcttacaggtcatttatgcacgacctatcgaaaaatcgtcagttcgattaaagagattggtttggtcgaaccactggtcgtcgtcgaaaaggaaggacgctactacattaaggacggtgtcttgcgttggacagcgctgaaagagttaaagatcgagtcggttgaatgtctaatcggcaccgacgatgatgtctatacttacaacaaacgggtcaatcccctgacggttagcgagacacatacgatgatcaataaagcgattcaagaaggggtcagtctggatcgaatcgccgctactctgaatgtcaaaaaagagtgggtgcgtaaaatggattcgatgctgatcggagtcgctccttccgttatcggtctattacgtcaacataatgtgtcgaggttgacttgtgaagagttgaaaaaagtgtcctatcatcggcaaatcgaaattgttgaactcttgaatgccgcgaacgacttttcgcgtcgttataccagaactttggtgctttccactccagaagatcaatggagtaaagcgcatccgacaaaaaccgtagggtcagaagcacaaagaaaagaactgacgggaaaactttaccaaatggaagatgagtttaaacgggctacaagtagttatcgggacaatgtattcgatttggttaaatttaccggatatgtacggaaggtaattgccgacttggcggtacgcgctttccttgaacagaattatcccgatatacaacttttttttgaaaaagtgattaacgatcatgaactggacgtttgatcatcggtagtgcgacaaagtttacgcatcgaagattgcaaaccgtcgttacaaagtgtcatacttaatctttcaagtagtacggaatgtaggattatgccccgagccgaagaaatactcacttttatcaaacttattggaattgttcaagtaagcgacttagtaaaacaggatatccaacgagatgttttagcccggttagtgaaggaaagcaaactgaagcgggttggccggggtctatactgcgtcgctgactaccaaccatgcatgcatgctgaatttattccggttgcactgactatacccaaggcgactatctctttgttgtctgcgctctggtatcacggtttattgacacaaatacccaacgaaatatggattactcttcctagtgaaatgcgcactcccaaaacggactttctccaattgcaggtgtcaagaacatcgcctgatattattaaggtgggacgcgaacaacagttaattgaggatactccggtgtacatctattcgttggaaaggacgatcgtcgattgtttcaaacatcggaaccgaattggtttggatatcgcaactgaggcattacgtaacggtatttatcaaaagaaagtcaatccacgcaccattatgaggattgcgaggctgttgcgtatggataaaattattaaaccgtacctgcaggtacgaaaaattcagaaaaacgcggagtcctgtgaaatcagcttgaactcaggtctgtaaaaaatgtcttgccctcgctttacctgtaattacattgtgtaggttagcgttttgccgcctccgatatttatatcaaatcttcgtttttctttgccctgaaagcaacctgacgagacctctctgagccgtaaccaatatcgtaactcctgatatttccttatcggcttccttaacgggtttttcctcaaccggtaatgtttgttatactaacacctgttagctatactctggtaaccgggtaacgaggcaaaaaatgagcgaaatccccttaaccgaccgacagtcggaattgttgcaatggatcacccaatatttccagaagcatggtcggactccgacgatgcaggaaattggcgaccatttttcgatcagtcgtccgaccgcattcaatatcgtcaagcccttgattaataaagggtatctgcggaaagtcggaagcggaccgtttagacggttggatatcatcgatgagaccggaaccatcttgaaacaacaaggggttcccgtagtcggaagagttgccgcaggtttgcccctgttggcgacagagaaccggattggatggatgcttgtggatgacgtttttgtgcgccggggggcaacctatgtgctcgtggttgaagggaagtcgatggtcggtgccggtatcctgtcaggggacaaagttatcgtccgaccgcaaaaaacagccgaaaaggggcagattgtcatagcgcggttcgatgacgaggtgacaattaagtatttccatacagtaaaaaacggtatggtcacgctcaaagcggcgaatcccgaccaccaggacattgtaaaaccggcatccgagtgttcgatacagggaattgttgtcggattgtgccgcgagtacccgatgaaataagtgtcagattttgacgttcaaacacattcattgatgagatgaagatgcagattacacaactcagtcgctacgattttcccgaggacatgattgccaactggcggaaactcgggatacagaccttacaaccaattcaagtgcaagcgatacagaagcataagctgttcgacggcaacagcatgatcgtctccgcgcccacttcctccggcaagacatttatcggtgagcttgccgccgtgtatcaagcaatcaacaaaaagaagacggcattcctagttccactgaaagccatcgcagaggaaaagttccagaccttccgtcagatgtattcgtcgtctggaatcaaggtggtgatctcgactcgtgatcataaggagtatgactcggacatcgagaatggtaaattcgatatcgcgattatcgtttatgagaagttctttcaattactcaactgcaataaaacgttcctcaataaattgggtctggtagtggtcgacgagttgcagatgctggcggacatcagtcgtggaccgacactggaaatgatcctgacccatcttcgcatgcaacgggagcaactcggtttccaactcgtaggactatcggcagttctgggcaaccatcggttggtcaatgagtggctggatatcgatttgttgcattacgagcgccgcccagtggagctgcgaatcggttatctctatcaaggtgtgtttcattaccgtacgatgaacagtccaggcaccggtgacgaaacgattctcaaacgaccaccggaggatcgggctgaagtattatatgcggcggtgacaaaattcagtgaagatggtgaacagtcgttactttttttgaaagacaaaaattcggtgcgcggtgtggcgaaggcgcttatacaatggatcaatgcgccgagtgcgaccgatgcaatcgcggaattggagactttggaagagactcattcccgcgacgaattaatggaactgttacaacacggtatcgcattgcaccatgccgatctgaccatcgaggaacgagagctggtggaacgccactaccgtaatcgcagtatcctggtgttagtctcaacatctactttggcaatgggtgtcaatcttcccacccgaaatgtgttcattgaattgcagcaatggcgctatgatccaaagtttaaaaaattggataccgtcgatttatccaaaggtgagttcgagaatatgggcggtcgtgccggacgctaccaattagaggatgaattcggtcgtgcgattgcgttggcgcattcgatagtggagcgggaacagatacgccgattttatttggaaggggaattggaggaagtcaaacccaatctctggcgttcttcgatggcgacgacagtgttgggtgttgtctcgttactcggtggtggttccaccgaacagataaaatcgtatctgcgcaattcattgagttggcatgtccatgaaaaagatgcgcaacaacaggaggagttgaaccaagagttggattgcggcctgaattattgtttgcgcgcgggtgtggtttccggtacgactggtgagaaactgactcttaccgagtttggaaccacggtagtcagcatgggcatccgggttgaaacggctcacgttattaagcaatggttatcgcaacgggacgatcaagctatttcgtgcatggaggcggtgttatttgcgctattgactgccgatggtcaagaaggatatgtcaatttctccacttccgaataccattaccatggttacgaatatacgatgcgagtaacagaacagattggctcgaatggcatggcaatcttcgattcagtttgtagtaacaacatcgatcagtataaccgggcaaaaacatgtaaaagcgctttactgttgaacgattacatcggtagttctaccaataaggaattggagaaaaggtatcaaatttacttgggtgcaattcgccgtatggcggaacaaattgcatgggtactatccagtgctgcagaactcgcaaaaacattgggttatcccaattcctggcgtaaatcactggatcaaatcgcgatgcaagtgcaatacggtgttccaaatgcgggtatcgcactcgcacagttgcaaatcccgcgactcggacgcgaacggatacgtaaacttgtcgctgccggacttaccgaaccgcaacaaatcttggaagcgggtgctgccgtgttagccaagtacgtgacaaaaccggtcgcaacttcgttacttgcctggtgcaagcaccgcactcaagcggttgaattggaaaccgcgctaagcgacactaccgatacaaatacctcttcggtgtcgatagagaataaaggacaccataatgtagtcgtgggcgtgaatcacggaacgatcatcatgaatccacgtgaaaacactcaggtaaaaaaagcggaaccgccggttgatttgtcaacactgccattgacgagttggaaacgcgaagtatcacagcgcctcgaatccctaactcccgaggcattggaacagttgtacgaagagacgcgggcaacccggcacgatagaatccgcgcagcatgcaacgagttgaaggcgatgacaagcattgccgatgcgacgcgacgaatcaaacaactgaaagatgaatatgtcgcgtttacaacactactcaacgatacgttacatgcaattgtgataccatcgtttatatccgattttaccagtctgttgcggagtcgagcgagtttcgataccgtccgaaaccgtgcacttgctgtatttgattcgatactggttccactgaatgggctgatcaagctgctggaatcgttccgcgtttctcccgaggaactattattggaagcggtacaacgtagccgtccggtattaaatggaacgaacattgactcggatggtttgctggacgagttacagcgaacggaacgatttctacccaagcaacaactggtagaagcctttggtaacctgttacggaatgccggtgatagtttacacaatactgacgacccgataatagtcctgtcgtctcgtatcgagtccaaccagacttgccttaccatccgtgataacggttgcggcatttctcccgaacaacatgagtcgatattcaataacggtttctcgaccaaggatacagaaggattcggacttgcccgagtcaaacacacactgcaatctctcggtggcgatgttcgtctcgtcgagagtgaacccaatgtcggcacgacattcgaggttgttctatgagtggaaacggttcgggttgtcgagtccgcatcttgttggttgaggataatgaatacgaccggcagacgattcgtaaggcgtttggctcgcagttcgatatcgatgcagcgatccattattcgcaagcgatggagaaactcaaatccgaccaatacgactttgtactactcgacttgatgcttcccgaacggcatggtgcgaaaattatggaggatggttcgttaggattccaactactcaaatatattcgggagaatgagccgctctgtccggtagtcgttatctccgggatgcaatcggtcaaaaccgctctgaaagtgctttccgttggtgtcgtcgattacattgtaaaagaggaattgatagaccagctaccggtgattctaaaaaagattgagctaattcgtcgtggtcaaatcgagagcttgatgctgcgtcgcactcagacgcatggctccgaacggaagttcatctacgcctccgaacaaatggctgctatcgataagcagattacgaaagtggcacaggatgacacaccggtaattctgcttggtgaatctggtacgggtaaagaagttgtcgcgcgcgaaatacaccgacgtagtcaccgcacaaattctccatttatcgatatcaattgcggtgcaatcccggaattgctgctggagaccgaatttttcgggcatgagaaaggtgcgttcaccggtgccgataaaatcaagaatgggttgttcgaactggcgcacaatgggacgctgtttctcgatgagatcgcggatttatctgcaccattgcaagtgaaattgctgcgggtcctgcaagaaaaaacgtttcggcgcgtgggtggtacgaaaaatttactggcggatgtacggattattgccgcgacaaacaaagatttgcatattgagagggctgaaaagcggttccgggacgacctttactaccgaatcgcaggactagttcttcacattccgcccctgcgggaccggaaggaagacatcgaagcgcttgctaagtactttttgctcaagctgtctcctaagcacgatattgtccttaccgagcgtgcgatgcaggctctaacggcgtatctatggccgggaaacgtccgcgagctggaaaatataattcatcgactcgtgttccacgccgatagcgacgagatcgaccggaaagacgtgttggcgatactcccgacgacttcgcagtcactgcaaacagtcgtttccgagacattgaatttgcgacaggttgaaacgtcggttattcaagaagcaataaggagaagcaaaacccaaaaagaggctgcaaagttgcttgggattgcagagagtagtttaaggcggaaacttagctaatgttactaatttgtaacattgaagtggcacacagaattttatggaaaaattaccgctaagtaaactcgaacaacaccttgctaaagctgcatggatactaaaaggtccagtcgatgcggctgatttcaaggcatatatctttccactccttttcttcaaacgcatttctgatgtgtacgacgaggagcttcgtcatgcactcgaggattcgggtggtgaccgcgagtatgcttcccatgccgaatttcactctttttctcttccggacgattgtcattggaacgatgttcgccaagtaacagtaaatgtcgggaaggcgttacaaaaagcattccgaggaatcgaaaaagccaaccagcagctcctatacggtattttcggtgacgcgaactgggcaaacaaagaaaaacttcctgattcgctacttaccaacctcatcgaacacttttcccaatacaatctgtcaaacgaggcagtcgaacccgacgttctcggtaaagcgtatgaatatctgattagccaatttgccgaccttactaataaaaaggcgggtgaattttacacgccacgttcggttgtccatttgatcgggctcattatcgatgtccaagaaggtgaatccgtttacgatcctgcctgcggaaccggtggtatgctgctggagagtatcgagcacttgcggcgaaccaaccgggattaccgaacgctcaaaatgtacggtcaggaaaaaaacttgacgacttccaccattgctcgcatcaatatgtacctgcacggcatcgaggatttccgaatcgagcgtggcgatacgctgcgtcaaccggcattcgttgaaaacgatcaactccagcaattcgattgtgttgttgccaatccgcccttctctttaaaagaatggggtgcggagcaatgggtgaatgatccctacggacgtaacatcgccggtgtgccaccgaagggaaatggggatatggcttgggtacaacacatgattcaatccatgaaacccgataccgggcgaatggctgtcgtgttacctcatggtgcgctctttcgaaagggtgcggaaggtcgtatccgtcaaaaactgattgatagcgatcggttggatactataatcggactgggagctaatgtattttatggagcgacacttgcggcttgtattctgattttccgggcgaagaaacccaagcaacgaaaacggaaggtgctgtttatcgatgcgtccgatcaaatcagagtcggtagagcacaaaatttcctggaagcacagcatgtcgaaacaatctataaatggtatcgtgagtacaaatcacttcctgatcatgtacgagtcgtcgataatgaagagatcgtaacgaaagagtacaacctcaatattccgctctatattgagaaaaccatagtcgacaacctcccttcgatggaagaggcgattgccgaactcgaaattgcagcacaagcggcatggcaagctgaagatcgctttaaagagttgctcatggaattcgggttgctatcatgatgaaacgcaaggagctggaaagttatctttggggtgcagcgacctatctgcgcggccatatcgatgccggtgattacaagcagtttattttccctctgttgttttacaagcgaatttgtgatgtttacgacgaggagtaccagcaagcattagccgagagtggcggtgacctggagtatgcatccttcgccgaaaatcaccggtttcaggtgccgaaagggtcgcattggaatgatgtccgctcggtgactcgaaatgttggcgaagcgctacagaagggtatgcgcgaattagagaaagcgaatcaggaacaattattcggaatattcggagatgcatcgtggacgaataaggatcggttgaacaatgagacgctcaccaacctaatcgagcatttcagtcagcatagtctcagcatcggtaatgtcccccaagatgaacttggtgatgcctacgagtttctgattaagaaattcgccgacgacagcgggcataccgccgcggaattttataccaaccgtaccgtcgttcggttaatgacgttaatttccgacccgcaaccgggagagagtgtgtacgacccaacttgcggttccggcgggttgttattgaactgtgcgctccagttgaaagacacgggtaaggaataccggacgctgaaattgtacggacaagagatcaacctgattacttcctcaattgctcgtatgaatatgtttatgcacggtatcgaggattttcagattgttcgcggcaatactctcagcaaccccgcgtttctggaaaacgaccgactgaagacattcaacgtgatacttgccaatcctccatacagtatcaaggcatgggatcagaaagcatttgcgagcgatccattcggcagaaatatctgggggacgcctcctcagggatatgccgattacgtattccaacaacacatccatacatctctcgatcctgacaacgggaggtgtgttattctttggccggatggtattctctatagagatgccgaatctgctatccgccgtaaaatgatagaaagtgatgtggtggaatgtgtgatcggtttgggaccgaatctcttctataactcaccaatggagagttatctcctgatctgtaggaacaataaaccgaaaacgcggcaaggaaaaattctctttatcaatgccgtgaaagaagttcataaagaaaaagcgacgagttacttggaagagaaacacattcagaagattttcaatacatatcatgactaccaaacgatagacggcttcagcaaggttatatcggttgaaggtgtgcttgataagaaagctaatttgaacattacgctttacaccggatcaatgcagaaaaccggtaatggtgagaacttacacgatgcaattgatcaatggaatagtagcgcagatgaattacgacagtcgattcaaaagctgatagcgaaactacagtgaagcaaacattcgacaagcaaggttggaaacgaatcaagttcggtgaagtatgccgcaacttgaatattgccgagcgtgatccattatcgaatgggatcgaccgatttgttggattggagcatatcgaaccggaaaacctacatcttaagtcgtggggcaatatcgctgatggtataactttttcgaaacgattcaaacccggtcaagtactgttcggtaaacgtcgttcgtatcagaaaaaagttgcgtttgcagagttcgatggaatttgttctagtgatattctggtcttagaagccaatgagaaacgaatcgaaccaagtttgttccctttcttattacagagtgagcggttcttggagcatgcggttaatacatcggctggggctctttcacctcgaacaaagtttcaagaccttgctcaattcgagttcctccttcccccaaaagaacaacaagcgaaaatcgctgaattgttgtgggcagcggataacgccacacaaaaggcaatatcgttggtaaatgggctaggagaacttctaaaactctcatcagatctaatttttgaaacatacacaaagaaaccaactattaataacgtcagaaatttggatgggtatcaagagtgtcccgtaacggatttgttaagcacaaaactgcttaatggaatttataaatcaaaagaatatcttgggcatgggataaaattggtaaatatgggagaattattcgcttatcctaaactgtataacccggatatgcaaagaatcacgttaagcgataaagaggaaaaacaattcttacttcaaaaaggcgacttacttttcgctagacgttcgttagtcatcgaaggagctggtaagtgttcgattgtgatgactgatgaagagaaaatgacttttgaatcttcgattatcagactacggctcaacacaaaattaatactcccaatgtactgccattattttttccggtcttctgagggtgtaaaaagaataaagagaatagtcggatatacaactgttgccggtattactggatcagatctctacaatatttcagtaccggttatcgaaaaaaaagaacaagaaaaatgtgtcgaaaatttgggcagaatcgaagagttaattactgaagccaaaaaccatgttaccaaaactgagaatgtaatcaagaatttaattcacaaggtgttctaatatgccttttaccgaaatgaatagcgtcgaacatttcattgtgcaacaactcaccggtgtcaatctgaatgccggtgatggggttgtttcatctccagacactggtcgtcacgtctggcgctatatgcctaccgacacactcgaccgcgagattactgaagttcttgttgaaagcgagctaaaacaggcactaattcggatcaaccctgaaatcgccgaacaacccgaccgcgccgacgaattgattcacaaactacgcgccatcctcatcacagtaaataatgtgggattagtaaagtcaaatgaagagtttgccaagtggtacaagggtgagattacgatgccgttcggcatcgacggtaagcacgttggtgtaaacctaatcgactttgatcatcctgaaaacaactcctatatcttgactaaccagttcaaaattcgtgcccgcgagaccaagattcccgatatcgttctgttcataaacggcattccggtagtagtcggcgaagcgaaaacgccagtacgaccggcagtaacatgggtcgatggtgcgcacgaaatccatgcggtttacgagaatactgtcccgaatctgtttgtacccaacatcctcagtttcgctaccgacggtcgcgatttcttctatggtgccgttcgcacaccacttgaattttggtgcccatggcgattggatgaatccaatagtactcttgcacttttttccggactgaatgaagtcggtaaacaactcaacagtttgttacgaccggaaactttgctcgatatcctgcgtcatttttcaatttatgcgaccaatccgcaaaaacgcaagatcaaagttgtctgtcgctaccagcaatatgaaggtgcaaatgcaatcgtacagcgggtttccgaaggacatatcaagaaggggttgatttggcacttccaaggttctggtaaatcgctactcatgctatttgctgcgcagaaactgcgaaagaaagccgacctcaagagtcctactatcatcattgtcgtggatcgggtcgatctcgatacacagataaccaatactcttggtgctgccgaagttcctaatatggtcaatgctgatagtatccaagcgttacacgacctgctcgaacgcgacatccgtaagattattgttacgacgattcacaaattcaaggatgcctatcccgacatgaatctgcgggataatatcattcttatggtcgatgaagcccaccgcacacaggaaggtgatctcggtcgtaaaatgcgtgcagcactcccgaatgcgtttctcttcggtatgaccggtactccgatcaatcgttccgacaagaacactttttgggcatttggtgcaccggaggatgagggtggatacctcagccgctatacatttcaggaaagtatccgcgatttacaaacgcttccacttcacttcgaaccgcgactccccaatgttcacattgacaaggaagggctcgatattgctttccgcgaaatggctaatgatctaacggaagaagatcgcaacaaattgagtcaaaaagctgcgaagatgctgctcttcctcaaatcgccagagcggatcagaacgattgtcgaagacattgcgaaccattatcgcacacatgtcgaaccgcacagttttaaagcgatgattgtgactccggatcgtctcgcttgtgttgcttacaaagaagcactcgatgaacaactcggtgtggatgccagtcgagtggtcatttcaacgaccgcaaacgacccactcgaattcaaacaaaaatggggattggataaagaccagcaagagaaagttattgagcagttcaacaatccggattctcaactaaagttcttgattgtgaccgctaaattacttgccggattcgatgctcaactcttgcagacgatgtacctcgataaatcgctgaaagatcacacattattacaagcgatctgtcgcaccaaccgcgtctatccaaataaaacttacggtcgcattgtcgattactttggggttttcgatgatactgcgaaggcgttagagtttgacgaagcgactgtgcgtgctgtaataacgaacctgcaggaattgagagacaaacttccagaattgatcgagaaagcgtgttcccattttcccggagttgatcgtacgattgaaggattcgaaggtctgagtcgggcgcaggattgtatcaactcgaatgaaatgcgcgatgcgtttgctaaggactacgtcactctatcaaaagtgtgggaagcactgagtcccgattcaattctcaatcgttttcagcgtgactacaaatggttatcgcaagtctatacctctgttcgaccagcttcggatgacaacggacgattactctggcatgcgtttggaccgcagacggaaaaattgattcacgagcatgttcatgtctccggcattcacgatgacatggaagagatggtgctcgatgccgagttaatcgacggattgatgaatagtaaggacactaagcgagccaaacagatcgttcttattcttgtcggtcgattagggaaacatccaggtaatcctaagtttaagaaacttagcgagcggttagaggaattgcggaatcgtgctgagcaagggttgattagcagtatcgattttatcaagcacctctgccaaatcgcgcgcgatacgttagagaccgagcgtgagttattttctgcagacgaacggagaactgccaagacagcacttacagaactttttcttgaaatgcgcacagataagacaccgtcagtagtcgaacgcattgtcaacgatatcgatgagatcgtgaaaattgttcggtttgacggttggcagactacgattgcaggagagcgcgaagtccagaaatcgctacgcaagactcttctaaagtatcagcttcataaagaggaagaactgtttgagaaggcgtatgcatatatcaaggaatactactgagcgaatttgtagttgagtacattcatgatctgatgagtttcagtcattgagagcgatttatgcctagtaaaaaacgacaaatagttgaacccaatgagaaacgtcgtgctttaggtcggactcgagccgaggcaacttttcctgtcgcagcacccctatcagggatgccaaaaggttacaacgaatttttccagcagatcaaacaacatattcaacgggaacgattgaaaacggttcttgctgcgaatgccgctatggttttactttactgggatatcggtcggacgattctcgaacgtcaggaacaggagggttggggagcacaagtaattgatcgattgtctgtcgatctacaaaaatcgtttccagaaatgcgcggcttctcgccacgcaacctgaaatacatgcgggcatttgcctctgcatggactgaccggacaattgtgcaagaggcacttgcacaaatcacatggtatcataacctcaccttattggaaaaattagacgatcctgaaacacgcttgtggtacattaacaaaaccgttgagcatgggtggtcccgcaacattctcgcattacagattgactcacaacttcacaaacgccaaggcaaagcaattacgaattttccggtaacgctccctccaactgaatcggatatggctgcacaggtgttcaaagacccatatttgttcgactttttgggtactgccgatccccggcgtgagcatgaaatcgagcaggcattggttgaccatattcagagttttctactggagctgggagcgggatttgcctttgttggcaggcaggttcgattggaagttggggatcaagaattcttagtggacttattattctaccatctcaaattgcgttgttttgtcgtaatcgagctaaaagctgtaccattcgatcctgctttcattggacaaataaatctttacctatctgctgtcgacgatctactacgtcatcccgacgataagccgacaatcggattgctactatgtaggacgaaaaacgagttggtagtggagtatgcactacgcagtttgaagaaaccaattggtgttgccggttgggagactaaaatcgttaaaacacttccaaaggagctgaagggaagcctgccgtcgattaaagaaattgaggatgaacttggcaaccacgaataatgaactacgttatatctttcaactacgggagcgcttatgtgctataacctgttagagaaaaaatggattccggtactctatcgaaacggacaattcgaccgggtcgggatcaaagacgcgctaattaaagccggtcaaatccgagagatcgccgcatcgaatccgatggacaggtttgcagtgatgcgttttttgctcgccattttgtattggtgcaaggggaatccccctgatgaaacaaatatcgattcgtttccagcagagtggttttccaaacttgaagagacagagaatcgggattgcttcaatttacttggaaacggaaagcggttttatcaggatgctgatgcaagacgttctcgtcccacgacagatttgtatcaagagataccaactggacacaatttttggcattttaaacacacaaccgattttcaagaggggttgtgcgcttcctgttgtgcaataggactacttcggctcccattatttatgacttttggtggcaatactaaaccatacctttatccgggaataaatggagttccgcctgtttacataatgtcggtgggcaattcgttgttcgagactctccacaaaaactggatacctcgcgccattcctttcggtgaaccatcttggatcgacctcaattttaatgtgggcgacactgccgaaattccactactcaaagggctaacgatgctcgcccgtaaagtttggttggcagaaacggagagccatcaaacttgctacaactgtggagtaaaatccgatacgattatccgcagttgtgaatttcaatcgccaggtaagcaggaaactgccctttggagagacccacacgcactttatctcagtagcacttctcaaaaatcgataaaagcacctgatccggtttcggctggaaaatttaagatggatcgacccttatggaaattacttgcacctgttatcgaagccgctaaaacgatttatccaacttcgaccacttttgctatcatcggtctcggtacagataatgcgaagtatgtcgatgtttgggaacgaattgttgagttaccatcaaataattcagtacccgaagcagcggtgtctacggttgagcaatggcagaaagagacatcgaacaacgaattcgtaaagcgtctgcctaagacgatgcgagtgaaacggaaactcgatcacctgaaagcaacctacgattccaatcgtcctcatgtcgagcatgccgtctcaacagctgttgggaatcttctatccgggggtgaaacggaatggcaaaacgcagcatcggaatatcgtccaatgcaggagatgatcgcgaaatcactcgcacccggcgctacactaacagcgacgatacggcgaaagagtatcgcgaacgcattacccgatatgcgagcaaaacatgacccaccggagaaaacgaaacgtagaaagtcggctacagaatgagttcaaccaatgattttatcatggtcttacaaacattaaaagcaggtgacctaggactcttgcgaacccatgctaataaaggacttgaccagactgttgatgggttcgatctgtttaccggtttgtggtggccgctacggcaaaagaaccagtttgcaccgcgacgggaagtcgcgtggttgatcgctaaactatatgcaaagtgtcccattgaacatcagtctgattgtttgtttgcacaccaactacagcgatgcgaaccaagagaagaacgtgcgcgaaaccggtttcgacagaaattcgatgaactgataaccactcccttggagcaaatcgagcccacattgcgaagagcgcttcaagaaatttcttcccatgaattgaaactcgactgggtaaaactgaccgatgatctctccttttgggaacaggagaccaagcatcaggaatggataaaccaatatctcagcatcaacgaaagggtacaaccatgttgatcgaaattcacatgatccagaaccacagcccggcgaatcttaatagggacgacctcggcgcaccaaaaacctgttatttcggtggtgtattacgctcgcgcatctcgagtcaatgcatcaagcgaagtattcggatgagtccagagtttgcgaaactgttaggaggagtaagaacgcgcgatctcgctaagaggattcttgacaagatcgaaggtgatgcaaacgacaaaaaacgagtcgaaggcattctcaaagtttgcggtttcaaaccaaagactgaatcaaaagcgaagaaaccgcgcaccactgcaggcgaagaaggagagaccgatgaatccgatgaaaccagtcagagaagcaaggcaccgctcttcgtgacccaacaagccattgagaagattgtgaatctcttccaatcaaggaacagcaaatctgatgatgagttagcaaaagaatttgcgaaagcaatcgctctttacacacaagcgcccgatatggcactaagtggacgtatgcttgaacccgacaaatctgcgaagaaaatttgggaaaaactagaaaagaatgtcgaggcatcgttgcaaacggctcacgctatatcgacccacgccgcctttcctgaaactgattacttcgtggcaatgggagacgaaacacgcgaggaaaaagaagaagctggtgccgatttaatcggtgaacaactatttgcttccgcgtgtttctacaaatatttctccattaattttgagcaacttgtagagaatctcggcgataacaaacaattagccgctcatacagtaggcacatttattcgcactgccgcagtagtaaatccgagtgggaagcaaaacagtttcgccgcgaacaatcctcccgatgggatactcatcgagatcaaaggcacgccaatcagctatgccaacgcctttgcgaatccagtgccagccaaaggggaacgggaaatcatttcacaaagtatcgctcaattaggtcaatatatgcatgaccttgatactgggtttggcatccctaaacagcgcttctggttttcacccaatcttcgctatcccctctacgtggttgaaaacaaacaagagatcgcactaaccgaccataatatcaagtcacttgatgaactgataccaatggttatagctgcaatcggtttcgactggaacgaggtacaacaggcaatcgttaacaacgaggcatagcatgagcgatctgcccaatacgctctttctccgcctagaaagttccatgcaatcatggggtgtacacgaatcgaaattcgtagttcgacgaactgccgaagcgccgacgaaatcgggagtcatcggattgttctgtgctgcgctaggtattacccgtcaacaagcgccggacgagtggttaccgaaactaagtgaacttcgaattggtgtacgaattgatgtaccgggaattcgctggtgggattaccacaccgtcggtgccgaaatgcaaatgcgaaccgcaaagggagaatgtaagtcgggagcaatgctcacccgacgcgagtacctttgcgatgccagttttttggtagtattgcagggcgacccatctctcattcaagagttagaaaaagcggtcaaatacccacagtggacactctaccttggtcgcaaatgctgtgttccgtcgcgaccattgttggaacatccggctgggttctttcccgatccgctctctgcgttaagttcgattccgtggcggaaacgactcaaacgtgataacgaacccaaaaagaacctcgtctgcctgatcgactggcaacccacttcggaacaacccgacgcccctgacgatgcacaggtctggtacgatataccggttagtttcgatccgccctcgcatcgacctcgattcgtcattcgtgaagagttgactgttggcgaacatgggcagataagcattgcaaatgaaccattgcagcacgaaacaccgcgaccaccaagaccccgcgccgattacactaatacgaaatacaaagcgaaaagacgcgaacggctatctcaggatcagcatctctgcgtcttctgcaaatctccggcaaccaccgtgcaacatattacctatcgacacgcgggaggcgaagaaaagcccgacgaattgcgttcgctttgtcgactttgccatgatgccgtgacgatgatcgagtatggggtcgggatgggattagatcgcatcaatcccgaagaggaacgttggcgtgaacttatcatcgaaaaacgctctgaaattgtcgcattccgttcattggaaacccgtcgtcgtcggctatccatcgaggaggtagagtgatgtatcattccaatctcatgatcgatgtcggcgataatccagaccgacctcgccccggtcgtttatggttgcgtaacatctatcacgttcatcaacgattgtcgatggcatttcccatgtccacgacgcaaaaagtcgatccgaattttcttctcccattcgatccaaacgggtttgaccgctctcgttttctcttccgtatcgatcaaatcgttcgagataattatcaacagacgatcatcattgtccaatcggaaacggagccagattggaagtatgcgttccacaacttagatatggttctagcagcaccaataaagccatacgagtacactcctgcatttcagaatggggacattcgtagatttcggattcgtgtcaatccgacgaaaaagagtgctacctacggatcgaatggtgcagatagaaacccttcttccaagtcgcaagggaaacgtgttactctttgggacaaagagacaaaaccaacagatgcgatccttgattggtttgctcgcaaaggatcgcagaaaggtttttctgtcggtagttgcgatgtcgtgaacttgggatgggtagttggtaaaaaaccgaacggaaagggtgacgaacacgtcatgcgctttcgttctgcattgttggaaggaaaactgactgtcaccgatgctatggaatttcatgctgcgataaatgcaggaattggatcggcgaagggattcggatttggtctactttctgtcttcccaattggagatcaccaatgaacgatctccgtgccctacctaaattacgtgatggtttatcgtatgcatacttcgaacattgccgggtcgaacaagacgaaatgtcgattgcggtttggacgaaagaaggaatcatacccgtacctgctgcttcacttggtgtattgttgttgggtcccggctcaacgattacccacgcggcagtgaaagcgcttgctgacaatggttgtatggtattgtggacgggtgaaggcgcgatccggttttatgcgaccggtatcggtgaaacccggaaaggagggcacctcgaacgacaagcggcactgtgggctgaccctgagtcacacgaacgaatcgtgcttcgaatgtaccggatgcgtttccgaaaacgattaccgaagggtttatcattggaacaaattcggggaatggaaggtgttcgtgtacgcgaagcgtatgcgattgcctcgaacgaaaccggtgtggagtgggtcggtcgaagctatgaccggaaccattgggagaattccgatccagtcaatcgcgcactttcggcagcaaatgcctgcctttattcgttgtgccatactgccatcgtgagtggcggctatactcccggtcttggtttcgtccatgtcggtaaagcgctctcattcgtgtacgatattggcgatctatacaaggttgagacgacgatcccactctcgtttcgcgtcgtacaggaatccactgacaacttggaaagtcgggtgcggcatctctgtcgagattacttccacgagtacaaattattagaacgtattttacctgatatcgaccgtttgtttgatttcaacttggacgacgaatctttcggttgggatatcgatgaagacccggcacgtccaactccgtattggaacccaccggaagtggaaaaggaattgacaaatggtagtgatgattcttgagaaggttcctgcgtcattgcgcggtgaattgacacgatggctgttcgaagcaaagaccggtgtctttatcggaaaggtttccgcgatagtccgcgataagctttgggatctttgtgtgggtcgtcgtggaacaccagcggtcattcaaatctggaacgacaacaatgagcaagggttttcgttgcggtcgaatggcgatacatcaaggaattttcaggaaaaagaaggattgtggtttgctgtaaagcatcttcctaaagaggatgcagttgccactgatacttaacacccttttcgtgatctaacttcaatgattacgaagggtaatccccacgcgcgtggggatgaaccgttgaacactccaattttatcaaaactgttgaggtaatccccacgcgcgtggggatgaaccggcgttaaaattccgcgcgttcgacattgaattgtaatccccacgcgcgtggggatgaaccggttgttccgatacgatacttcaataatttaggagtaatccccacgcgcgtggggatgaaccgagcaatagcgttctgaagtctctccggttcgcgtaatccccacgcgcgtggggatgaaccgaatattatagcgaccgcctcaaattttgttgtggtaatccccacgcgcgtggggatgaaccgaaaaatccacgaacacgaccaacacaatactgtgtaatccccacgcgcgtggggatgaaccggacgagctatcggccgcattccggttggccgcagtaatccccacgcgcgtggggatgaaccgttttgaccgcacatataataaatg

SEQ ID NO: 963 - DNA, 105115 bp, Artificial Sequence
  Synthetic Oligonucleotide
  misc_feature (1)..(39945): n is a, c, g, or t
nnnnnnnnnnnnnnnnnnnnnnnnnnnnnnnnnnnnnnnnnnnnnnnnnnnnnnnnnnnnnnnnnnnnnnnnnnnnnnnnnnnnnnnnnnnnnnnnnnnnnnnnnnnnnnnnnnnnnnnnnnnnnnnnnnnnnnnnnnnnnnnnnnnnnnnnnnnnnnnnnnnnnnnnnnnnnnnnnnnnnnnnnnnnnnnnnnnnnnnnnnnnnnnnnnnnnnnnnnnnnnnnnnnnnnnnnnnnnnnnnnnnnnnnnnnnnnnnnnnnnnnnnnnnnnnnnnnnnnnnnnnnnnnnnnnnnnnnnnnnnnnnnnnnnnnnnnnnnnnnnnnnnnnnnnnnnnnnnnnnnnnnnnnnnnnnnnnnnnnnnnnnnnnnnnnnnnnnnnnnnnnnnnnnnnnnnnnnnnnnnnnnnnnnnnnnnnnnnnnnnnnnnnnnnnnnnnnnnnnnnnnnnnnnnnnnnnnnnnnnnnnnnnnnnnnnnnnnnnnnnnnnnnnnnnnnnnnnnnnnnnnnnnnnnnnnnnnnnnnnnnnnnnnnnnnnnnnnnnnnnnnnnnnnnnnnnnnnnnnnnnnnnnnnnnnnnnnnnnnnnnnnnnnnnnnnnnnnnnnnnnnnnnnnnnnnnnnnnnnnnnnnnnnnnnnnnnnnnnnnnnnnnnnnnnnnnnnnnnnnnnnnnnnnnnnnnnnnnnnnnnnnnnnnnnnnnnnnnnnnnnnnnnnnnnnnnnnnnnnnnnnnnnnnnnnnnnnnnnnnnnnnnnnnnnnnnnnnnnnnnnnnnnnnnnnnnnnnnnnnnnnnnnnnnnnnnnnnnnnnnnnnnnnnnnnnnnnnnnnnnnnnnnnnnnnnnnnnnnnnnnnnnnnnnnnnnnnnnnnnnnnnnnnnnnnnnnnnnnnnnnnnnnnnnnnnnnnnnnnnnnnnnnnnnnnnnnnnnnnnnnnnnnnnnnnnnnnnnnnnnnnnnnnnnnnnnnnnnnnnnnnnnnnnnnnnnnnnnnnnnnnnnnnnnnnnnnnnnnnnnnnnnnnnnnnnnnnnnnnnnnnnnnnnnnnnnnnnnnnnnnnnnnnnnnnnnnnnnnnnnnnnnnnnnnnnnnnnnnnnnnnnnnnnnnnnnnnnnnnnnnnnnnnnnnnnnnnnnnnnnnnnnnnnnnnnnnnnnnnnnnnnnnnnnnnnnnnnnnnnnnnnnnnnnnnnnnnnnnnnnnnnnnnnnnnnnnnnnnnnnnnnnnnnnnnnnnnnnnnnnnnnnnnnnnnnnnnnnnnnnnnnnnnnnnnnnnnnnnnnnnnnnnnnnnnnnnnnnnnnnnnnnnnnnnnnnnnnnnnnnnnnnnnnnnnnnnnnnnnnnnnnnnnnnnnnnnnnnnnnnnnnnnnnnnnnnnnnnnnnnnnnnnnnnnnnnnnnnnnnnnnnnnnnnnnnnnnnnnnnnnnnnnnnnnnnnnnnnnnnnnnnnnnnnnnnnnnnnnnnnnnnnnnnnnnnnnnnnnnnnnnnnnnnnnnnnnnnnnnnnnnnnnnnnnnnnnnnnnnnnnnnnnnnnnnnnnnnnnnnnnnnnnnnnnnnnnnnnnnnnnnnnnnnnnnnnnnnnnnnnnnnnnnnnnnnnnnnnnnnnnnnnnnnnnnnnnnnnnnnnnnnnnnnnnnnnnnnnnnnnnnnnnnnnnnnnnnnnnnnnnnnnnnnnnnnnnnnnnnnnnnnnnnnnnnnnnnnnnnnnnnnnnnnnnnnnnnnnnnnnnnnnnnnnnnnnnnnnnnnnnnnnnnnnnnnnnnnnnnnnnnnnnnnnnnnnnnnnnnnnnnnnnnnnnnnnnnnnnnnnnnnnnnnnnnnnnnnnnnnnnnnnnnnnnnnnnnnnnnnnnnnnnnnnnnnnnnnnnnnnnnnnnnnnnnnnnnnnnnnnnnnnnnnnnnnnnnnnnnnnnnnnnnnnnnnnnnnnnnnnnnnnnnnnnnnnnnnnnnnnnnnnnnnnnnnnnnnnnnnnnnnnnnnnnnnnnnnnnnnnnnnnnnnnnnnnnnnnnnnnnnnnnnnnnnnnnnnnnnnnnnnnnnnnnnnnnnnnnnnnnnnnnnnnnnnnnnnnnnnnnnnnnnnnnnnnnnnnnnnnnnnnnnnnnnnnnnnnnnnnnnnnnnnnnnnnnnnnnnnnnnnnnnnnnnnnnnnnnnnnnnnnnnnnnnnnnnnnnnnnnnnnnnnnnnnnnnnnnnnnnnnnnnnnnnnnnnnnnnnnnnnnnnnnnnnnnnnnnnnnnnnnnnnnnnnnnnnnnnnnnnnnnnnnnnnnnnnnnnnnnnnnnnnnnnnnnnnnnnnnnnnnnnnnnnnnnnnnnnnnnnnnnnnnnnnnnnnnnnnnnnnnnnnnnnnnnnnnnnnnnnnnnnnnnnnnnnnnnnnnnnnnnnnnnnnnnnnnnnnnnnnnnnnnnnnnnnnnnnnnnnnnnnnnnnnnnnnnnnnnnnnnnnnnnnnnnnnnnnnnnnnnnnnnnnnnnnnnnnnnnnnnnnnnnnnnnnnnnnnnnnnnnnnnnnnnnnnnnnnnnnnnnnnnnnnnnnnnnnnnnnnnnnnnnnnnnnnnnnnnnnnnnnnnnnnnnnnnnnnnnnnnnnnnnnnnnnnnnnnnnnnnnnnnnnnnnnnnnnnnnnnnnnnnnnnnnnnnnnnnnnnnnnnnnnnnnnnnnnnnnnnnnnnnnnnnnnnnnnnnnnnnnnnnnnnnnnnnnnnnnnnnnnnnnnnnnnnnnnnnnnnnnnnnnnnnnnnnnnnnnnnnnnnnnnnnnnnnnnnnnnnnnnnnnnnnnnnnnnnnnnnnnnnnnnnnnnnnnnnnnnnnnnnnnnnnnnnnnnnnnnnnnnnnnnnnnnnnnnnnnnnnnnnnnnnnnnnnnnnnnnnnnnnnnnnnnnnnnnnnnnnnnnnnnnnnnnnnnnnnnnnnnnnnnnnnnnnnnnnnnnnnnnnnnnnnnnnnnnnnnnnnnnnnnnnnnnnnnnnnnnnnnnnnnnnnnnnnnnnnnnnnnnnnnnnnnnnnnnnnnnnnnnnnnnnnnnnnnnnnnnnnnnnnnnnnnnnnnnnnnnnnnnnnnnnnnnnnnnnnnnnnnnnnnnnnnnnnnnnnnnnnnnnnnnnnnnnnnnnnnnnnnnnnnnnnnnnnnnnnnnnnnnnnnnnnnnnnnnnnnnnnnnnnnnnnnnnnnnnnnnnnnnnnnnnnnnnnnnnnnnnnnnnnnnnnnnnnnnnnnnnnnnnnnnnnnnnnnnnnnnnnnnnnnnnnnnnnnnnnnnnnnnnnnnnnnnnnnnnnnnnnnnnnnnnnnnnnnnnnnnnnnnnnnnnnnnnnnnnnnnnnnnnnnnnnnnnnnnnnnnnnnnnnnnnnnnnnnnnnnnnnnnnnnnnnnnnnnnnnnnnnnnnnnnnnnnnnnnnnnnnnnnnnnnnnnnnnnnnnnnnnnnnnnnnnnnnnnnnnnnnnnnnnnnnnnnnnnnnnnnnnnnnnnnnnnnnnnnnnnnnnnnnnnnnnnnnnnnnnnnnnnnnnnnnnnnnnnnnnnnnnnnnnnnnnnnnnnnnnnnnnnnnnnnnnnnnnnnnnnnnnnnnnnnnnnnnnnnnnnnnnnnnnnnnnnnnnnnnnnnnnnnnnnnnnnnnnnnnnnnnnnnnnnnnnnnnnnnnnnnnnnnnnnnnnnnnnnnnnnnnnnnnnnnnnnnnnnnnnnnnnnnnnnnnnnnnnnnnnnnnnnnnnnnnnnnnnnnnnnnnnnnnnnnnnnnnnnnnnnnnnnnnnnnnnnnnnnnnnnnnnnnnnnnnnnnnnnnnnnnnnnnnnnnnnnnnnnnnnnnnnnnnnnnnnnnnnnnnnnnnnnnnnnnnnnnnnnnnnnnnnnnnnnnnnnnnnnnnnnnnnnnnnnnnnnnnnnnnnnnnnnnnnnnnnnnnnnnnnnnnnnnnnnnnnnnnnnnnnnnnnnnnnnnnnnnnnnnnnnnnnnnnnnnnnnnnnnnnnnnnnnnnnnnnnnnnnnnnnnnnnnnnnnnnnnnnnnnnnnnnnnnnnnnnnnnnnnnnnnnnnnnnnnnnnnnnnnnnnnnnnnnnnnnnnnnnnnnnnnnnnnnnnnnnnnnnnnnnnnnnnnnnnnnnnnnnnnnnnnnnnnnnnnnnnnnnnnnnnnnnnnnnnnnnnnnnnnnnnnnnnnnnnnnnnnnnnnnnnnnnnnnnnnnnnnnnnnnnnnnnnnnnnnnnnnnnnnnnnnnnnnnnnnnnnnnnnnnnnnnnnnnnnnnnnnnnnnnnnnnnnnnnnnnnnnnnnnnnnnnnnnnnnnnnnnnnnnnnnnnnnnnnnnnnnnnnnnnnnnnnnnnnnnnnnnnnnnnnnnnnnnnnnnnnnnnnnnnnnnnnnnnnnnnnnnnnnnnnnnnnnnnnnnnnnnnnnnnnnnnnnnnnnnnnnnnnnnnnnnnnnnnnnnnnnnnnnnnnnnnnnnnnnnnnnnnnnnnnnnnnnnnnnnnnnnnnnnnnnnnnnnnnnnnnnnnnnnnnnnnnnnnnnnnnnnnnnnnnnnnnnnnnnnnnnnnnnnnnnnnnnnnnnnnnnnnnnnnnnnnnnnnnnnnnnnnnnnnnnnnnnnnnnnnnnnnnnnnnnnnnnnnnnnnnnnnnnnnnnnnnnnnnnnnnnnnnnnnnnnnnnnnnnnnnnnnnnnnnnnnnnnnnnnnnnnnnnnnnnnnnnnnnnnnnnnnnnnnnnnnnnnnnnnnnnnnnnnnnnnnnnnnnnnnnnnnnnnnnnnnnnnnnnnnnnnnnnnnnnnnnnnnnnnnnnnnnnnnnnnnnnnnnnnnnnnnnnnnnnnnnnnnnnnnnnnnnnnnnnnnnnnnnnnnnnnnnnnnnnnnnnnnnnnnnnnnnnnnnnnnnnnnnnnnnnnnnnnnnnnnnnnnnnnnnnnnnnnnnnnnnnnnnnnnnnnnnnnnnnnnnnnnnnnnnnnnnnnnnnnnnnnnnnnnnnnnnnnnnnnnnnnnnnnnnnnnnnnnnnnnnnnnnnnnnnnnnnnnnnnnnnnnnnnnnnnnnnnnnnnnnnnnnnnnnnnnnnnnnnnnnnnnnnnnnnnnnnnnnnnnnnnnnnnnnnnnnnnnnnnnnnnnnnnnnnnnnnnnnnnnnnnnnnnnnnnnnnnnnnnnnnnnnnnnnnnnnnnnnnnnnnnnnnnnnnnnnnnnnnnnnnnnnnnnnnnnnnnnnnnnnnnnnnnnnnnnnnnnnnnnnnnnnnnnnnnnnnnnnnnnnnnnnnnnnnnnnnnnnnnnnnnnnnnnnnnnnnnnnnnnnnnnnnnnnnnnnnnnnnnnnnnnnnnnnnnnnnnnnnnnnnnnnnnnnnnnnnnnnnnnnnnnnnnnnnnnnnnnnnnnnnnnnnnnnnnnnnnnnnnnnnnnnnnnnnnnnnnnnnnnnnnnnnnnnnnnnnnnnnnnnnnnnnnnnnnnnnnnnnnnnnnnnnnnnnnnnnnnnnnnnnnnnnnnnnnnnnnnnnnnnnnnnnnnnnnnnnnnnnnnnnnnnnnnnnnnnnnnnnnnnnnnnnnnnnnnnnnnnnnnnnnnnnnnnnnnnnnnnnnnnnnnnnnnnnnnnnnnnnnnnnnnnnnnnnnnnnnnnnnnnnnnnnnnnnnnnnnnnnnnnnnnnnnnnnnnnnnnnnnnnnnnnnnnnnnnnnnnnnnnnnnnnnnnnnnnnnnnnnnnnnnnnnnnnnnnnnnnnnnnnnnnnnnnnnnnnnnnnnnnnnnnnnnnnnnnnnnnnnnnnnnnnnnnnnnnnnnnnnnnnnnnnnnnnnnnnnnnnnnnnnnnnnnnnnnnnnnnnnnnnnnnnnnnnnnnnnnnnnnnnnnnnnnnnnnnnnnnnnnnnnnnnnnnnnnnnnnnnnnnnnnnnnnnnnnnnnnnnnnnnnnnnnnnnnnnnnnnnnnnnnnnnnnnnnnnnnnnnnnnnnnnnnnnnnnnnnnnnnnnnnnnnnnnnnnnnnnnnnnnnnnnnnnnnnnnnnnnnnnnnnnnnnnnnnnnnnnnnnnnnnnnnnnnnnnnnnnnnnnnnnnnnnnnnnnnnnnnnnnnnnnnnnnnnnnnnnnnnnnnnnnnnnnnnnnnnnnnnnnnnnnnnnnnnnnnnnnnnnnnnnnnnnnnnnnnnnnnnnnnnnnnnnnnnnnnnnnnnnnnnnnnnnnnnnnnnnnnnnnnnnnnnnnnnnnnnnnnnnnnnnnnnnnnnnnnnnnnnnnnnnnnnnnnnnnnnnnnnnnnnnnnnnnnnnnnnnnnnnnnnnnnnnnnnnnnnnnnnnnnnnnnnnnnnnnnnnnnnnnnnnnnnnnnnnnnnnnnnnnnnnnnnnnnnnnnnnnnnnnnnnnnnnnnnnnnnnnnnnnnnnnnnnnnnnnnnnnnnnnnnnnnnnnnnnnnnnnnnnnnnnnnnnnnnnnnnnnnnnnnnnnnnnnnnnnnnnnnnnnnnnnnnnnnnnnnnnnnnnnnnnnnnnnnnnnnnnnnnnnnnnnnnnnnnnnnnnnnnnnnnnnnnnnnnnnnnnnnnnnnnnnnnnnnnnnnnnnnnnnnnnnnnnnnnnnnnnnnnnnnnnnnnnnnnnnnnnnnnnnnnnnnnnnnnnnnnnnnnnnnnnnnnnnnnnnnnnnnnnnnnnnnnnnnnnnnnnnnnnnnnnnnnnnnnnnnnnnnnnnnnnnnnnnnnnnnnnnnnnnnnnnnnnnnnnnnnnnnnnnnnnnnnnnnnnnnnnnnnnnnnnnnnnnnnnnnnnnnnnnnnnnnnnnnnnnnnnnnnnnnnnnnnnnnnnnnnnnnnnnnnnnnnnnnnnnnnnnnnnnnnnnnnnnnnnnnnnnnnnnnnnnnnnnnnnnnnnnnnnnnnnnnnnnnnnnnnnnnnnnnnnnnnnnnnnnnnnnnnnnnnnnnnnnnnnnnnnnnnnnnnnnnnnnnnnnnnnnnnnnnnnnnnnnnnnnnnnnnnnnnnnnnnnnnnnnnnnnnnnnnnnnnnnnnnnnnnnnnnnnnnnnnnnnnnnnnnnnnnnnnnnnnnnnnnnnnnnnnnnnnnnnnnnnnnnnnnnnnnnnnnnnnnnnnnnnnnnnnnnnnnnnnnnnnnnnnnnnnnnnnnnnnnnnnnnnnnnnnnnnnnnnnnnnnnnnnnnnnnnnnnnnnnnnnnnnnnnnnnnnnnnnnnnnnnnnnnnnnnnnnnnnnnnnnnnnnnnnnnnnnnnnnnnnnnnnnnnnnnnnnnnnnnnnnnnnnnnnnnnnnnnnnnnnnnnnnnnnnnnnnnnnnnnnnnnnnnnnnnnnnnnnnnnnnnnnnnnnnnnnnnnnnnnnnnnnnnnnnnnnnnnnnnnnnnnnnnnnnnnnnnnnnnnnnnnnnnnnnnnnnnnnnnnnnnnnnnnnnnnnnnnnnnnnnnnnnnnnnnnnnnnnnnnnnnnnnnnnnnnnnnnnnnnnnnnnnnnnnnnnnnnnnnnnnnnnnnnnnnnnnnnnnnnnnnnnnnnnnnnnnnnnnnnnnnnnnnnnnnnnnnnnnnnnnnnnnnnnnnnnnnnnnnnnnnnnnnnnnnnnnnnnnnnnnnnnnnnnnnnnnnnnnnnnnnnnnnnnnnnnnnnnnnnnnnnnnnnnnnnnnnnnnnnnnnnnnnnnnnnnnnnnnnnnnnnnnnnnnnnnnnnnnnnnnnnnnnnnnnnnnnnnnnnnnnnnnnnnnnnnnnnnnnnnnnnnnnnnnnnnnnnnnnnnnnnnnnnnnnnnnnnnnnnnnnnnnnnnnnnnnnnnnnnnnnnnnnnnnnnnnnnnnnnnnnnnnnnnnnnnnnnnnnnnnnnnnnnnnnnnnnnnnnnnnnnnnnnnnnnnnnnnnnnnnnnnnnnnnnnnnnnnnnnnnnnnnnnnnnnnnnnnnnnnnnnnnnnnnnnnnnnnnnnnnnnnnnnnnnnnnnnnnnnnnnnnnnnnnnnnnnnnnnnnnnnnnnnnnnnnnnnnnnnnnnnnnnnnnnnnnnnnnnnnnnnnnnnnnnnnnnnnnnnnnnnnnnnnnnnnnnnnnnnnnnnnnnnnnnnnnnnnnnnnnnnnnnnnnnnnnnnnnnnnnnnnnnnnnnnnnnnnnnnnnnnnnnnnnnnnnnnnnnnnnnnnnnnnnnnnnnnnnnnnnnnnnnnnnnnnnnnnnnnnnnnnnnnnnnnnnnnnnnnnnnnnnnnnnnnnnnnnnnnnnnnnnnnnnnnnnnnnnnnnnnnnnnnnnnnnnnnnnnnnnnnnnnnnnnnnnnnnnnnnnnnnnnnnnnnnnnnnnnnnnnnnnnnnnnnnnnnnnnnnnnnnnnnnnnnnnnnnnnnnnnnnnnnnnnnnnnnnnnnnnnnnnnnnnnnnnnnnnnnnnnnnnnnnnnnnnnnnnnnnnnnnnnnnnnnnnnnnnnnnnnnnnnnnnnnnnnnnnnnnnnnnnnnnnnnnnnnnnnnnnnnnnnnnnnnnnnnnnnnnnnnnnnnnnnnnnnnnnnnnnnnnnnnnnnnnnnnnnnnnnnnnnnnnnnnnnnnnnnnnnnnnnnnnnnnnnnnnnnnnnnnnnnnnnnnnnnnnnnnnnnnnnnnnnnnnnnnnnnnnnnnnnnnnnnnnnnnnnnnnnnnnnnnnnnnnnnnnnnnnnnnnnnnnnnnnnnnnnnnnnnnnnnnnnnnnnnnnnnnnnnnnnnnnnnnnnnnnnnnnnnnnnnnnnnnnnnnnnnnnnnnnnnnnnnnnnnnnnnnnnnnnnnnnnnnnnnnnnnnnnnnnnnnnnnnnnnnnnnnnnnnnnnnnnnnnnnnnnnnnnnnnnnnnnnnnnnnnnnnnnnnnnnnnnnnnnnnnnnnnnnnnnnnnnnnnnnnnnnnnnnnnnnnnnnnnnnnnnnnnnnnnnnnnnnnnnnnnnnnnnnnnnnnnnnnnnnnnnnnnnnnnnnnnnnnnnnnnnnnnnnnnnnnnnnnnnnnnnnnnnnnnnnnnnnnnnnnnnnnnnnnnnnnnnnnnnnnnnnnnnnnnnnnnnnnnnnnnnnnnnnnnnnnnnnnnnnnnnnnnnnnnnnnnnnnnnnnnnnnnnnnnnnnnnnnnnnnnnnnnnnnnnnnnnnnnnnnnnnnnnnnnnnnnnnnnnnnnnnnnnnnnnnnnnnnnnnnnnnnnnnnnnnnnnnnnnnnnnnnnnnnnnnnnnnnnnnnnnnnnnnnnnnnnnnnnnnnnnnnnnnnnnnnnnnnnnnnnnnnnnnnnnnnnnnnnnnnnnnnnnnnnnnnnnnnnnnnnnnnnnnnnnnnnnnnnnnnnnnnnnnnnnnnnnnnnnnnnnnnnnnnnnnnnnnnnnnnnnnnnnnnnnnnnnnnnnnnnnnnnnnnnnnnnnnnnnnnnnnnnnnnnnnnnnnnnnnnnnnnnnnnnnnnnnnnnnnnnnnnnnnnnnnnnnnnnnnnnnnnnnnnnnnnnnnnnnnnnnnnnnnnnnnnnnnnnnnnnnnnnnnnnnnnnnnnnnnnnnnnnnnnnnnnnnnnnnnnnnnnnnnnnnnnnnnnnnnnnnnnnnnnnnnnnnnnnnnnnnnnnnnnnnnnnnnnnnnnnnnnnnnnnnnnnnnnnnnnnnnnnnnnnnnnnnnnnnnnnnnnnnnnnnnnnnnnnnnnnnnnnnnnnnnnnnnnnnnnnnnnnnnnnnnnnnnnnnnnnnnnnnnnnnnnnnnnnnnnnnnnnnnnnnnnnnnnnnnnnnnnnnnnnnnnnnnnnnnnnnnnnnnnnnnnnnnnnnnnnnnnnnnnnnnnnnnnnnnnnnnnnnnnnnnnnnnnnnnnnnnnnnnnnnnnnnnnnnnnnnnnnnnnnnnnnnnnnnnnnnnnnnnnnnnnnnnnnnnnnnnnnnnnnnnnnnnnnnnnnnnnnnnnnnnnnnnnnnnnnnnnnnnnnnnnnnnnnnnnnnnnnnnnnnnnnnnnnnnnnnnnnnnnnnnnnnnnnnnnnnnnnnnnnnnnnnnnnnnnnnnnnnnnnnnnnnnnnnnnnnnnnnnnnnnnnnnnnnnnnnnnnnnnnnnnnnnnnnnnnnnnnnnnnnnnnnnnnnnnnnnnnnnnnnnnnnnnnnnnnnnnnnnnnnnnnnnnnnnnnnnnnnnnnnnnnnnnnnnnnnnnnnnnnnnnnnnnnnnnnnnnnnnnnnnnnnnnnnnnnnnnnnnnnnnnnnnnnnnnnnnnnnnnnnnnnnnnnnnnnnnnnnnnnnnnnnnnnnnnnnnnnnnnnnnnnnnnnnnnnnnnnnnnnnnnnnnnnnnnnnnnnnnnnnnnnnnnnnnnnnnnnnnnnnnnnnnnnnnnnnnnnnnnnnnnnnnnnnnnnnnnnnnnnnnnnnnnnnnnnnnnnnnnnnnnnnnnnnnnnnnnnnnnnnnnnnnnnnnnnnnnnnnnnnnnnnnnnnnnnnnnnnnnnnnnnnnnnnnnnnnnnnnnnnnnnnnnnnnnnnnnnnnnnnnnnnnnnnnnnnnnnnnnnnnnnnnnnnnnnnnnnnnnnnnnnnnnnnnnnnnnnnnnnnnnnnnnnnnnnnnnnnnnnnnnnnnnnnnnnnnnnnnnnnnnnnnnnnnnnnnnnnnnnnnnnnnnnnnnnnnnnnnnnnnnnnnnnnnnnnnnnnnnnnnnnnnnnnnnnnnnnnnnnnnnnnnnnnnnnnnnnnnnnnnnnnnnnnnnnnnnnnnnnnnnnnnnnnnnnnnnnnnnnnnnnnnnnnnnnnnnnnnnnnnnnnnnnnnnnnnnnnnnnnnnnnnnnnnnnnnnnnnnnnnnnnnnnnnnnnnnnnnnnnnnnnnnnnnnnnnnnnnnnnnnnnnnnnnnnnnnnnnnnnnnnnnnnnnnnnnnnnnnnnnnnnnnnnnnnnnnnnnnnnnnnnnnnnnnnnnnnnnnnnnnnnnnnnnnnnnnnnnnnnnnnnnnnnnnnnnnnnnnnnnnnnnnnnnnnnnnnnnnnnnnnnnnnnnnnnnnnnnnnnnnnnnnnnnnnnnnnnnnnnnnnnnnnnnnnnnnnnnnnnnnnnnnnnnnnnnnnnnnnnnnnnnnnnnnnnnnnnnnnnnnnnnnnnnnnnnnnnnnnnnnnnnnnnnnnnnnnnnnnnnnnnnnnnnnnnnnnnnnnnnnnnnnnnnnnnnnnnnnnnnnnnnnnnnnnnnnnnnnnnnnnnnnnnnnnnnnnnnnnnnnnnnnnnnnnnnnnnnnnnnnnnnnnnnnnnnnnnnnnnnnnnnnnnnnnnnnnnnnnnnnnnnnnnnnnnnnnnnnnnnnnnnnnnnnnnnnnnnnnnnnnnnnnnnnnnnnnnnnnnnnnnnnnnnnnnnnnnnnnnnnnnnnnnnnnnnnnnnnnnnnnnnnnnnnnnnnnnnnnnnnnnnnnnnnnnnnnnnnnnnnnnnnnnnnnnnnnnnnnnnnnnnnnnnnnnnnnnnnnnnnnnnnnnnnnnnnnnnnnnnnnnnnnnnnnnnnnnnnnnnnnnnnnnnnnnnnnnnnnnnnnnnnnnnnnnnnnnnnnnnnnnnnnnnnnnnnnnnnnnnnnnnnnnnnnnnnnnnnnnnnnnnnnnnnnnnnnnnnnnnnnnnnnnnnnnnnnnnnnnnnnnnnnnnnnnnnnnnnnnnnnnnnnnnnnnnnnnnnnnnnnnnnnnnnnnnnnnnnnnnnnnnnnnnnnnnnnnnnnnnnnnnnnnnnnnnnnnnnnnnnnnnnnnnnnnnnnnnnnnnnnnnnnnnnnnnnnnnnnnnnnnnnnnnnnnnnnnnnnnnnnnnnnnnnnnnnnnnnnnnnnnnnnnnnnnnnnnnnnnnnnnnnnnnnnnnnnnnnnnnnnnnnnnnnnnnnnnnnnnnnnnnnnnnnnnnnnnnnnnnnnnnnnnnnnnnnnnnnnnnnnnnnnnnnnnnnnnnnnnnnnnnnnnnnnnnnnnnnnnnnnnnnnnnnnnnnnnnnnnnnnnnnnnnnnnnnnnnnnnnnnnnnnnnnnnnnnnnnnnnnnnnnnnnnnnnnnnnnnnnnnnnnnnnnnnnnnnnnnnnnnnnnnnnnnnnnnnnnnnnnnnnnnnnnnnnnnnnnnnnnnnnnnnnnnnnnnnnnnnnnnnnnnnnnnnnnnnnnnnnnnnnnnnnnnnnnnnnnnnnnnnnnnnnnnnnnnnnnnnnnnnnnnnnnnnnnnnnnnnnnnnnnnnnnnnnnnnnnnnnnnnnnnnnnnnnnnnnnnnnnnnnnnnnnnnnnnnnnnnnnnnnnnnnnnnnnnnnnnnnnnnnnnnnnnnnnnnnnnnnnnnnnnnnnnnnnnnnnnnnnnnnnnnnnnnnnnnnnnnnnnnnnnnnnnnnnnnnnnnnnnnnnnnnnnnnnnnnnnnnnnnnnnnnnnnnnnnnnnnnnnnnnnnnnnnnnnnnnnnnnnnnnnnnnnnnnnnnnnnnnnnnnnnnnnnnnnnnnnnnnnnnnnnnnnnnnnnnnnnnnnnnnnnnnnnnnnnnnnnnnnnnnnnnnnnnnnnnnnnnnnnnnnnnnnnnnnnnnnnnnnnnnnnnnnnnnnnnnnnnnnnnnnnnnnnnnnnnnnnnnnnnnnnnnnnnnnnnnnnnnnnnnnnnnnnnnnnnnnnnnnnnnnnnnnnnnnnnnnnnnnnnnnnnnnnnnnnnnnnnnnnnnnnnnnnnnnnnnnnnnnnnnnnnnnnnnnnnnnnnnnnnnnnnnnnnnnnnnnnnnnnnnnnnnnnnnnnnnnnnnnnnnnnnnnnnnnnnnnnnnnnnnnnnnnnnnnnnnnnnnnnnnnnnnnnnnnnnnnnnnnnnnnnnnnnnnnnnnnnnnnnnnnnnnnnnnnnnnnnnnnnnnnnnnnnnnnnnnnnnnnnnnnnnnnnnnnnnnnnnnnnnnnnnnnnnnnnnnnnnnnnnnnnnnnnnnnnnnnnnnnnnnnnnnnnnnnnnnnnnnnnnnnnnnnnnnnnnnnnnnnnnnnnnnnnnnnnnnnnnnnnnnnnnnnnnnnnnnnnnnnnnnnnnnnnnnnnnnnnnnnnnnnnnnnnnnnnnnnnnnnnnnnnnnnnnnnnnnnnnnnnnnnnnnnnnnnnnnnnnnnnnnnnnnnnnnnnnnnnnnnnnnnnnnnnnnnnnnnnnnnnnnnnnnnnnnnnnnnnnnnnnnnnnnnnnnnnnnnnnnnnnnnnnnnnnnnnnnnnnnnnnnnnnnnnnnnnnnnnnnnnnnnnnnnnnnnnnnnnnnnnnnnnnnnnnnnnnnnnnnnnnnnnnnnnnnnnnnnnnnnnnnnnnnnnnnnnnnnnnnnnnnnnnnnnnnnnnnnnnnnnnnnnnnnnnnnnnnnnnnnnnnnnnnnnnnnnnnnnnnnnnnnnnnnnnnnnnnnnnnnnnnnnnnnnnnnnnnnnnnnnnnnnnnnnnnnnnnnnnnnnnnnnnnnnnnnnnnnnnnnnnnnnnnnnnnnnnnnnnnnnnnnnnnnnnnnnnnnnnnnnnnnnnnnnnnnnnnnnnnnnnnnnnnnnnnnnnnnnnnnnnnnnnnnnnnnnnnnnnnnnnnnnnnnnnnnnnnnnnnnnnnnnnnnnnnnnnnnnnnnnnnnnnnnnnnnnnnnnnnnnnnnnnnnnnnnnnnnnnnnnnnnnnnnnnnnnnnnnnnnnnnnnnnnnnnnnnnnnnnnnnnnnnnnnnnnnnnnnnnnnnnnnnnnnnnnnnnnnnnnnnnnnnnnnnnnnnnnnnnnnnnnnnnnnnnnnnnnnnnnnnnnnnnnnnnnnnnnnnnnnnnnnnnnnnnnnnnnnnnnnnnnnnnnnnnnnnnnnnnnnnnnnnnnnnnnnnnnnnnnnnnnnnnnnnnnnnnnnnnnnnnnnnnnnnnnnnnnnnnnnnnnnnnnnnnnnnnnnnnnnnnnnnnnnnnnnnnnnnnnnnnnnnnnnnnnnnnnnnnnnnnnnnnnnnnnnnnnnnnnnnnnnnnnnnnnnnnnnnnnnnnnnnnnnnnnnnnnnnnnnnnnnnnnnnnnnnnnnnnnnnnnnnnnnnnnnnnnnnnnnnnnnnnnnnnnnnnnnnnnnnnnnnnnnnnnnnnnnnnnnnnnnnnnnnnnnnnnnnnnnnnnnnnnnnnnnnnnnnnnnnnnnnnnnnnnnnnnnnnnnnnnnnnnnnnnnnnnnnnnnnnnnnnnnnnnnnnnnnnnnnnnnnnnnnnnnnnnnnnnnnnnnnnnnnnnnnnnnnnnnnnnnnnnnnnnnnnnnnnnnnnnnnnnnnnnnnnnnnnnnnnnnnnnnnnnnnnnnnnnnnnnnnnnnnnnnnnnnnnnnnnnnnnnnnnnnnnnnnnnnnnnnnnnnnnnnnnnnnnnnnnnnnnnnnnnnnnnnnnnnnnnnnnnnnnnnnnnnnnnnnnnnnnnnnnnnnnnnnnnnnnnnnnnnnnnnnnnnnnnnnnnnnnnnnnnnnnnnnnnnnnnnnnnnnnnnnnnnnnnnnnnnnnnnnnnnnnnnnnnnnnnnnnnnnnnnnnnnnnnnnnnnnnnnnnnnnnnnnnnnnnnnnnnnnnnnnnnnnnnnnnnnnnnnnnnnnnnnnnnnnnnnnnnnnnnnnnnnnnnnnnnnnnnnnnnnnnnnnnnnnnnnnnnnnnnnnnnnnnnnnnnnnnnnnnnnnnnnnnnnnnnnnnnnnnnnnnnnnnnnnnnnnnnnnnnnnnnnnnnnnnnnnnnnnnnnnnnnnnnnnnnnnnnnnnnnnnnnnnnnnnnnnnnnnnnnnnnnnnnnnnnnnnnnnnnnnnnnnnnnnnnnnnnnnnnnnnnnnnnnnnnnnnnnnnnnnnnnnnnnnnnnnnnnnnnnnnnnnnnnnnnnnnnnnnnnnnnnnnnnnnnnnnnnnnnnnnnnnnnnnnnnnnnnnnnnnnnnnnnnnnnnnnnnnnnnnnnnnnnnnnnnnnnnnnnnnnnnnnnnnnnnnnnnnnnnnnnnnnnnnnnnnnnnnnnnnnnnnnnnnnnnnnnnnnnnnnnnnnnnnnnnnnnnnnnnnnnnnnnnnnnnnnnnnnnnnnnnnnnnnnnnnnnnnnnnnnnnnnnnnnnnnnnnnnnnnnnnnnnnnnnnnnnnnnnnnnnnnnnnnnnnnnnnnnnnnnnnnnnnnnnnnnnnnnnnnnnnnnnnnnnnnnnnnnnnnnnnnnnnnnnnnnnnnnnnnnnnnnnnnnnnnnnnnnnnnnnnnnnnnnnnnnnnnnnnnnnnnnnnnnnnnnnnnnnnnnnnnnnnnnnnnnnnnnnnnnnnnnnnnnnnnnnnnnnnnnnnnnnnnnnnnnnnnnnnnnnnnnnnnnnnnnnnnnnnnnnnnnnnnnnnnnnnnnnnnnnnnnnnnnnnnnnnnnnnnnnnnnnnnnnnnnnnnnnnnnnnnnnnnnnnnnnnnnnnnnnnnnnnnnnnnnnnnnnnnnnnnnnnnnnnnnnnnnnnnnnnnnnnnnnnnnnnnnnnnnnnnnnnnnnnnnnnnnnnnnnnnnnnnnnnnnnnnnnnnnnnnnnnnnnnnnnnnnnnnnnnnnnnnnnnnnnnnnnnnnnnnnnnnnnnnnnnnnnnnnnnnnnnnnnnnnnnnnnnnnnnnnnnnnnnnnnnnnnnnnnnnnnnnnnnnnnnnnnnnnnnnnnnnnnnnnnnnnnnnnnnnnnnnnnnnnnnnnnnnnnnnnnnnnnnnnnnnnnnnnnnnnnnnnnnnnnnnnnnnnnnnnnnnnnnnnnnnnnnnnnnnnnnnnnnnnnnnnnnnnnnnnnnnnnnnnnnnnnnnnnnnnnnnnnnnnnnnnnnnnnnnnnnnnnnnnnnnnnnnnnnnnnnnnnnnnnnnnnnnnnnnnnnnnnnnnnnnnnnnnnnnnnnnnnnnnnnnnnnnnnnnnnnnnnnnnnnnnnnnnnnnnnnnnnnnnnnnnnnnnnnnnnnnnnnnnnnnnnnnnnnnnnnnnnnnnnnnnnnnnnnnnnnnnnnnnnnnnnnnnnnnnnnnnnnnnnnnnnnnnnnnnnnnnnnnnnnnnnnnnnnnnnnnnnnnnnnnnnnnnnnnnnnnnnnnnnnnnnnnnnnnnnnnnnnnnnnnnnnnnnnnnnnnnnnnnnnnnnnnnnnnnnnnnnnnnnnnnnnnnnnnnnnnnnnnnnnnnnnnnnnnnnnnnnnnnnnnnnnnnnnnnnnnnnnnnnnnnnnnnnnnnnnnnnnnnnnnnnnnnnnnnnnnnnnnnnnnnnnnnnnnnnnnnnnnnnnnnnnnnnnnnnnnnnnnnnnnnnnnnnnnnnnnnnnnnnnnnnnnnnnnnnnnnnnnnnnnnnnnnnnnnnnnnnnnnnnnnnnnnnnnnnnnnnnnnnnnnnnnnnnnnnnnnnnnnnnnnnnnnnnnnnnnnnnnnnnnnnnnnnnnnnnnnnnnnnnnnnnnnnnnnnnnnnnnnnnnnnnnnnnnnnnnnnnnnnnnnnnnnnnnnnnnnnnnnnnnnnnnnnnnnnnnnnnnnnnnnnnnnnnnnnnnnnnnnnnnnnnnnnnnnnnnnnnnnnnnnnnnnnnnnnnnnnnnnnnnnnnnnnnnnnnnnnnnnnnnnnnnnnnnnnnnnnnnnnnnnnnnnnnnnnnnnnnnnnnnnnnnnnnnnnnnnnnnnnnnnnnnnnnnnnnnnnnnnnnnnnnnnnnnnnnnnnnnnnnnnnnnnnnnnnnnnnnnnnnnnnnnnnnnnnnnnnnnnnnnnnnnnnnnnnnnnnnnnnnnnnnnnnnnnnnnnnnnnnnnnnnnnnnnnnnnnnnnnnnnnnnnnnnnnnnnnnnnnnnnnnnnnnnnnnnnnnnnnnnnnnnnnnnnnnnnnnnnnnnnnnnnnnnnnnnnnnnnnnnnnnnnnnnnnnnnnnnnnnnnnnnnnnnnnnnnnnnnnnnnnnnnnnnnnnnnnnnnnnnnnnnnnnnnnnnnnnnnnnnnnnnnnnnnnnnnnnnnnnnnnnnnnnnnnnnnnnnnnnnnnnnnnnnnnnnnnnnnnnnnnnnnnnnnnnnnnnnnnnnnnnnnnnnnnnnnnnnnnnnnnnnnnnnnnnnnnnnnnnnnnnnnnnnnnnnnnnnnnnnnnnnnnnnnnnnnnnnnnnnnnnnnnnnnnnnnnnnnnnnnnnnnnnnnnnnnnnnnnnnnnnnnnnnnnnnnnnnnnnnnnnnnnnnnnnnnnnnnnnnnnnnnnnnnnnnnnnnnnnnnnnnnnnnnnnnnnnnnnnnnnnnnnnnnnnnnnnnnnnnnnnnnnnnnnnnnnnnnnnnnnnnnnnnnnnnnnnnnnnnnnnnnnnnnnnnnnnnnnnnnnnnnnnnnnnnnnnnnnnnnnnnnnnnnnnnnnnnnnnnnnnnnnnnnnnnnnnnnnnnnnnnnnnnnnnnnnnnnnnnnnnnnnnnnnnnnnnnnnnnnnnnnnnnnnnnnnnnnnnnnnnnnnnnnnnnnnnnnnnnnnnnnnnnnnnnnnnnnnnnnnnnnnnnnnnnnnnnnnnnnnnnnnnnnnnnnnnnnnnnnnnnnnnnnnnnnnnnnnnnnnnnnnnnnnnnnnnnnnnnnnnnnnnnnnnnnnnnnnnnnnnnnnnnnnnnnnnnnnnnnnnnnnnnnnnnnnnnnnnnnnnnnnnnnnnnnnnnnnnnnnnnnnnnnnnnnnnnnnnnnnnnnnnnnnnnnnnnnnnnnnnnnnnnnnnnnnnnnnnnnnnnnnnnnnnnnnnnnnnnnnnnnnnnnnnnnnnnnnnnnnnnnnnnnnnnnnnnnnnnnnnnnnnnnnnnnnnnnnnnnnnnnnnnnnnnnnnnnnnnnnnnnnnnnnnnnnnnnnnnnnnnnnnnnnnnnnnnnnnnnnnnnnnnnnnnnnnnnnnnnnnnnnnnnnnnnnnnnnnnnnnnnnnnnnnnnnnnnnnnnnnnnnnnnnnnnnnnnnnnnnnnnnnnnnnnnnnnnnnnnnnnnnnnnnnnnnnnnnnnnnnnnnnnnnnnnnnnnnnnnnnnnnnnnnnnnnnnnnnnnnnnnnnnnnnnnnnnnnnnnnnnnnnnnnnnnnnnnnnnnnnnnnnnnnnnnnnnnnnnnnnnnnnnnnnnnnnnnnnnnnnnnnnnnnnnnnnnnnnnnnnnnnnnnnnnnnnnnnnnnnnnnnnnnnnnnnnnnnnnnnnnnnnnnnnnnnnnnnnnnnnnnnnnnnnnnnnnnnnnnnnnnnnnnnnnnnnnnnnnnnnnnnnnnnnnnnnnnnnnnnnnnnnnnnnnnnnnnnnnnnnnnnnnnnnnnnnnnnnnnnnnnnnnnnnnnnnnnnnnnnnnnnnnnnnnnnnnnnnnnnnnnnnnnnnnnnnnnnnnnnnnnnnnnnnnnnnnnnnnnnnnnnnnnnnnnnnnnnnnnnnnnnnnnnnnnnnnnnnnnnnnnnnnnnnnnnnnnnnnnnnnnnnnnnnnnnnnnnnnnnnnnnnnnnnnnnnnnnnnnnnnnnnnnnnnnnnnnnnnnnnnnnnnnnnnnnnnnnnnnnnnnnnnnnnnnnnnnnnnnnnnnnnnnnnnnnnnnnnnnnnnnnnnnnnnnnnnnnnnnnnnnnnnnnnnnnnnnnnnnnnnnnnnnnnnnnnnnnnnnnnnnnnnnnnnnnnnnnnnnnnnnnnnnnnnnnnnnnnnnnnnnnnnnnnnnnnnnnnnnnnnnnnnnnnnnnnnnnnnnnnnnnnnnnnnnnnnnnnnnnnnnnnnnnnnnnnnnnnnnnnnnnnnnnnnnnnnnnnnnnnnnnnnnnnnnnnnnnnnnnnnnnnnnnnnnnnnnnnnnnnnnnnnnnnnnnnnnnnnnnnnnnnnnnnnnnnnnnnnnnnnnnnnnnnnnnnnnnnnnnnnnnnnnnnnnnnnnnnnnnnnnnnnnnnnnnnnnnnnnnnnnnnnnnnnnnnnnnnnnnnnnnnnnnnnnnnnnnnnnnnnnnnnnnnnnnnnnnnnnnnnnnnnnnnnnnnnnnnnnnnnnnnnnnnnnnnnnnnnnnnnnnnnnnnnnnnnnnnnnnnnnnnnnnnnnnnnnnnnnnnnnnnnnnnnnnnnnnnnnnnnnnnnnnnnnnnnnnnnnnnnnnnnnnnnnnnnnnnnnnnnnnnnnnnnnnnnnnnnnnnnnnnnnnnnnnnnnnnnnnnnnnnnnnnnnnnnnnnnnnnnnnnnnnnnnnnnnnnnnnnnnnnnnnnnnnnnnnnnnnnnnnnnnnnnnnnnnnnnnnnnnnnnnnnnnnnnnnnnnnnnnnnnnnnnnnnnnnnnnnnnnnnnnnnnnnnnnnnnnnnnnnnnnnnnnnnnnnnnnnnnnnnnnnnnnnnnnnnnnnnnnnnnnnnnnnnnnnnnnnnnnnnnnnnnnnnnnnnnnnnnnnnnnnnnnnnnnnnnnnnnnnnnnnnnnnnnnnnnnnnnnnnnnnnnnnnnnnnnnnnnnnnnnnnnnnnnnnnnnnnnnnnnnnnnnnnnnnnnnnnnnnnnnnnnnnnnnnnnnnnnnnnnnnnnnnnnnnnnnnnnnnnnnnnnnnnnnnnnnnnnnnnnnnnnnnnnnnnnnnnnnnnnnnnnnnnnnnnnnnnnnnnnnnnnnnnnnnnnnnnnnnnnnnnnnnnnnnnnnnnnnnnnnnnnnnnnnnnnnnnnnnnnnnnnnnnnnnnnnnnnnnnnnnnnnnnnnnnnnnnnnnnnnnnnnnnnnnnnnnnnnnnnnnnnnnnnnnnnnnnnnnnnnnnnnnnnnnnnnnnnnnnnnnnnnnnnnnnnnnnnnnnnnnnnnnnnnnnnnnnnnnnnnnnnnnnnnnnnnnnnnnnnnnnnnnnnnnnnnnnnnnnnnnnnnnnnnnnnnnnnnnnnnnnnnnnnnnnnnnnnnnnnnnnnnnnnnnnnnnnnnnnnnnnnnnnnnnnnnnnnnnnnnnnnnnnnnnnnnnnnnnnnnnnnnnnnnnnnnnnnnnnnnnnnnnnnnnnnnnnnnnnnnnnnnnnnnnnnnnnnnnnnnnnnnnnnnnnnnnnnnnnnnnnnnnnnnnnnnnnnnnnnnnnnnnnnnnnnnnnnnnnnnnnnnnnnnnnnnnnnnnnnnnnnnnnnnnnnnnnnnnnnnnnnnnnnnnnnnnnnnnnnnnnnnnnnnnnnnnnnnnnnnnnnnnnnnnnnnnnnnnnnnnnnnnnnnnnnnnnnnnnnnnnnnnnnnnnnnnnnnnnnnnnnnnnnnnnnnnnnnnnnnnnnnnnnnnnnnnnnnnnnnnnnnnnnnnnnnnnnnnnnnnnnnnnnnnnnnnnnnnnnnnnnnnnnnnnnnnnnnnnnnnnnnnnnnnnnnnnnnnnnnnnnnnnnnnnnnnnnnnnnnnnnnnnnnnnnnnnnnnnnnnnnnnnnnnnnnnnnnnnnnnnnnnnnnnnnnnnnnnnnnnnnnnnnnnnnnnnnnnnnnnnnnnnnnnnnnnnnnnnnnnnnnnnnnnnnnnnnnnnnnnnnnnnnnnnnnnnnnnnnnnnnnnnnnnnnnnnnnnnnnnnnnnnnnnnnnnnnnnnnnnnnnnnnnnnnnnnnnnnnnnnnnnnnnnnnnnnnnnnnnnnnnnnnnnnnnnnnnnnnnnnnnnnnnnnnnnnnnnnnnnnnnnnnnnnnnnnnnnnnnnnnnnnnnnnnnnnnnnnnnnnnnnnnnnnnnnnnnnnnnnnnnnnnnnnnnnnnnnnnnnnnnnnnnnnnnnnnnnnnnnnnnnnnnnnnnnnnnnnnnnnnnnnnnnnnnnnnnnnnnnnnnnnnnnnnnnnnnnnnnnnnnnnnnnnnnnnnnnnnnnnnnnnnnnnnnnnnnnnnnnnnnnnnnnnnnnnnnnnnnnnnnnnnnnnnnnnnnnnnnnnnnnnnnnnnnnnnnnnnnnnnnnnnnnnnnnnnnnnnnnnnnnnnnnnnnnnnnnnnnnnnnnnnnnnnnnnnnnnnnnnnnnnnnnnnnnnnnnnnnnnnnnnnnnnnnnnnnnnnnnnnnnnnnnnnnnnnnnnnnnnnnnnnnnnnnnnnnnnnnnnnnnnnnnnnnnnnnnnnnnnnnnnnnnnnnnnnnnnnnnnnnnnnnnnnnnnnnnnnnnnnnnnnnnnnnnnnnnnnnnnnnnnnnnnnnnnnnnnnnnnnnnnnnnnnnnnnnnnnnnnnnnnnnnnnnnnnnnnnnnnnnnnnnnnnnnnnnnnnnnnnnnnnnnnnnnnnnnnnnnnnnnnnnnnnnnnnnnnnnnnnnnnnnnnnnnnnnnnnnnnnnnnnnnnnnnnnnnnnnnnnnnnnnnnnnnnnnnnnnnnnnnnnnnnnnnnnnnnnnnnnnnnnnnnnnnnnnnnnnnnnnnnnnnnnnnnnnnnnnnnnnnnnnnnnnnnnnnnnnnnnnnnnnnnnnnnnnnnnnnnnnnnnnnnnnnnnnnnnnnnnnnnnnnnnnnnnnnnnnnnnnnnnnnnnnnnnnnnnnnnnnnnnnnnnnnnnnnnnnnnnnnnnnnnnnnnnnnnnnnnnnnnnnnnnnnnnnnnnnnnnnnnnnnnnnnnnnnnnnnnnnnnnnnnnnnnnnnnnnnnnnnnnnnnnnnnnnnnnnnnnnnnnnnnnnnnnnnnnnnnnnnnnnnnnnnnnnnnnnnnnnnnnnnnnnnnnnnnnnnnnnnnnnnnnnnnnnnnnnnnnnnnnnnnnnnnnnnnnnnnnnnnnnnnnnnnnnnnnnnnnnnnnnnnnnnnnnnnnnnnnnnnnnnnnnnnnnnnnnnnnnnnnnnnnnnnnnnnnnnnnnnnnnnnnnnnnnnnnnnnnnnnnnnnnnnnnnnnnnnnnnnnnnnnnnnnnnnnnnnnnnnnnnnnnnnnnnnnnnnnnnnnnnnnnnnnnnnnnnnnnnnnnnnnnnnnnnnnnnnnnnnnnnnnnnnnnnnnnnnnnnnnnnnnnnnnnnnnnnnnnnnnnnnnnnnnnnnnnnnnnnnnnnnnnnnnnnnnnnnnnnnnnnnnnnnnnnnnnnnnnnnnnnnnnnnnnnnnnnnnnnnnnnnnnnnnnnnnnnnnnnnnnnnnnnnnnnnnnnnnnnnnnnnnnnnnnnnnnnnnnnnnnnnnnnnnnnnnnnnnnnnnnnnnnnnnnnnnnnnnnnnnnnnnnnnnnnnnnnnnnnnnnnnnnnnnnnnnnnnnnnnnnnnnnnnnnnnnnnnnnnnnnnnnnnnnnnnnnnnnnnnnnnnnnnnnnnnnnnnnnnnnnnnnnnnnnnnnnnnnnnnnnnnnnnnnnnnnnnnnnnnnnnnnnnnnnnnnnnnnnnnnnnnnnnnnnnnnnnnnnnnnnnnnnnnnnnnnnnnnnnnnnnnnnnnnnnnnnnnnnnnnnnnnnnnnnnnnnnnnnnnnnnnnnnnnnnnnnnnnnnnnnnnnnnnnnnnnnnnnnnnnnnnnnnnnnnnnnnnnnnnnnnnnnnnnnnnnnnnnnnnnnnnnnnnnnnnnnnnnnnnnnnnnnnnnnnnnnnnnnnnnnnnnnnnnnnnnnnnnnnnnnnnnnnnnnnnnnnnnnnnnnnnnnnnnnnnnnnnnnnnnnnnnnnnnnnnnnnnnnnnnnnnnnnnnnnnnnnnnnnnnnnnnnnnnnnnnnnnnnnnnnnnnnnnnnnnnnnnnnnnnnnnnnnnnnnnnnnnnnnnnnnnnnnnnnnnnnnnnnnnnnnnnnnnnnnnnnnnnnnnnnnnnnnnnnnnnnnnnnnnnnnnnnnnnnnnnnnnnnnnnnnnnnnnnnnnnnnnnnnnnnnnnnnnnnnnnnnnnnnnnnnnnnnnnnnnnnnnnnnnnnnnnnnnnnnnnnnnnnnnnnnnnnnnnnnnnnnnnnnnnnnnnnnnnnnnnnnnnnnnnnnnnnnnnnnnnnnnnnnnnnnnnnnnnnnnnnnnnnnnnnnnnnnnnnnnnnnnnnnnnnnnnnnnnnnnnnnnnnnnnnnnnnnnnnnnnnnnnnnnnnnnnnnnnnnnnnnnnnnnnnnnnnnnnnnnnnnnnnnnnnnnnnnnnnnnnnnnnnnnnnnnnnnnnnnnnnnnnnnnnnnnnnnnnnnnnnnnnnnnnnnnnnnnnnnnnnnnnnnnnnnnnnnnnnnnnnnnnnnnnnnnnnnnnnnnnnnnnnnnnnnnnnnnnnnnnnnnnnnnnnnnnnnnnnnnnnnnnnnnnnnnnnnnnnnnnnnnnnnnnnnnnnnnnnnnnnnnnnnnnnnnnnnnnnnnnnnnnnnnnnnnnnnnnnnnnnnnnnnnnnnnnnnnnnnnnnnnnnnnnnnnnnnnnnnnnnnnnnnnnnnnnnnnnnnnnnnnnnnnnnnnnnnnnnnnnnnnnnnnnnnnnnnnnnnnnnnnnnnnnnnnnnnnnnnnnnnnnnnnnnnnnnnnnnnnnnnnnnnnnnnnnnnnnnnnnnnnnnnnnnnnnnnnnnnnnnnnnnnnnnnnnnnnnnnnnnnnnnnnnnnnnnnnnnnnnnnnnnnnnnnnnnnnnnnnnnnnnnnnnnnnnnnnnnnnnnnnnnnnnnnnnnnnnnnnnnnnnnnnnnnnnnnnnnnnnnnnnnnnnnnnnnnnnnnnnnnnnnnnnnnnnnnnnnnnnnnnnnnnnnnnnnnnnnnnnnnnnnnnnnnnnnnnnnnnnnnnnnnnnnnnnnnnnnnnnnnnnnnnnnnnnnnnnnnnnnnnnnnnnnnnnnnnnnnnnnnnnnnnnnnnnnnnnnnnnnnnnnnnnnnnnnnnnnnnnnnnnnnnnnnnnnnnnnnnnnnnnnnnnnnnnnnnnnnnnnnnnnnnnnnnnnnnnnnnnnnnnnnnnnnnnnnnnnnnnnnnnnnnnnnnnnnnnnnnnnnnnnnnnnnnnnnnnnnnnnnnnnnnnnnnnnnnnnnnnnnnnnnnnnnnnnnnnnnnnnnnnnnnnnnnnnnnnnnnnnnnnnnnnnnnnnnnnnnnnnnnnnnnnnnnnnnnnnnnnnnnnnnnnnnnnnnnnnnnnnnnnnnnnnnnnnnnnnnnnnnnnnnnnnnnnnnnnnnnnnnnnnnnnnnnnnnnnnnnnnnnnnnnnnnnnnnnnnnnnnnnnnnnnnnnnnnnnnnnnnnnnnnnnnnnnnnnnnnnnnnnnnnnnnnnnnnnnnnnnnnnnnnnnnnnnnnnnnnnnnnnnnnnnnnnnnnnnnnnnnnnnnnnnnnnnnnnnnnnnnnnnnnnnnnnnnnnnnnnnnnnnnnnnnnnnnnnnnnnnnnnnnnnnnnnnnnnnnnnnnnnnnnnnnnnnnnnnnnnnnnnnnnnnnnnnnnnnnnnnnnnnnnnnnnnnnnnnnnnnnnnnnnnnnnnnnnnnnnnnnnnnnnnnnnnnnnnnnnnnnnnnnnnnnnnnnnnnnnnnnnnnnnnnnnnnnnnnnnnnnnnnnnnnnnnnnnnnnnnnnnnnnnnnnnnnnnnnnnnnnnnnnnnnnnnnnnnnnnnnnnnnnnnnnnnnnnnnnnnnnnnnnnnnnnnnnnnnnnnnnnnnnnnnnnnnnnnnnnnnnnnnnnnnnnnnnnnnnnnnnnnnnnnnnnnnnnnnnnnnnnnnnnnnnnnnnnnnnnnnnnnnnnnnnnnnnnnnnnnnnnnnnnnnnnnnnnnnnnnnnnnnnnnnnnnnnnnnnnnnnnnnnnnnnnnnnnnnnnnnnnnnnnnnnnnnnnnnnnnnnnnnnnnnnnnnnnnnnnnnnnnnnnnnnnnnnnnnnnnnnnnnnnnnnnnnnnnnnnnnnnnnnnnnnnnnnnnnnnnnnnnnnnnnnnnnnnnnnnnnnnnnnnnnnnnnnnnnnnnnnnnnnnnnnnnnnnnnnnnnnnnnnnnnnnnnnnnnnnnnnnnnnnnnnnnnnnnnnnnnnnnnnnnnnnnnnnnnnnnnnnnnnnnnnnnnnnnnnnnnnnnnnnnnnnnnnnnnnnnnnnnnnnnnnnnnnnnnnnnnnnnnnnnnnnnnnnnnnnnnnnnnnnnnnnnnnnnnnnnnnnnnnnnnnnnnnnnnnnnnnnnnnnnnnnnnnnnnnnnnnnnnnnnnnnnnnnnnnnnnnnnnnnnnnnnnnnnnnnnnnnnnnnnnnnnnnnnnnnnnnnnnnnnnnnnnnnnnnnnnnnnnnnnnnnnnnnnnnnnnnnnnnnnnnnnnnnnnnnnnnnnnnnnnnnnnnnnnnnnnnnnnnnnnnnnnnnnnnnnnnnnnnnnnnnnnnnnnnnnnnnnnnnnnnnnnnnnnnnnnnnnnnnnnnnnnnnnnnnnnnnnnnnnnnnnnnnnnnnnnnnnnnnnnnnnnnnnnnnnnnnnnnnnnnnnnnnnnnnnnnnnnnnnnnnnnnnnnnnnnnnnnnnnnnnnnnnnnnnnnnnnnnnnnnnnnnnnnnnnnnnnnnnnnnnnnnnnnnnnnnnnnnnnnnnnnnnnnnnnnnnnnnnnnnnnnnnnnnnnnnnnnnnnnnnnnnnnnnnnnnnnnnnnnnnnnnnnnnnnnnnnnnnnnnnnnnnnnnnnnnnnnnnnnnnnnnnnnnnnnnnnnnnnnnnnnnnnnnnnnnnnnnnnnnnnnnnnnnnnnnnnnnnnnnnnnnnnnnnnnnnnnnnnnnnnnnnnnnnnnnnnnnnnnnnnnnnnnnnnnnnnnnnnnnnnnnnnnnnnnnnnnnnnnnnnnnnnnnnnnnnnnnnnnnnnnnnnnnnnnnnnnnnnnnnnnnnnnnnnnnnnnnnnnnnnnnnnnnnnnnnnnnnnnnnnnnnnnnnnnnnnnnnnnnnnnnnnnnnnnnnnnnnnnnnnnnnnnnnnnnnnnnnnnnnnnnnnnnnnnnnnnnnnnnnnnnnnnnnnnnnnnnnnnnnnnnnnnnnnnnnnnnnnnnnnnnnnnnnnnnnnnnnnnnnnnnnnnnnnnnnnnnnnnnnnnnnnnnnnnnnnnnnnnnnnnnnnnnnnnnnnnnnnnnnnnnnnnnnnnnnnnnnnnnnnnnnnnnnnnnnnnnnnnnnnnnnnnnnnnnnnnnnnnnnnnnnnnnnnnnnnnnnnnnnnnnnnnnnnnnnnnnnnnnnnnnnnnnnnnnnnnnnnnnnnnnnnnnnnnnnnnnnnnnnnnnnnnnnnnnnnnnnnnnnnnnnnnnnnnnnnnnnnnnnnnnnnnnnnnnnnnnnnnnnnnnnnnnnnnnnnnnnnnnnnnnnnnnnnnnnnnnnnnnnnnnnnnnnnnnnnnnnnnnnnnnnnnnnnnnnnnnnnnnnnnnnnnnnnnnnnnnnnnnnnnnnnnnnnnnnnnnnnnnnnnnnnnnnnnnnnnnnnnnnnnnnnnnnnnnnnnnnnnnnnnnnnnnnnnnnnnnnnnnnnnnnnnnnnnnnnnnnnnnnnnnnnnnnnnnnnnnnnnnnnnnnnnnnnnnnnnnnnnnnnnnnnnnnnnnnnnnnnnnnnnnnnnnnnnnnnnnnnnnnnnnnnnnnnnnnnnnnnnnnnnnnnnnnnnnnnnnnnnnnnnnnnnnnnnnnnnnnnnnnnnnnnnnnnnnnnnnnnnnnnnnnnnnnnnnnnnnnnnnnnnnnnnnnnnnnnnnnnnnnnnnnnnnnnnnnnnnnnnnnnnnnnnnnnnnnnnnnnnnnnnnnnnnnnnnnnnnnnnnnnnnnnnnnnnnnnnnnnnnnnnnnnnnnnnnnnnnnnnnnnnnnnnnnnnnnnnnnnnnnnnnnnnnnnnnnnnnnnnnnnnnnnnnnnnnnnnnnnnnnnnnnnnnnnnnnnnnnnnnnnnnnnnnnnnnnnnnnnnnnnnnnnnnnnnnnnnnnnnnnnnnnnnnnnnnnnnnnnnnnnnnnnnnnnnnnnnnnnnnnnnnnnnnnnnnnnnnnnnnnnnnnnnnnnnnnnnnnnnnnnnnnnnnnnnnnnnnnnnnnnnnnnnnnnnnnnnnnnnnnnnnnnnnnnnnnnnnnnnnnnnnnnnnnnnnnnnnnnnnnnnnnnnnnnnnnnnnnnnnnnnnnnnnnnnnnnnnnnnnnnnnnnnnnnnnnnnnnnnnnnnnnnnnnnnnnnnnnnnnnnnnnnnnnnnnnnnnnnnnnnnnnnnnnnnnnnnnnnnnnnnnnnnnnnnnnnnnnnnnnnnnnnnnnnnnnnnnnnnnnnnnnnnnnnnnnnnnnnnnnnnnnnnnnnnnnnnnnnnnnnnnnnnnnnnnnnnnnnnnnnnnnnnnnnnnnnnnnnnnnnnnnnnnnnnnnnnnnnnnnnnnnnnnnnnnnnnnnnnnnnnnnnnnnnnnnnnnnnnnnnnnnnnnnnnnnnnnnnnnnnnnnnnnnnnnnnnnnnnnnnnnnnnnnnnnnnnnnnnnnnnnnnnnnnnnnnnnnnnnnnnnnnnnnnnnnnnnnnnnnnnnnnnnnnnnnnnnnnnnnnnnnnnnnnnnnnnnnnnnnnnnnnnnnnnnnnnnnnnnnnnnnnnnnnnnnnnnnnnnnnnnnnnnnnnnnnnnnnnnnnnnnnnnnnnnnnnnnnnnnnnnnnnnnnnnnnnnnnnnnnnnnnnnnnnnnnnnnnnnnnnnnnnnnnnnnnnnnnnnnnnnnnnnnnnnnnnnnnnnnnnnnnnnnnnnnnnnnnnnnnnnnnnnnnnnnnnnnnnnnnnnnnnnnnnnnnnnnnnnnnnnnnnnnnnnnnnnnnnnnnnnnnnnnnnnnnnnnnnnnnnnnnnnnnnnnnnnnnnnnnnnnnnnnnnnnnnnnnnnnnnnnnnnnnnnnnnnnnnnnnnnnnnnnnnnnnnnnnnnnnnnnnnnnnnnnnnnnnnnnnnnnnnnnnnnnnnnnnnnnnnnnnnnnnnnnnnnnnnnnnnnnnnnnnnnnnnnnnnnnnnnnnnnnnnnnnnnnnnnnnnnnnnnnnnnnnnnnnnnnnnnnnnnnnnnnnnnnnnnnnnnnnnnnnnnnnnnnnnnnnnnnnnnnnnnnnnnnnnnnnnnnnnnnnnnnnnnnnnnnnnnnnnnnnnnnnnnnnnnnnnnnnnnnnnnnnnnnnnnnnnnnnnnnnnnnnnnnnnnnnnnnnnnnnnnnnnnnnnnnnnnnnnnnnnnnnnnnnnnnnnnnnnnnnnnnnnnnnnnnnnnnnnnnnnnnnnnnnnnnnnnnnnnnnnnnnnnnnnnnnnnnnnnnnnnnnnnnnnnnnnnnnnnnnnnnnnnnnnnnnnnnnnnnnnnnnnnnnnnnnnnnnnnnnnnnnnnnnnnnnnnnnnnnnnnnnnnnnnnnnnnnnnnnnnnnnnnnnnnnnnnnnnnnnnnnnnnnnnnnnnnnnnnnnnnnnnnnnnnnnnnnnnnnnnnnnnnnnnnnnnnnnnnnnnnnnnnnnnnnnnnnnnnnnnnnnnnnnnnnnnnnnnnnnnnnnnnnnnnnnnnnnnnnnnnnnnnnnnnnnnnnnnnnnnnnnnnnnnnnnnnnnnnnnnnnnnnnnnnnnnnnnnnnnnnnnnnnnnnnnnnnnnnnnnnnnnnnnnnnnnnnnnnnnnnnnnnnnnnnnnnnnnnnnnnnnnnnnnnnnnnnnnnnnnnnnnnnnnnnnnnnnnnnnnnnnnnnnnnnnnnnnnnnnnnnnnnnnnnnnnnnnnnnnnnnnnnnnnnnnnnnnnnnnnnnnnnnnnnnnnnnnnnnnnnnnnnnnnnnnnnnnnnnnnnnnnnnnnnnnnnnnnnnnnnnnnnnnnnnnnnnnnnnnnnnnnnnnnnnnnnnnnnnnnnnnnnnnnnnnnnnnnnnnnnnnnnnnnnnnnnnnnnnnnnnnnnnnnnnnnnnnnnnnnnnnnnnnnnnnnnnnnnnnnnnnnnnnnnnnnnnnnnnnnnnnnnnnnnnnnnnnnnnnnnnnnnnnnnnnnnnnnnnnnnnnnnnnnnnnnnnnnnnnnnnnnnnnnnnnnnnnnnnnnnnnnnnnnnnnnnnnnnnnnnnnnnnnnnnnnnnnnnnnnnnnnnnnnnnnnnnnnnnnnnnnnnnnnnnnnnnnnnnnnnnnnnnnnnnnnnnnnnnnnnnnnnnnnnnnnnnnnnnnnnnnnnnnnnnnnnnnnnnnnnnnnnnnnnnnnnnnnnnnnnnnnnnnnnnnnnnnnnnnnnnnnnnnnnnnnnnnnnnnnnnnnnnnnnnnnnnnnnnnnnnnnnnnnnnnnnnnnnnnnnnnnnnnnnnnnnnnnnnnnnnnnnnnnnnnnnnnnnnnnnnnnnnnnnnnnnnnnnnnnnnnnnnnnnnnnnnnnnnnnnnnnnnnnnnnnnnnnnnnnnnnnnnnnnnnnnnnnnnnnnnnnnnnnnnnnnnnnnnnnnnnnnnnnnnnnnnnnnnnnnnnnnnnnnnnnnnnnnnnnnnnnnnnnnnnnnnnnnnnnnnnnnnnnnnnnnnnnnnnnnnnnnnnnnnnnnnnnnnnnnnnnnnnnnnnnnnnnnnnnnnnnnnnnnnnnnnnnnnnnnnnnnnnnnnnnnnnnnnnnnnnnnnnnnnnnnnnnnnnnnnnnnnnnnnnnnnnnnnnnnnnnnnnnnnnnnnnnnnnnnnnnnnnnnnnnnnnnnnnnnnnnnnnnnnnnnnnnnnnnnnnnnnnnnnnnnnnnnnnnnnnnnnnnnnnnnnnnnnnnnnnnnnnnnnnnnnnnnnnnnnnnnnnnnnnnnnnnnnnnnnnnnnnnnnnnnnnnnnnnnnnnnnnnnnnnnnnnnnnnnnnnnnnnnnnnnnnnnnnnnnnnnnnnnnnnnnnnnnnnnnnnnnnnnnnnnnnnnnnnnnnnnnnnnnnnnnnnnnnnnnnnnnnnnnnnnnnnnnnnnnnnnnnnnnnnnnnnnnnnnnnnnnnnnnnnnnnnnnnnnnnnnnnnnnnnnnnnnnnnnnnnnnnnnnnnnnnnnnnnnnnnnnnnnnnnnnnnnnnnnnnnnnnnnnnnnnnnnnnnnnnnnnnnnnnnnnnnnnnnnnnnnnnnnnnnnnnnnnnnnnnnnnnnnnnnnnnnnnnnnnnnnnnnnnnnnnnnnnnnnnnnnnnnnnnnnnnnnnnnnnnnnnnnnnnnnnnnnnnnnnnnnnnnnnnnnnnnnnnnnnnnnnnnnnnnnnnnnnnnnnnnnnnnnnnnnnnnnnnnnnnnnnnnnnnnnnnnnnnnnnnnnnnnnnnnnnnnnnnnnnnnnnnnnnnnnnnnnnnnnnnnnnnnnnnnnnnnnnnnnnnnnnnnnnnnnnnnnnnnnnnnnnnnnnnnnnnnnnnnnnnnnnnnnnnnnnnnnnnnnnnnnnnnnnnnnnnnnnnnnnnnnnnnnnnnnnnnnnnnnnnnnnnnnnnnnnnnnnnnnnnnnnnnnnnnnnnnnnnnnnnnnnnnnnnnnnnnnnnnnnnnnnnnnnnnnnnnnnnnnnnnnnnnnnnnnnnnnnnnnnnnnnnnnnnnnnnnnnnnnnnnnnnnnnnnnnnnnnnnnnnnnnnnnnnnnnnnnnnnnnnnnnnnnnnnnnnnnnnnnnnnnnnnnnnnnnnnnnnnnnnnnnnnnnnnnnnnnnnnnnnnnnnnnnnnnnnnnnnnnnnnnnnnnnnnnnnnnnnnnnnnnnnnnnnnnnnnnnnnnnnnnnnnnnnnnnnnnnnnnnnnnnnnnnnnnnnnnnnnnnnnnnnnnnnnnnnnnnnnnnnnnnnnnnnnnnnnnnnnnnnnnnnnnnnnnnnnnnnnnnnnnnnnnnnnnnnnnnnnnnnnnnnnnnnnnnnnnnnnnnnnnnnnnnnnnnnnnnnnnnnnnnnnnnnnnnnnnnnnnnnnnnnnnnnnnnnnnnnnnnnnnnnnnnnnnnnnnnnnnnnnnnnnnnnnnnnnnnnnnnnnnnnnnnnnnnnnnnnnnnnnnnnnnnnnnnnnnnnnnnnnnnnnnnnnnnnnnnnnnnnnnnnnnnnnnnnnnnnnnnnnnnnnnnnnnnnnnnnnnnnnnnnnnnnnnnnnnnnnnnnnnnnnnnnnnnnnnnnnnnnnnnnnnnnnnnnnnnnnnnnnnnnnnnnnnnnnnnnnnnnnnnnnnnnnnnnnnnnnnnnnnnnnnnnnnnnnnnnnnnnnnnnnnnnnnnnnnnnnnnnnnnnnnnnnnnnnnnnnnnnnnnnnnnnnnnnnnnnnnnnnnnnnnnnnnnnnnnnnnnnnnnnnnnnnnnnnnnnnnnnnnnnnnnnnnnnnnnnnnnnnnnnnnnnnnnnnnnnnnnnnnnnnnnnnnnnnnnnnnnnnnnnnnnnnnnnnnnnnnnnnnnnnnnnnnnnnnnnnnnnnnnnnnnnnnnnnnnnnnnnnnnnnnnnnnnnnnnnnnnnnnnnnnnnnnnnnnnnnnnnnnnnnnnnnnnnnnnnnnnnnnnnnnnnnnnnnnnnnnnnnnnnnnnnnnnnnnnnnnnnnnnnnnnnnnnnnnnnnnnnnnnnnnnnnnnnnnnnnnnnnnnnnnnnnnnnnnnnnnnnnnnnnnnnnnnnnnnnnnnnnnnnnnnnnnnnnnnnnnnnnnnnnnnnnnnnnnnnnnnnnnnnnnnnnnnnnnnnnnnnnnnnnnnnnnnnnnnnnnnnnnnnnnnnnnnnnnnnnnnnnnnnnnnnnnnnnnnnnnnnnnnnnnnnnnnnnnnnnnnnnnnnnnnnnnnnnnnnnnnnnnnnnnnnnnnnnnnnnnnnnnnnnnnnnnnnnnnnnnnnnnnnnnnnnnnnnnnnnnnnnnnnnnnnnnnnnnnnnnnnnnnnnnnnnnnnnnnnnnnnnnnnnnnnnnnnnnnnnnnnnnnnnnnnnnnnnnnnnnnnnnnnnnnnnnnnnnnnnnnnnnnnnnnnnnnnnnnnnnnnnnnnnnnnnnnnnnnnnnnnnnnnnnnnnnnnnnnnnnnnnnnnnnnnnnnnnnnnnnnnnnnnnnnnnnnnnnnnnnnnnnnnnnnnnnnnnnnnnnnnnnnnnnnnnnnnnnnnnnnnnnnnnnnnnnnnnnnnnnnnnnnnnnnnnnnnnnnnnnnnnnnnnnnnnnnnnnnnnnnnnnnnnnnnnnnnnnnnnnnnnnnnnnnnnnnnnnnnnnnnnnnnnnnnnnnnnnnnnnnnnnnnnnnnnnnnnnnnnnnnnnnnnnnnnnnnnnnnnnnnnnnnnnnnnnnnnnnnnnnnnnnnnnnnnnnnnnnnnnnnnnnnnnnnnnnnnnnnnnnnnnnnnnnnnnnnnnnnnnnnnnnnnnnnnnnnnnnnnnnnnnnnnnnnnnnnnnnnnnnnnnnnnnnnnnnnnnnnnnnnnnnnnnnnnnnnnnnnnnnnnnnnnnnnnnnnnnnnnnnnnnnnnnnnnnnnnnnnnnnnnnnnnnnnnnnnnnnnnnnnnnnnnnnnnnnnnnnnnnnnnnnnnnnnnnnnnnnnnnnnnnnnnnnnnnnnnnnnnnnnnnnnnnnnnnnnnnnnnnnnnnnnnnnnnnnnnnnnnnnnnnnnnnnnnnnnnnnnnnnnnnnnnnnnnnnnnnnnnnnnnnnnnnnnnnnnnnnnnnnnnnnnnnnnnnnnnnnnnnnnnnnnnnnnnnnnnnnnnnnnnnnnnnnnnnnnnnnnnnnnnnnnnnnnnnnnnnnnnnnnnnnnnnnnnnnnnnnnnnnnnnnnnnnnnnnnnnnnnnnnnnnnnnnnnnnnnnnnnnnnnnnnnnnnnnnnnnnnnnnnnnnnnnnnnnnnnnnnnnnnnnnnnnnnnnnnnnnnnnnnnnnnnnnnnnnnnnnnnnnnnnnnnnnnnnnnnnnnnnnnnnnnnnnnnnnnnnnnnnnnnnnnnnnnnnnnnnnnnnnnnnnnnnnnnnnnnnnnnnnnnnnnnnnnnnnnnnnnnnnnnnnnnnnnnnnnnnnnnnnnnnnnnnnnnnnnnnnnnnnnnnnnnnnnnnnnnnnnnnnnnnnnnnnnnnnnnnnnnnnnnnnnnnnnnnnnnnnnnnnnnnnnnnnnnnnnnnnnnnnnnnnnnnnnnnnnnnnnnnnnnnnnnnnnnnnnnnnnnnnnnnnnnnnnnnnnnnnnnnnnnnnnnnnnnnnnnnnnnnnnnnnnnnnnnnnnnnnnnnnnnnnnnnnnnnnnnnnnnnnnnnnnnnnnnnnnnnnnnnnnnnnnnnnnnnnnnnnnnnnnnnnnnnnnnnnnnnnnnnnnnnnnnnnnnnnnnnnnnnnnnnnnnnnnnnnnnnnnnnnnnnnnnnnnnnnnnnnnnnnnnnnnnnnnnnnnnnnnnnnnnnnnnnnnnnnnnnnnnnnnnnnnnnnnnnnnnnnnnnnnnnnnnnnnnnnnnnnnnnnnnnnnnnnnnnnnnnnnnnnnnnnnnnnnnnnnnnnnnnnnnnnnnnnnnnnnnnnnnnnnnnnnnnnnnnnnnnnnnnnnnnnnnnnnnnnnnnnnnnnnnnnnnnnnnnnnnnnnnnnnnnnnnnnnnnnnnnnnnnnnnnnnnnnnnnnnnnnnnnnnnnnnnnnnnnnnnnnnnnnnnnnnnnnnnnnnnnnnnnnnnnnnnnnnnnnnnnnnnnnnnnnnnnnnnnnnnnnnnnnnnnnnnnnnnnnnnnnnnnnnnnnnnnnnnnnnnnnnnnnnnnnnnnnnnnnnnnnnnnnnnnnnnnnnnnnnnnnnnnnnnnnnnnnnnnnnnnnnnnnnnnnnnnnnnnnnnnnnnnnnnnnnnnnnnnnnnnnnnnnnnnnnnnnnnnnnnnnnnnnnnnnnnnnnnnnnnnnnnnnnnnnnnnnnnnnnnnnnnnnnnnnnnnnnnnnnnnnnnnnnnnnnnnnnnnnnnnnnnnnnnnnnnnnnnnnnnnnnnnnnnnnnnnnnnnnnnnnnnnnnnnnnnnnnnnnnnnnnnnnnnnnnnnnnnnnnnnnnnnnnnnnnnnnnnnnnnnnnnnnnnnnnnnnnnnnnnnnnnnnnnnnnnnnnnnnnnnnnnnnnnnnnnnnnnnnnnnnnnnnnnnnnnnnnnnnnnnnnnnnnnnnnnnnnnnnnnnnnnnnnnnnnnnnnnnnnnnnnnnnnnnnnnnnnnnnnnnnnnnnnnnnnnnnnnnnnnnnnnnnnnnnnnnnnnnnnnnnnnnnnnnnnnnnnnnnnnnnnnnnnnnnnnnnnnnnnnnnnnnnnnnnnnnnnnnnnnnnnnnnnnnnnnnnnnnnnnnnnnnnnnnnnnnnnnnnnnnnnnnnnnnnnnnnnnnnnnnnnnnnnnnnnnnnnnnnnnnnnnnnnnnnnnnnnnnnnnnnnnnnnnnnnnnnnnnnnnnnnnnnnnnnnnnnnnnnnnnnnnnnnnnnnnnnnnnnnnnnnnnnnnnnnnnnnnnnnnnnnnnnnnnnnnnnnnnnnnnnnnnnnnnnnnnnnnnnnnnnnnnnnnnnnnnnnnnnnnnnnnnnnnnnnnnnnnnnnnnnnnnnnnnnnnnnnnnnnnnnnnnnnnnnnnnnnnnnnnnnnnnnnnnnnnnnnnnnnnnnnnnnnnnnnnnnnnnnnnnnnnnnnnnnnnnnnnnnnnnnnnnnnnnnnnnnnnnnnnnnnnnnnnnnnnnnnnnnnnnnnnnnnnnnnnnnnnnnnnnnnnnnnnnnnnnnnnnnnnnnnnnnnnnnnnnnnnnnnnnnnnnnnnnnnnnnnnnnnnnnnnnnnnnnnnnnnnnnnnnnnnnnnnnnnnnnnnnnnnnnnnnnnnnnnnnnnnnnnnnnnnnnnnnnnnnnnnnnnnnnnnnnnnnnnnnnnnnnnnnnnnnnnnnnnnnnnnnnnnnnnnnnnnnnnnnnnnnnnnnnnnnnnnnnnnnnnnnnnnnnnnnnnnnnnnnnnnnnnnnnnnnnnnnnnnnnnnnnnnnnnnnnnnnnnnnnnnnnnnnnnnnnnnnnnnnnnnnnnnnnnnnnnnnnnnnnnnnnnnnnnnnnnnnnnnnnnnnnnnnnnnnnnnnnnnnnnnnnnnnnnnnnnnnnnnnnnnnnnnnnnnnnnnnnnnnnnnnnnnnnnnnnnnnnnnnnnnnnnnnnnnnnnnnnnnnnnnnnnnnnnnnnnnnnnnnnnnnnnnnnnnnnnnnnnnnnnnnnnnnnnnnnnnnnnnnnnnnnnnnnnnnnnnnnnnnnnnnnnnnnnnnnnnnnnnnnnnnnnnnnnnnnnnnnnnnnnnnnnnnnnnnnnnnnnnnnnnnnnnnnnnnnnnnnnnnnnnnnnnnnnnnnnnnnnnnnnnnnnnnnnnnnnnnnnnnnnnnnnnnnnnnnnnnnnnnnnnnnnnnnnnnnnnnnnnnnnnnnnnnnnnnnnnnnnnnnnnnnnnnnnnnnnnnnnnnnnnnnnnnnnnnnnnnnnnnnnnnnnnnnnnnnnnnnnnnnnnnnnnnnnnnnnnnnnnnnnnnnnnnnnnnnnnnnnnnnnnnnnnnnnnnnnnnnnnnnnnnnnnnnnnnnnnnnnnnnnnnnnnnnnnnnnnnnnnnnnnnnnnnnnnnnnnnnnnnnnnnnnnnnnnnnnnnnnnnnnnnnnnnnnnnnnnnnnnnnnnnnnnnnnnnnnnnnnnnnnnnnnnnnnnnnnnnnnnnnnnnnnnnnnnnnnnnnnnnnnnnnnnnnnnnnnnnnnnnnnnnnnnnnnnnnnnnnnnnnnnnnnnnnnnnnnnnnnnnnnnnnnnnnnnnnnnnnnnnnnnnnnnnnnnnnnnnnnnnnnnnnnnnnnnnnnnnnnnnnnnnnnnnnnnnnnnnnnnnnnnnnnnnnnnnnnnnnnnnnnnnnnnnnnnnnnnnnnnnnnnnnnnnnnnnnnnnnnnnnnnnnnnnnnnnnnnnnnnnnnnnnnnnnnnnnnnnnnnnnnnnnnnnnnnnnnnnnnnnnnnnnnnnnnnnnnnnnnnnnnnnnnnnnnnnnnnnnnnnnnnnnnnnnnnnnnnnnnnnnnnnnnnnnnnnnnnnnnnnnnnnnnnnnnnnnnnnnnnnnnnnnnnnnnnnnnnnnnnnnnnnnnnnnnnnnnnnnnnnnnnnnnnnnnnnnnnnnnnnnnnnnnnnnnnnnnnnnnnnnnnnnnnnnnnnnnnnnnnnnnnnnnnnnnnnnnnnnnnnnnnnnnnnnnnnnnnnnnnnnnnnnnnnnnnnnnnnnnnnnnnnnnnnnnnnnnnnnnnnnnnnnnnnnnnnnnnnnnnnnnnnnnnnnnnnnnnnnnnnnnnnnnnnnnnnnnnnnnnnnnnnnnnnnnnnnnnnnnnnnnnnnnnnnnnnnnnnnnnnnnnnnnnnnnnnnnnnnnnnnnnnnnnnnnnnnnnnnnnnnnnnnnnnnnnnnnnnnnnnnnnnnnnnnnnnnnnnnnnnnnnnnnnnnnnnnnnnnnnnnnnnnnnnnnnnnnnnnnnnnnnnnnnnnnnnnnnnnnnnnnnnnnnnnnnnnnnnnnnnnnnnnnnnnnnnnnnnnnnnnnnnnnnnnnnnnnnnnnnnnnnnnnnnnnnnnnnnnnnnnnnnnnnnnnnnnnnnnnnnnnnnnnnnnnnnnnnnnnnnnnnnnnnnnnnnnnnnnnnnnnnnnnnnnnnnnnnnnnnnnnnnnnnnnnnnnnnnnnnnnnnnnnnnnnnnnnnnnnnnnnnnnnnnnnnnnnnnnnnnnnnnnnnnnnnnnnnnnnnnnnnnnnnnnnnnnnnnnnnnnnnnnnnnnnnnnnnnnnnnnnnnnnnnnnnnnnnnnnnnnnnnnnnnnnnnnnnnnnnnnnnnnnnnnnnnnnnnnnnnnnnnnnnnnnnnnnnnnnnnnnnnnnnnnnnnnnnnnnnnnnnnnnnnnnnnnnnnnnnnnnnnnnnnnnnnnnnnnnnnnnnnnnnnnnnnnnnnnnnnnnnnnnnnnnnnnnnnnnnnnnnnnnnnnnnnnnnnnnnnnnnnnnnnnnnnnnnnnnnnnnnnnnnnnnnnnnnnnnnnnnnnnnnnnnnnnnnnnnnnnnnnnnnnnnnnnnnnnnnnnnnnnnnnnnnnnnnnnnnnnnnnnnnnnnnnnnnnnnnnnnnnnnnnnnnnnnnnnnnnnnnnnnnnnnnnnnnnnnnnnnnnnnnnnnnnnnnnnnnnnnnnnnnnnnnnnnnnnnnnnnnnnnnnnnnnnnnnnnnnnnnnnnnnnnnnnnnnnnnnnnnnnnnnnnnnnnnnnnnnnnnnnnnnnnnnnnnnnnnnnnnnnnnnnnnnnnnnnnnnnnnnnnnnnnnnnnnnnnnnnnnnnnnnnnnnnnnnnnnnnnnnnnnnnnnnnnnnnnnnnnnnnnnnnnnnnnnnnnnnnnnnnnnnnnnnnnnnnnnnnnnnnnnnnnnnnnnnnnnnnnnnnnnnnnnnnnnnnnnnnnnnnnnnnnnnnnnnnnnnnnnnnnnnnnnnnnnnnnnnnnnnnnnnnnnnnnnnnnnnnnnnnnnnnnnnnnnnnnnnnnnnnnnnnnnnnnnnnnnnnnnnnnnnnnnnnnnnnnnnnnnnnnnnnnnnnnnnnnnnnnnnnnnnnnnnnnnnnnnnnnnnnnnnnnnnnnnnnnnnnnnnnnnnnnnnnnnnnnnnnnnnnnnnnnnnnnnnnnnnnnnnnnnnnnnnnnnnnnnnnnnnnnnnnnnnnnnnnnnnnnnnnnnnnnnnnnnnnnnnnnnnnnnnnnnnnnnnnnnnnnnnnnnnnnnnnnnnnnnnnnnnnnnnnnnnnnnnnnnnnnnnnnnnnnnnnnnnnnnnnnnnnnnnnnnnnnnnnnnnnnnnnnnnnnnnnnnnnnnnnnnnnnnnnnnnnnnnnnnnnnnnnnnnnnnnnnnnnnnnnnnnnnnnnnnnnnnnnnnnnnnnnnnnnnnnnnnnnnnnnnnnnnnnnnnnnnnnnnnnnnnnnnnnnnnnnnnnnnnnnnnnnnnnnnnnnnnnnnnnnnnnnnnnnnnnnnnnnnnnnnnnnnnnnnnnnnnnnnnnnnnnnnnnnnnnnnnnnnnnnnnnnnnnnnnnnnnnnnnnnnnnnnnnnnnnnnnnnnnnnnnnnnnnnnnnnnnnnnnnnnnnnnnnnnnnnnnnnnnnnnnnnnnnnnnnnnnnnnnnnnnnnnnnnnnnnnnnnnnnnnnnnnnnnnnnnnnnnnnnnnnnnnnnnnnnnnnnnnnnnnnnnnnnnnnnnnnnnnnnnnnnnnnnnnnnnnnnnnnnnnnnnnnnnnnnnnnnnnnnnnnnnnnnnnnnnnnnnnnnnnnnnnnnnnnnnnnnnnnnnnnnnnnnnnnnnnnnnnnnnnnnnnnnnnnnnnnnnnnnnnnnnnnnnnnnnnnnnnnnnnnnnnnnnnnnnnnnnnnnnnnnnnnnnnnnnnnnnnnnnnnnnnnnnnnnnnnnnnnnnnnnnnnnnnnnnnnnnnnnnnnnnnnnnnnnnnnnnnnnnnnnnnnnnnnnnnnnnnnnnnnnnnnnnnnnnnnnnnnnnnnnnnnnnnnnnnnnnnnnnnnnnnnnnnnnnnnnnnnnnnnnnnnnnnnnnnnnnnnnnnnnnnnnnnnnnnnnnnnnnnnnnnnnnnnnnnnnnnnnnnnnnnnnnnnnnnnnnnnnnnnnnnnnnnnnnnnnnnnnnnnnnnnnnnnnnnnnnnnnnnnnnnnnnnnnnnnnnnnnnnnnnnnnnnnnnnnnnnnnnnnnnnnnnnnnnnnnnnnnnnnnnnnnnnnnnnnnnnnnnnnnnnnnnnnnnnnnnnnnnnnnnnnnnnnnnnnnnnnnnnnnnnnnnnnnnnnnnnnnnnnnnnnnnnnnnnnnnnnnnnnnnnnnnnnnnnnnnnnnnnnnnnnnnnnnnnnnnnnnnnnnnnnnnnnnnnnnnnnnnnnnnnnnnnnnnnnnnnnnnnnnnnnnnnnnnnnnnnnnnnnnnnnnnnnnnnnnnnnnnnnnnnnnnnnnnnnnnnnnnnnnnnnnnnnnnnnnnnnnnnnnnnnnnnnnnnnnnnnnnnnnnnnnnnnnnnnnnnnnnnnnnnnnnnnnnnnnnnnnnnnnnnnnnnnnnnnnnnnnnnnnnnnnnnnnnnnnnnnnnnnnnnnnnnnnnnnnnnnnnnnnnnnnnnnnnnnnnnnnnnnnnnnnnnnnnnnnnnnnnnnnnnnnnnnnnnnnnnnnnnnnnnnnnnnnnnnnnnnnnnnnnnnnnnnnnnnnnnnnnnnnnnnnnnnnnnnnnnnnnnnnnnnnnnnnnnnnnnnnnnnnnnnnnnnnnnnnnnnnnnnnnnnnnnnnnnnnnnnnnnnnnnnnnnnnnnnnnnnnnnnnnnnnnnnnnnnnnnnnnnnnnnnnnnnnnnnnnnnnnnnnnnnnnnnnnnnnnnnnnnnnnnnnnnnnnnnnnnnnnnnnnnnnnnnnnnnnnnnnnnnnnnnnnnnnnnnnnnnnnnnnnnnnnnnnnnnnnnnnnnnnnnnnnnnnnnnnnnnnnnnnnnnnnnnnnnnnnnnnnnnnnnnnnnnnnnnnnnnnnnnnnnnnnnnnnnnnnnnnnnnnnnnnnnnnnnnnnnnnnnnnnnnnnnnnnnnnnnnnnnnnnnnnnnnnnnnnnnnnnnnnnnnnnnnnnnnnnnnnnnnnnnnnnnnnnnnnnnnnnnnnnnnnnnnnnnnnnnnnnnnnnnnnnnnnnnnnnnnnnnnnnnnnnnnnnnnnnnnnnnnnnnnnnnnnnnnnnnnnnnnnnnnnnnnnnnnnnnnnnnnnnnnnnnnnnnnnnnnnnnnnnnnnnnnnnnnnnnnnnnnnnnnnnnnnnnnnnnnnnnnnnnnnnnnnnnnnnnnnnnnnnnnnnnnnnnnnnnnnnnnnnnnnnnnnnnnnnnnnnnnnnnnnnnnnnnnnnnnnnnnnnnnnnnnnnnnnnnnnnnnnnnnnnnnnnnnnnnnnnnnnnnnnnnnnnnnnnnnnnnnnnnnnnnnnnnnnnnnnnnnnnnnnnnnnnnnnnnnnnnnnnnnnnnnnnnnnnnnnnnnnnnnnnnnnnnnnnnnnnnnnnnnnnnnnnnnnnnnnnnnnnnnnnnnnnnnnnnnnnnnnnnnnnnnnnnnnnnnnnnnnnnnnnnnnnnnnnnnnnnnnnnnnnnnnnnnnnnnnnnnnnnnnnnnnnnnnnnnnnnnnnnnnnnnnnnnnnnnnnnnnnnnnnnnnnnnnnnnnnnnnnnnnnnnnnnnnnnnnnnnnnnnnnnnnnnnnnnnnnnnnnnnnnnnnnnnnnnnnnnnnnnnnnnnnnnnnnnnnnnnnnnnnnnnnnnnnnnnnnnnnnnnnnnnnnnnnnnnnnnnnnnnnnnnnnnnnnnnnnnnnnnnnnnnnnnnnnnnnnnnnnnnnnnnnnnnnnnnnnnnnnnnnnnnnnnnnnnnnnnnnnnnnnnnnnnnnnnnnnnnnnnnnnnnnnnnnnnnnnnnnnnnnnnnnnnnnnnnnnnnnnnnnnnnnnnnnnnnnnnnnnnnnnnnnnnnnnnnnnnnnnnnnnnnnnnnnnnnnnnnnnnnnnnnnnnnnnnnnnnnnnnnnnnnnnnnnnnnnnnnnnnnnnnnnnnnnnnnnnnnnnnnnnnnnnnnnnnnnnnnnnnnnnnnnnnnnnnnnnnnnnnnnnnnnnnnnnnnnnnnnnnnnnnnnnnnnnnnnnnnnnnnnnnnnnnnnnnnnnnnnnnnnnnnnnnnnnnnnnnnnnnnnnnnnnnnnnnnnnnnnnnnnnnnnnnnnnnnnnnnnnnnnnnnnnnnnnnnnnnnnnnnnnnnnnnnnnnnnnnnnnnnnnnnnnnnnnnnnnnnnnnnnnnnnnnnnnnnnnnnnnnnnnnnnnnnnnnnnnnnnnnnnnnnnnnnnnnnnnnnnnnnnnnnnnnnnnnnnnnnnnnnnnnnnnnnnnnnnnnnnnnnnnnnnnnnnnnnnnnnnnnnnnnnnnnnnnnnnnnnnnnnnnnnnnnnnnnnnnnnnnnnnnnnnnnnnnnnnnnnnnnnnnnnnnnnnnnnnnnnnnnnnnnnnnnnnnnnnnnnnnnnnnnnnnnnnnnnnnnnnnnnnnnnnnnnnnnnnnnnnnnnnnnnnnnnnnnnnnnnnnnnnnnnnnnnnnnnnnnnnnnnnnnnnnnnnnnnnnnaattagggcaaaccggccggagatccctgagcgggctaacacgatacccggcacggatctgcgacaaagggcgtaagtggtgcacatgagcttaatcctctgctgccttcccgtatgtccgtccgaagtcaaacccgcattacggcacaactcgccccgaaatgttctatgcacttccggcgggcaatgaggttccgctcgaaggcgttcacggaacctttcgaaccgccccttctggaaatacttctcctgaacggatttcatctgggtaaaagaggctttctgtcagaacctcggtaagccgccttttccgatagttgatttggagggcgtcacggtacgctgagatctggggcgagtcaaaaatcttcttcgaggcctcagagtaggaattccaaagcttattgatctctgcataaagaatgcaacggcttaggacaaaaaattagggaggttcgattgcaggatgcatccgcgcagtttctctggagaggttcgaattccgtggatcgagcggatgatatcgttcatcagctggtcaacgccgagtggggagccattggcaagttctcgtttcgccaaagaccaaagaccttaatcgggattgagttccggggcataggcgggaaagtgcggcacatggagacgcggatggcgatgaaggagttgcgccaagggttcaccgtgatgcgtggaggaattgtccagcaggacgacgaccgagccccggaggtgccgcagcagtttacggagaaaccggcacgagcagatcggggacccgactttggccgacagcattttcgaccgtctggtacacaacgcccatcgcatcgagatgcacgacgagtcgatccgcaaagagcgcggcgggaaaaaagcctgagccgaaaaaggaagataccacgggtcgagggagcgcccgatccttgatcgtgggccatccgggcgcaagattttagagaggaaggttgagattttggccccacacgtagaaacaagccctgcaggaaacaagaacagcctcccgatgaacttaccctgagcgtcgcttcgctcagacaacggcgagatgaaaagcgcggtggcggcggcatctatctctctgggaaggagaaaaaaccgtgaccaggatcggatttcagttgccccgtccccgtcacttcaagcaccataacaacgtcagcgtcgcttcgctccgattgtgatgattattacagaccggaataagccatcacgataaattcagaatcacccgttaccatcatcggaatacgcacttggctcaaggtttaagccgaacaatatttgaataacccgattggccagcctcattaagagcacgcacgcgataggccactggcactccgggagggcacgtggtgtcggtgaattggaggcggcttgctggaagaagctggattctccgccacagccccgcactcgcttggcgctccaccgccacttgatcggggtgacctccgtgcattttccagcgcaaatgaactcctgccactgtccgctccgcagtcaaggagctcggcacctcgggtagcactcgccagtcgaagtaactcgcgtcggcaatcgccatgacgctgtcgcggacagggagcacttcgagtgtgccgggcttgccttccttccaccggagctgtcggagactcccggaaaccacgtcaatcagcaccggatgcctgatcccgcttcctttcaccgtcagttcttcataaaaaggagggaaaatcttccccggcagactgtgcgcggccaaccagtaggcgacaatggccctgccgttatggttccgaaagccataggcataaaaagggtatcccgactttcgctcgagcgcaggaattcccggtcctgtcacctggattgaggcgtccaggcgggtatcggaaaaaagcgcattcgtattggctagcgcataaaagacagggcgtggcgtgaaatcatccggcaggttgcgcaggccatgaatcatcccgaaatcgtcatactcgttgccgtcagtggccgaggtgagtagccagacgaaggtcttgacaccagccgcccaattgtagaccaaaccccgaggaatgtacttagcctgcactgactcatccatccctgtccaggaagggatggaattaaattcatcatcccagaattggatatccggacgaatgccgggataatgtcgtacgaactgccgaagtttggcaggcgactctggcccataggccccgtagtccatcgattccgggttcatgttgatcccgtaacctgggtacgtgtgataagcaaagatgttgattcccgaagcacattggcaacggtccaaagcgcgttgggcgaaatcgcgcttgggttccgctagtcccccaaagatcactttcgcctccgggtccgtgctgtgcacggtcacgacaaaggctttcaggagacggccgtactcctcaggatttccccacgggttccaatagccgatgtcttcttcattccaaagcgcccaatagcggatgcggccccggaagtgctgtaccatccaacgcacgtagcgggagaaggccgcaatctgttcgggcgtgcgcggcggccaaaagaccgagtaaaggctgcggtcatcattatgaaacgaacccggctcgggaatgatagaatcgggcaggcggccggagggcgatgtatacatggggtttccgtaaagcaattgcgcttggatgtgcacgccattatcgaccagagaattgatgtagtcctcgagttcgggtttcacagcataccgcccccgccgctgttctacccagtcccaactggtaaagtcagagctgttttcatattgtccgatgcgaatccacttcactccagcatcaaacattcgagtccaccaccaacgatcccaagggaggtagggatcgcgcggcagatcagagttgatgcccaacccgtcagtgatctgcgaggagcgcttgggcggaacgtggtccggcaagccaggggaggagctttgccccgcaggaagggatgcgcagcacaagaccagggctggccagcaacatgccagtgcccatttcaatcccggtttccgttccatccgcaacacctcttcacttcggataaaagccttagcaacgccggcgcccagaattccatgcaggaacgtctaacaccccaggcaagccgtaattctttcattcctctaccgtgtatgcgcgctttgtgccgcatctccgcaggctctgccgcattggcttagacgcaacgtccagctcgagaaagcttggggaataatcaggccaaacgccgcacatgctccacgagttccctgtgctcgctctggtcgaggtgatatgcgggttcacggcaagaagccgtagaaaggatgccgcgcagcacaagcaattccttttcgcaggcaatcagcatttcgattgactgcatcatgaagttcagaagaggcagaagctcctagtggaggaagcgcgccccttcgtgtgcattcgccgcctgcagccgccagagctgaacaaaaacaaacgccagcgaggcactaggcatgcagccgtccacctgccacccagcatcgtggggcaattgcaaccccatgtatcctaccagagtttgtaggcgcccgccgggaggattctcttaaccgcgcaattagtcggccaggggggacgaggtctaccttgacatgagtgaaattcgggcagtcgcgcttcaaggtcaggaaatgctccccatcgagcgtgcgtcctgtctggagcggcgcatactggaccatcagcggcgaaggcgggtcctggggtccatgcaagggtgggcaagattccagaattctctgcccgagctcatttgagaaggcgcgtaagtaactatcgatcgtcgtaggtagttgcacagaaagtccttagagtccgaattcgaaggattggcaggcccaaggtcgcggtgaatttttaggccccggcggggtgcccggggagggaaatctggattcagatgcttacgaaactcatggttgaacgtctactatttttgatggtaggatatctcccatgaagaccagtaaacagacagcggaccgtctggagttgatgcaaggaacgctgaacatgctgatactgcgcacgctcttgctcggcccccttcacgggcacgccattgccaaacacatccggcgcaccacagatgacgtattgcaggttgaccacggctcgctttacccggcacttcatcggctcgaacgcaaagggtggatctcggccaaatgggaaatggcgaaggataggaaccgtgagttcaagtattaccgtctcacaccggccggcaggaagcaacttgccaccgagcactcgaaatggaagctattggtggcctccatcgggcgcgtcatggaacctgcagaggaaggatgagatgagcatctggtcccggttgaatctatgcgttccctggttccgtcggcgtgtccgcgtggctgatctggatcgcgaactgcggaaccacatggatttagaagcggaggagcagcgagaagcaggcgcatcacctgaagaggccacctatgccgctctgcgggccttgggcaacgcgacacagatcaaggaggacgttcgcatggcatgggggttccagtggctcgaaacgctgcttcaggacattcgctatggcttgcgccaactccgccgaaatcccggcttcacagccattgccttgatcaccctggccctcgggattggtgcgacgacggcgatattcagcattgtgaatggcgtgctactcaatcccctgccgtatcctcatgcacctcggcttatggcgttcgctgagaagctgccgccatttcaggattttgcaatttcctacccagactttctcgactgggtgaagatgaatcacacttttgaagctctcgccgcgtaccggcacaccgacatgaacttaacaggctcaggcgaagccgaacgcgttaaagtcacccaagtctctgccagcttctttccattgctcggcgtgaagccggtgatcggcagaaatttcgcgcccgcggaagaccggcgaggcgcggcctcggtagtgatcctgagtgagggattctggaaaagcaagtttggcggttcgtggcaaatactgggtaaagtgctgaaactcgatggaaagggctataccgtcgtcggcgtaattccgaagagcttttacttttgctgcgagaacgagaattttgtcctgggcgacgtctacactcccatcggctcctacgacaatcaatggatgtcggaccgcggcgctcatcccggaatttttgcatttggccgattgaggcgcggtgtaacactccagcgggcacgtgctgatatggatggaatcgcgcgagacctcgcctcggcatacccggactcagataagaacgtaggcatttcgcttactccgctcaaggagcgcatggtgggcaatgtcgagcccgtgctcctcgtcctgttggcggcggtgggattcgtgctcctgattgcctgtgcaaacgtcgcgaatctgcttctggcgcgtgcggcgggccgcaggcatgaattcgcgatccgtgcagctctgggcgcgagccgggcccgtgcgattcgccagcttctggccgaaagcgttctgctggcgctcgcgggcggcgggcttggacttcttcttgcatcttggggaacaaaggctgctgttgccatgcttccagaggcgttaccgcgggcaaatgatgtgcggctcgacccgcatgttctggcttttgcgctagttgtctcggtcctcgtaggcgtgctattcgggctcgctccggcgttacagagctcccgccccgatttacacgagggcctaaaggaaggcgcgcggggctcgatcggcaccagccaccgcacgcggcacgtgcttattgtaatggagatggcgatggcggttgtgctgttgattggcgcaggcctcacgattcgaagtctcgcacgcctctggcgcgccaaccccggattcaatccccataacgtgctgacgttcaacgtggcattgccaccttcgacgggaaaagaaacgcccgatcagattcgcgccagcttacgtcaattgacgggagccattgccgctgttcccggtgtgagggcggcggcgataactgatggcgccttcccgatgcaagggggcaatattgttgggttctgggctgagggacagccaaagccggcaacggaaagtgaaatgcccaacgccgtgaactatattgtgggcgagaattatttcaaggttatggggattccaatcctgcatggacgccttttcacccggaatgacgacatccattcgcgcttcgtcgccgtgatcgacgaggatttggcgcgaatctattttccgcatcaggacgctgtcggaaagtacattcacctcgcgggcctggccgaaccgttcgaaattgtaggtgtagtaggccacgtggaccagaacggactcgatgaggataaacgatcagcccgcttggttcagatctacattccggtcttacagattcccgaccagcttatttctttccttgcgaagacggagggtttcgtggttcgcacgcagtcaccggggtttgcgagcatagaagcgatccgcagggcagttgaaaggatgaatcgtgcgcaggtagcctatggatttgaatccatggaagaaattatcgcaacttctcttgcatcacggcgctttacgatgattctgttagccgtgtttgccgcactggccatcacgcttgcgagcatcggaatttatggcgtgatttcctacagtgtggctcggcagacacacgaaataggcgtccgcatggcgcttggggcacagccgctcgacgtgctgaagcagattgtgggacagggattcaagttgactctgatcggcgttgcaattggaattgttggcgcgttgggtctcacgcggttcttatcgagtcagctctacgctgtcaaagcaaccgatcctttgacctttatagttgtttcgctcgtcttgaccagtgtcgcgctgcttgcgtgctacattccagcacggcgagcgaccaaagtcgatccgatggtagcactgcgacacgaataggcggcatcgagcaaacttggcagccgtggccagcgtatgggcccgttgctctccggtaatttgatcgctccgccccggataccacgcgagatccaggtcaagaacctgcctgttgtcccggaaatcaaaaccggggagcaaccgattccgatgagtgaggtaattgctttccgtctccgcagttcagctgcagtaattgagcggcttggttcaagccatgttcccgggccatggctacggccagggtccacagcgtttcggggaggggtgaaaaacgcgggcgagtctcgcgccactgctcgaactgttggcgggcttgctccagcgtcgtcggaagggcggggatgttctgggtcgtcatcagtctcctcccggccctgatggggccacaagactgacgatactcacttctctcacctcaagtcacgcacgactaacttaagcgcacaatccggcacaccctggaggcgaaaattggcggaatttgactgcgcaaggggtattgtcgcaacgtggtcaaggggttgcagtagcgcgccccgtatatgaaaggctttaagccccgttagagcgacgcactgtaacgctcattgcgtgtgctgtgacaaccagttccgcgaacgccctgggttcgagtgcaaatcgcgctcccgcgtgcttccccatcacggcgtaggccgcgatcggatccaagcttaccttgatgaattcatctttcgccataatcgtcggaagcaaccgatggctgcattccaaaccctgctgggtctcggaaccgggcacaaatccgcgacccacaaggacctctacaacgggcggacgttctcaaaagcctatccaaggcagaccacaagctattggggtttgctgaaacaaccggataagcatgagtaccctattttcggaagccgctccctcgtggaccacttcttgcgaggccttcctgcagcgtaagaattggcgcaagctctgcgggggcaatgaacttctttttcactgttcccatcgccacgcctcctatgctaggagaaattcatacgtcattccacagggagttttttcttacaccgggtcccgtaccgctgtcgccccttctcttaatcggcagagcatcacagcaacttccaatcagggggtacacatctgctacaatgctcccacagttttaaggtcagaattgaggttcgcgtcggttcatgaacccagcggtgtcctgtgaaactccggagtgctgagtgcccgaagatcaggaactcgtcaagcgctgcctggccggtgatgatgtggcctgggaaacactcctcacgtttcatcaccgcaaaatttataatctgtgctatcggttcacaggaagcagcacggaggctgaggacttgacgcaggaagtgtttatcaaggtttttcagaccctgcggactttcgaccccttgcaggggcaattcgcaacctggttgaatcgtgtggcgaggaatcatctggtcgatcattatcgcaaggtcagccgggatcgggccacggcctcgctcgacgacgaagaagaagggcttcatccccgggcagctccctcggcggaacctaccaagcaggtcgaagatcgggagcggaaggaactgctgcaagcggcgctcgggcgtctttcaccggacatgcgggaagtggtcatcctgcgcgaccttcaggacctggactatgcggaaatcgcccaaatcctgggcgtccccgaaggcaccgtcaagtcaaggattaatcggggaagattggaacttggacgtatccttaaacgtatgttgaagtaaggagaggcgggtagaagaagcgatgacgcactgggaagtctccaatcttctgacggactattcggaaggcgcgcttgatcgggcgcgggcggcgcagatggaggagcatcttgcctcctgcgaggagtgccgtgcgatgctggaggatgtgcagtttgccctccgcaccctgcgcgccgcagaggacgtggaaccctccccctggctggttcgacgcattctccgggccacgatcggcgagcgcaaaccccaatggggggagcggttaccaggctggatgcagtgggcgcttcggccgcaggtggtctataccgtttcaatggctgtgttttcgctttcatttatcctgtatacctctcgcgtgaacctccaggcggtggaactgcggaagctcaatccaaccacatgggtctaccgcgcagatagccggggccatctgctggtagcccgagccgagaaattctattacgatctgcggtttgtttacgaacttgaatcgatccttcggcagttgaaacaacagccgtcatcgcagcctggatcgccgcagagtccgcaaaagccgggcggcggatcatcggatattcaatcgtccggcggtggacaactggctttggaatatcgacagaacgcgccgaccatccgattccaggagaccatgtgggaacggggaagaaggagccttataccatgaaatgcgcaaaccatccggaaatcgatgccgtcgcttattgcggccaatgtggccacgcactttgcgcggaatgcaagcgtgaggttcgcggaattgcttattgcgaaaactgcctggacgcgcgactccacaccacgagcttttcttcagggtttggtcagaatttcggcccccagccaggtttggcattgtttctgggattcattccaggtgtaggtgcgatttataacggtcagattctcaaagcgatcatccaagtcatctttttcggctgcctgatcgccctgagtcagcgatctgaaacgccgttcgacaccatttttggcctgggcgcggcagccttttatttctatatggtcatcgattcttaccagacagctcgccgaaagcagttgggccaacccgtcagcgagctgatgggagttggcgaattgcgaatgaacgctccagtgagcgcggtagttctgatcgcgctcggagtgttgttcctgctcgacaacatgggagtacacatctttcgggacatcggaaggttctggccagttcttctgatcgcgctcggagtgattctgcttcaaaggaagactcaaatgttcggaggccggcctccttcaggatcggaaacctctaatcccggatttgaagccaagaatcagcataatcggataggtggggagggaagggaatcgaaagagctctaacagaatgctgaagaactctttcggtctgtcattccaaggagctgaaggcggtcccgagtttgcgtgcgaggaatcccgcagcccctttattttcaggtgagattccccgttgggctcgacatgacaaacgtctttcagcagcccgacaggtcaggcaaagttcaatttttcaggagggtatcatgtctgcattggcgaatcctgggttagtcgttccgatcagtgcctttatcatggttgttttgattgtggctgttaattgcatcaagaccatgcgcacgcgagagcttcaagcgcatcaggaactccgtatgcgtgaaatggagcacgaacgaaagatgaaagagctcgaaatcgagaaggccaaaatcgagcttgaaaaggcgcgacttcccaagcccgtagggtcagtaccgcaatgaccgctcgcggtttcagcctggggcatgctcagatcgcgcctcctgctgagggacgcatgatgaaacgccttggtggttgctggaaggcctcataacctctcatccctagcagcccaaggcaaggaggaatctcgcggatcttttatttgcagagcgagacttctcgtttcgttcggaatcacaataccgagaatcgtttattggagttggaggaggattgttaacaatgaatccgggtgtgatggtacctctcgctttgtttggattggttgtgtttgtcatcgcgctgcagtgtgtggtgaacattcacagcaaggaggaagaagtcagacaaaaactgcttgctgaggagatgtctcaccgccaggcgatgcaggaactgaatctcaaactccagcgaatcaaagaaggactttcctgaagttccggtgtgcgttatggcgggtggcatcctgctagggggagcaccctccaaaatggacaggtgggtctgcggaaagttggaactcttgaaggctgaaaaacgtaatgtccgatgagcgaaatttcgggcgtatcttgagggatgcaacagggccggtgatgttgatcctggtgggtgccctgtttctcctgaaccaatacgttccgagcctgagcattgcccggacgtggccgatcattctgattgttttaggagtattttgggcgctgcgctcattcactcctcccagaccgccacgcgggccgcaaatcatggggaagccgtaacctgtcgcagggcgtgggagcggttttggctgctatcggtgccacttgtttcagttcaggagctggcaaaaggaacaacaggcatgagtccactctactatcgccgagggtccatcttttgggcgttaattttgatcgcagtcggtgtcatcttcctggtccccaatttctatcctaacctgcatccctggtatcttatcgcccggtattggccggttctgatcattatctggggcctgtcaaaacttgtcgattacgttcacgcgcatagccaccctgaagtctcatcaccgcctctattttctgcgacggaagttattcttctgctgctgattctggttgttggaactctgctttctcacatcatcctggctccctggcatgaatggagcagggaatggggaattcatctggaccagtcggattggaataatccttttctgaattcgtacaactatacgcaggatctttcacaaaaagttcaaccaggctccaagccaaaactcgtcgtggtcaatcgtcggggcgatgtcagcattcaaagctcggattcgcccgagatcagcgccgtcgtcaaagaaacgattcgaacgactagtgaggaagaggccaaaaagctttaccgccggctcaagcttcagcttgccgatgaaaatggacagtatatctttcagccggattggggatcgctcccgaacggcagcaacaacatacggttggatttaacctttcgtacccctaaaagcacttccacggagatttcgaccgatcacggagatatcctgctgaatggattgcagggcgatcaaagtcttacggcgagggcgggggatgtgcacgccgcaaagatcaacggcacggtccgagtggaaaaatccggaggggccacagagattcgcggggttcgtggcgatgtggaaatcagcgggcggggcggtgacgtgcaggtggcggatgtttcaggtgcggtcagcgtcaaaggcgaattcaacggctcagttcagttctccaatatccaccacaacctgagtttcaagtcctcaagaactgatttggcggcgcagaacctggccggcaagctcgatatggagctcggttcgcttgagatcgtgaatctctttggaccgttagaccttacaacgcgccagaaggatgtcagcattcagggcttcaaacagcgggtgaagattgaggatcggaatggaaacatcaaccttcacgctgattcacccccggcctatcccattgaggttgatttgaaaaacggggatattctccttgcccttccaccctcaagcagctttacgatcgacgcggcttcgcatcacggcgaagttgactcggactttgtggcgtcgtcgctggtcgtggagcgccagggtggtgagccctccatcaagggtgcttacgggaagggagggcccttgattcgcctgacgaccacttacggaaccattcacttggtgcgtgagacggcagaaaaccccacaccgtccaagtcacctacggcgggcgagacgcaggtgagtttgcaagggaagcttcatgtttccggaacgcagcggctcacaatggttcagtgacctgatgcaggatgtcaaagaattccgggaaggaaatgcccacacactcactgccccgaatgtcaacaccgccttcgctgagaagccccgccacagcaaatgccatcgcgatccgatgatcgccgtagctctcgacttccgcgctatgaagcttctgccggccttccactcgcagtccatccgggaattcttccacttttgctcccaagcggcgaagattttccgccacggttgccagccgatcgctttctttcactcgcagttcttgggctccgtggaaccagagtccctgttcggtttgtgtcccaagaacagccagcaccggaagttcgtcgatcaggtttggaaccagctcaacaggaatctcacctcccgtaagcgggttggagcgcacgcgaaggtcccccaccagctcgccgtttgaaacccagatgttttcttgatggatgttcgcttccatgtgattgaggatggtgagcaccgcagttcgtgtgggattcaagccgacatttcgaatcacgagatccgaccccggcgtaagcaaagccgctgccacaaagaatgcagcggaagagagatcgcccgggacctgcgctttaagggaatgcagccgcgcgggtcctcggacggagatggtcccattcgtgcgagtgatggcggctcccatctgttccagcgcgatttcagtgtgatcgcgcgtgggcaccggttcttccactccggtttctccttcggctatgagtccggcaaacagaacggctgttttcacctgcgcgctcgcagtcgacggccgatgataaatcggatggaggtcagcccccataatccgcagcggtgggagcccgccttgagaggattcaattcgcgcgcccatgcgcgtaagaggatctataatgcgtcgcatggggcggcgcgaaagcgaagcgtctccgacaaggcgggattcgaactgctgtccggcaagaataccggccagcattcgcatggttgagccggaattgccggcatcgagatcgcccgaaggccggcacaggccacgcagcccttgcccccgaattcggacgcgatcctcgtcgcgctcaatcggcacacccaatgcctgaaggcaatcgagcgtactctggcagtcagcgctggaggcgaagccgcgaatctcgcttgtgccttccgcaatagcgcccagcagcgcataacgatgcgagatggatttatcgcccggcaagtgtatgacccctgtcaaccggcgcgccggtgatacacgacgaatgttgggtgaagttggtgtcggcatggtatggttctgcgaaagcacattatccctgatagacagtataccccttatgtttcctcatgaatgatcttcaaaagccccagcagtgattcgcgcgagctttccacccggttgccgtcaggccgacgataatgagtttccagtgacatcgtgccatcgtaatgatgatcgtatacggctttgatctgacctttccagtctatgaatccgccccctacgggggcccactccagccgccccgtgacaggatctttcttcacatccttgatgtgcatgtgagcaaaaagcccttccacgtggcggtaaccatccgggtagggcacttcatgcagcatcgccgcattgcccggatcccaattgccgcgcagatggggtgaattgatatcttttaagagacgtccaagctcctggccggtgccgatgttgcactcgtgttcattctccagcaccagcagaatcccgttctgacccgccaaatgcgccgccttcgccagacgatcgcgcacgtaaggataggctttctcggggttttcaacccgccagtagctgaaaatccggactttggaagtgccaaaaaaacgggcaagctcaaaggattgcaacaggagtcggtcgctatcctgttctgtgaagtgagcgccgaattcgtcccgcgccgcaggccgtgcgggcatttccggcaggttccatttaaaaatgggagatccaatatcgctcacatgcatgttgtagtcattgatcatatgcttggcgcgatcgaggtcggcgtgcgaaagattcatgatgttcttgccccagatgtcgcgcaattcgcaataatgcagagagtaattggagatgaagtcgagggctgcatccagatcctcggtgatctcatccgtgatgacccctaacttgaaaggcattttccacctcggcgctgctgtaagcgatgaactgagtccgagtaaaggtgcggaaagcagggaagcgccgaggaattctctacgtgtccagctattaggcataatcagctccttggtagctaaaaccagcggtttgagatgttgacaaccaaaagccttcccgcagcacgcttgagcaggcccaagctaagcactggcccggaggctcttaacgctttcacgaatgaccaactccgttgacagaatgcgccgagtgtatggcggacccggatggtgtagcttctcaagcaagagtctcatgagtgcgtcgccaatctcttccttgtggactcgcacggtggtcagcggcggatccattagttttgcctcctcacgatcgtcaaagccgatcaggcttatgcgatcgggcacgcttacaccgctgcgaaggaaagcgcgccagatgccgtaggcgatttcatcgttgccagccatcacggccgtggcgacactcccgttcgccagcagccgcgtggcggcccactcaccatactccggaaaggccatcttccgccgcgcggttaaccccacgggagtgagtttattgaggcgcatcgcggaggcatatccacgatagcgttcctgaaaccacgggaaaaaggtgtcgccgacgaaaacaatctcgcgatgtccctggtcaatgagatattgagtcgcctccgcagtccctcgaaactcatcaaagctcacgagatcaaagtttcccaccccgtccgttgtcaacacgttgtttcccaatgcgacaaacgggatgtgaaggctctgaatccgccgcaaaaagttagcatacacgaaacctgccacgatcaatccatccacccagccacgctcctgaaggatcggaggtaaagggatttggtttgagggggtggtgggatcatactgcgccactgcataaataacgtgctgcttcagagcgctggcgcaattttccacgccctgcagaattcgggcgtggaaagagtgcataaaggggcggttgctgagcagaaagcagaccatgcccgaacgccgacgcaggatgcgccgcgcctgtgcatgcgggcgaaaatcaagccgccgcatcaccgccagcacgcgattgcgtgtcctggggctgacgttaacaccgccattcaaaactcgtgaaaccgtgcctacgccgacgcccgcttggcgcgccacgtctcgaatagtcttaactgatggaactggtttcatatctctcgacgctttggtttacaagaatgaacaaaacgaagccgaagttggtttcatgaagcaaagctttgtcatatccaaagggctgtctgcctttgggagcatagcacagcccaaagatcactcaaatagctatccctcaggactcttcgggaggatgattaaaaaatttacaaaaaactcctaactgggagattttgaatgatctctgtagcttcaggctgcctccgagttttcatgacgaatcccatcatactgcttacttagacgaatcgtatcgattaaaggtgacagcggctcatcgccgaagacaaaattgtcttgacagtcgcttcgcaggggagtaacgttctggaacgagttccaaataaacatggcaaattaacagaaagaacgatgaaaattttaaaggagagatggctgctgcttaggggcagcatttcgggaggcgaggccatggagagcaaaacgagagggttaaaagacagccttcataagggtaatgggcgtgtggcagaaggcacgagacgaattcatgccgtcaaggcctgcttgaggaaagtcacgtggattgcggccacggtggtgatggtttgcagtgccacaatactcctctacggacaggcagtcaatggcagcatcgtcggaacgattacggattcctctggcgccgtggtaccgggggcacgagtgaccgttactgaagtgaacaagaatgtcagcctttcgaccgaaaccaacagtagcggcaactattcgtttccagacgtgcctccgggcaattacgaggttacggtcgaaaagaccggatttgcccgggccgtccggagcggcatcatgctttttgtgaacagcacggcgcgcgtgaatctgacattgcgtccggggcagatgacgcagacggtgaacgtgaaaagtcagatcccgctgcttcaaaccgatagtgctcaaactggaggcacgctcacgagcctccaggcagagcggttgccgctcggcacaaatcgtaactttcagaaccttctgaatttgattcctggcgcgacgcgcactgaatacaaccattcgcatttcttcaatccgcagaacagcctgaacaaccaggtgaacggaacctccagcctgacgaacaactttcagatcgagggtgtgaatgacaacgagcgcactggtttgttgcaggtgtatatcccgcccgctgaagatattcaggaagtggatgtcaccaccagcaactatgacgctgaacagggcacggcgctcggtgctgtcaccaacgtgatcatgaagtcaggcacaaatcagttccatggcgaggcctatgagttttatcgcggccaggccctggatgcccgaagtttttttgatcgcggcccgcagggcgcacccttcgtgaaaccgcctttggtttataactattggggcgggaacgtggggggtcctatccgcaaggggaaaacgtttttcttcgcgggtttcttaagatcaacggaccacgaaggccagttccaacagctcagcgtccccacgcaagccatgcgcaacggcgacttcagcgacccggccctcaccgcggtttttgaccccgcgaccggagatgttgccgattgcctgccgggaggcaattccgccaaatgcggcaccggccgcacacagtttccaaacaatattattccacccaatcggattgacccgattgccgccaagctcctggcttttgtcccgctgccgaataataatctcaacgctccggggacacagaaatatcaacaaaatttcctcgaaacgacgcgatatatccaggacatcagttggttggacgttaaaattgaccaatatcaggggcgacacaaccatatttcgggccggctgggttatatgaggccgttcaccgagcagacgccggcttatggcctggcgggcggcccggtgggaggcggctttgaggccactggaacggacaacacttactccgccaatctcatttgggaccatattttttcccccactttgatcatgcagaaccgcattggtctgaaccgttaccggaatgtggcccagcaaaccgactatggcaccaacgcttccgctcaattgggcattccgggcgtgaacaccgaacctttcacgagcggaattaccaccattaacggatcgggcttttcaggcccgatgattggctattcggccagtctgccctggattcgcagcgagacggatttcgactatgtcagcaactggaacaaaatcatcagtaaccatacgcttaaatggggggccaaccttattcgcatccgcgacgaccttttgcaggaacagactttcagcccgcgtggggcctgggactttggctcgagccagacggcgctgaacggtgggccgaaaaccggctttgctaataactttgccagtttcctgcttgacgtcccgggtacggtgggccgcgatctgcccgtcgtcttcccggcttaccgcgcctggcagtttttcacctatttcaatgataagtggcaggttaaccccaagttgacgctgaacctgggcgtgcgctgggaattttatccgcccgccacgccgcatttcgctggcggcttttccaactacgatttcactaacaacacgctggttgtggcaggcgtgggcggcaatcctctgaatttaggcatgcaggaacgttatcatgatttcgctccgcgcgtcggtctggcctatcgcctgacgaatacgcaggttctgcgcgccggtttcggtatcagctacgagccgtttgaagacaatacgtatgcttataatttccccgtcaagcagaataattcattcaacagcgtgagcggttttggtcccgccatcctgcccgatggcactccggcgacctttgagaagggttttcctcctccgctcatcgccgcggtcccgtccaatggcatcatcccggccaacacaccgctgctgattaaccaggattacttcgtgatcaacaaacattacctggatccttatatccagtcatggaacttcacttacgagcgcgcgctgcccggacaatttaccttcgatctttcctacgtgggaaaccgcggcgtccatatccccattcagtacaatctcaacgccgtcgtggaccctgccttcctcggagcgggcccggcaggacagccgctctaccaggagtttggccgtaaggcgggcacgacgcttttctttgcgggtgaaccctcgaattacaattcgttgcaggtgaagtttgaccgccatttctcgcatggcctctccctgaccacatcttatacttacggcaaagcgctgggttaccaggaggagaacggagaaaactccaatggtgtgtcctattatgttgacttccggcgcaattatgcccgtacggattttgaccgaacacacattcttaaccagagctacgtctgggagttgccgatgggcaaagggcagcgcttttttaagagcggaccagccagcatgatcttgggcggttgggagcttagtggtatctgggagttcatgacgggtgggccgctcaacttcggttgcaattgcaagtcactcaatactcctggcaacggccagtctccctggatcagcggaccgttcacaaaactgaaggggatcgatacccagccctggtttgacaccttggtttttgcagatcccaccgtgctctttggcaaggcgacattcgggaatatgggtcgttacatgttcgctggccctaacttcttccaacttgatgccagtctcttccgacaagtgaagctgacggaaagattcaacctagagcttcgcaccgagtggttcagcgccaccaatacaccgaacttcagcaaccctgataccacgttgggagatgccaatttcggcctggtgaagggagcaggaggcgctcgcggcattgattttgctgccaagctgatgttttagggcgtggttgaaagatttttttcatcgggcattccgagtgtcagtcaaaaaaccgccgtatttcaactccgggtaaagtcagtgaggaacgacaacagccgcgctgagtgaacgaggttgatgtgccgacaagaaaagtgtggcgaagcgcagacctttttagacgtggagattttctacaatagggcctctaacaattcgcgtccaggctgaaagaggtggttctttttgtctccagcgctgctagaatgattcggctgatcaatcgatgcagtaactctgctgaaagattacgagaaaggggaagctcaatttttcatgccggactcttccgaaatcactcgtcgcgattttctgaaatccagcgccagggcaggaacagcaagtctggccgcgttgagcggagtcattctgatcacgcagcccgagcgcgtcttcggtgcaaacgaccgcgttcgcgtggcgatttgcggagttcgaggccgcggctttgatcatatccgcgaatatgcgcgtttgcccagggccgaaatcgccgcgctatgtgatgtggatgaaaatgtactcgaccgccggctgggcgatgtggaaaagcttggtaagcctagaccagagaggtatatcgattgccgcaaagtgatggacgataagtctatcgatgccgtttccatcgcgactcccgatcactggcacgccttgatcggcatttatgcctgccaggcaggaaaggacgtgtatatcgaaaagccctgctcgcacgcctggtgggatggctaccagttggtgcgcgcagcggagaaatataatcgcgtcgtgcagatgggcgctcaaagccggtcgaacagcgccgtccaggaggctatccggaaaatgcgggaaggcttgatcggcgaggtatatctcgcccgcgggctctgctataaatggcggcccactatcggccataccccggtttctcccgttcctcacggcgtgcattacgatttatggttaggtcccgcgcccgagcatccctttacccggaaccggttccattataactggcactggttttgggactacggcagcggggatctcggcaatcagggtattcatgaagtggatattgcccgctggggattaggcgtcgattggccgagcaagatttcggccattggcggtcattttatgtttgacgacgaccagcagacgcccaacgtcctcaactgcgcctacgaattcgatatgcctgatggttcccggaaaatgatggaatttgaagtccggggttggatcaccaatcatgaggcgggcatcggcacaggtgctttccgtagtcacggcgttccggcagcgggactcgcaacccattcgcacgctcacaaggccggtgcgggccttgggccagtttcaggtgcgccgcggacaattggcaatatcttttacggctcgaagggatacctggcgattgaaggctacgattcttatatgtcctggttgggtgaaagccaggaacccgggccgcgcgccaatgggattggaaatcattttgccaactttattgatgcggtcatcagccgcaggaaacaggaccttaccgcgcccattgaggaaggccacaagtctacaatgttggtcacgctggccaatgtctcttaccgtctcggacgaaccctccgctttgatggcaaaacacagaaagttatcggggatgatgaggctaatcgcatgctgcacggtacgttccgagcacctttcaccgtgcccgagaccgtttagaaagcctcctgaggacgcgacgtaccttgcctcgggaagccctatcgcccagctcttgtcgtcgctcgttgtggctttctgaatgctcgcggggtcagggtgcaaggcccggcgccaccaaacccacctcccgtcatcgctaaaatctctcaggagtgccgtggagcaatataaaaacctactgaaaacagcctaaagcaccggaatgctttgcagcgtcacgacaatagccgcatttccggtcgatgtgatagtttattcaagtggcttttatcgggagcgatcagagatgctgaaggcagcttattacgaaggtcatcggcgagtgcgagtgggtgaatgcaaaccggtagacccggcgcctgggcaagtacaaattaaagtttcgcactgtggcatctgcggcagcgacctgcacatgttccacggcgcgatggaccatcgtttccaggttccgcacgtattcgggcatgagatgtcgggcacggttcatgccgtcggcgaaggggttaagggctttgctccgggtgatcatgttaccgtccgccccctcgacccgtgcgggatatgccctgcatgccgcgctggttattcgcatgtctgccagcgcttgaaatttattggctttgacgcgccgggagccctccagaccctctggacagtgccagctcatacactccatcgattgcctgaatccttgccgcttgaaaaggcggccctgattgagccggtggccgtcgcttaccacgatgtgcgcctggcagaagttaaaagtggagaatacgcagtgattcagggcggaggccccatcggcatcctgatcgctcttgtagcccggcacgccggagcaagagtgacactgatggaagtaaatcctttccggttgaacctggcgcgtgaactgggtttcgatacgctgaatcccaaggaggttgatccggtcaaatatgtgaatgatcagacggaaacggcgggggctgacgtggtgtttgaggtttctggctctgccgcaggcgccgagactatgacccaactggcgcgggtacgggggcgaatagtcctcgtcgccattttcagcgccgcccccgaggttgaccttttccgctttttttggagggagttgcgcctgtggggggcacgggtttatgaaccgcaggatttcgagcaggccatcgcgctgaccgcttcgggagtgctgccgctcgacagattgatcagtgaggtctcgccgcttgaatcggtccagtccgcgcttgaacgtctggaatcgggcggagaggtcatgaagatcctcattcagtgtggtgaataacgcccaaaagatcgaaaaaccatgccgattttggacagattccgactggagggaaaaactgcgctggtaaccggctgccgtcgaggcattgggaaagctcttgctctggccctggcggaagccggagcggatatcgtaggcgtcagcaggtcgctggagtctgacggaagcgaagtggaacgggaagtcttgtctcggaagcgagccttcaaaggttactcctgcgattttgcaaatcgggccgctgtttatggttttatccagcgcctgaatttggatttcccgcacatcgatattctagtgaacaatgctggcagtatttttcgtaagcctgcggcagattatcccgatgaatattgggatcaattgatcgaggtgaacctcagtgcccaattcatcctagcgcgggaactgggcaagcgtatgatcgagcgccgttcaggaaagattatcttcattgcctcgttgctgacttttcagggtggcattaccgtgccggcttatgcagccagcaaaggcggcgtcggccaactgacgaaggcgttggcgaatgagtgggcggcgagaggtgttcaggtgaatgccatcgctccgggctacattgcgacggataacacggctgctctccgctctgacccggctcgcggccctgccatcctctcgcgcattcctgcggggcgctggggcacacccgaggatttgcagggtgcggccgttttcctggcgtcttctgcttccgattatgtcaatggagaaattctgacagtcgatggcggctggatggcccgataaggcttacctgagagttgaggggaacgataatcgcggcttcactcatgaagggtattcaatatgtgaccttctttatgctttgacgtcgtaatattgaataaacttcaaatctatttaaccaagtttcacttattgcaaaacggtgctttgtgaaactgagtgacagaaaatttatatttgcaaatgaaattgcttatcattagccaaatcttgggctataatgcattcctcttattgaatcgttgaaacgcgccaaaaacgccgattcaaatgcgcgtgaataggattgcggatgaatggatggagagcgacggcagtcaatcgaagggatctgtttcggttgatgggcgcgggagcagcagccgcgacgtgggttccatcgttggcgcaggcccactctcaggaaacgctaccccaggagtttggtgaggcatccggcacctggtcagcgggagttccgtttctcgagactcccgcagaagggctgcgatggttcaatgaggcgaaatttggcatgttcatccattgggggccatgttcactggccagcgtggaaatttcatggcccattatggttcctcgccctcaatggaacatcacacaggaagaatacgtaaatctctacaagcgctttaatccggtgaagtatgatccggatgagtggattgatctggcagaagccgccgggcaacgctacatgattcccgtgaccaagcatcatgacggattctgcatgtttgattcgtcgtttacggactataagattacgcgcacgccctacggcaaggacgtcatccggatgcttgcggatgcctgccatcgccgcggaatggcgctgggatattattattctccgcccgatatgcatcacccggattaccgtgatacctcgaagcctgccagcgaaaactggcatggcgagccgtggcgtccgcagtggacgatgtatctgcattatatggccttgcaggtgcgtgaactgatctggcgttacggccagccggttgaaatgtggtttgacggcctggatcatcaggaaaagtatgacggctattctttcctcgaaatgcttcgggccatgtcccctcacaccatggtgaataaccgcatcggcgttgcggcagattttgatacaccggaacagtatgtgcccaaacggattccggtgaagggaatcacgattcggggcgttaacgccgctgaggcggaaaagcttccacacggcattccgagcctccagaaattcaggccctgggaaacctgcatgacgattaataacacttgggcctacaataggaatgatcgcaattttaaatccacacgacagttgattcggacgctggtggatgtggcgagccgcggagggaactttctgctgaatgtcgggccgacgcccgagggaacgattcagcctgagttccaagagcgtttgcgagggcttggggaatggatgaggctgaacggcgattcaatttacggaaccacattcggtcccttgcaggagttaccctatggccgcacgacccgaaaggggaaaacggtttatttacacatcttcgattggccacaaagtgcgtccgtggaattggagggtttgccacggatagggagaatttctatactaagagatgggaggcctttaaagtttaaccaggattctcaacgactctcgattcatcttccggctcaggcgccggatgccgatgtcagcgtgctgaaaatcgagatgtcctaacggctttccgcgcgacctcccccctccccgcgcggagcccaccgttcatgcggcctgccgtcctcggcaggccgccggtggggaacgggccggaagcttatactgatccgaccacctgatttgtaagcgtaccgagcttttctacaataacacttacggtatcccccggtttgaggaacacctgtggcttgcggaaaacgcctacgcccggaggtgtgcctgtcgaaattaaatcacccggctcccaagtgatggattgcgaaagatagcttaccaggaagggaaccttgaagatcagatttgaggtgtttgagtcctgcatggtctcaccgttgagcgtgagcgaaatgcgcagattgtgagggtccggcacttcatccttggtaacaatccaaggtccagtaggcgcaaaagtgtcgcaactctttccccggaaccattgcttgtcgctgaactgaaggtcacgcgcactcacgtcgtgcaaaatcatgtaacctgcgacgtaatcgtatgctttgtcttccggaatgcggcttccccttttgcccagcaccaccgcaaattcagcttcatagtcaacttgcgtggagttgggaggaagaacaatcttgtcgccggggccgatgatggtgttgcaggacttcagaaaaaagataggtgctgggggcggctcctcgccttgctcgcgggcgtggtcagcgtagttaagccccacgcaagtgattttgccagggcggggaatgggcgcgcgcaagtggacggaatcgagcggcgcgatcagccctttcattgttctggcagctgaatttctggctgcctgctttcctgtcaattccctggccaaaccttttgtgacagtccccaaggccttgagccattcttcgccgcgcgtcaggacgccaagcatctcgcggggagctgcgcccgcctccgccagtgtctgcgctgcactcttgaatttggattcgctgtagagcgcgcgaggacctcgttttttggtggccaagtcaacagcaacgcggacatccaccacgttctgaccttcaaccacacccacccgcagctgtctcccggattggtatgtaactaatttcatgaataaaagctcctttgacaagaatatgtgtattgcccctggtcatgacgcggcgtgaagcttgcatcccagtctatcctccgattttgaatcgagggtaacaatagacttcactactcgcccgtcaacacaaaagcataatggcccgaacccacgcgaaacgtgacaccgtcatcggctgcctgagcgttttgaattccaggatcacccggcacatattgaccattttcccagacggtatggttgccctcatggacggtaactgttgtcatctcttcctccttgggcacgaggatcacggcgtctgcgcctacaggaatcgtgacgtccagcgtaatctttccaggtgaatggttccaggaagatgagaccgtgccgcgaatggtatgaagagtcccgctcgcccagtggaggtcctccaccagccgaggctcaattcgaatgtgctgataggccgccgtatccggctccatcctaataccggcaagcgcgcgataaaaccaggccccaacgctgccaaacattgcatgatcgtgtgaattcatcgaagggccggtcttatcctgccacagttcccagagggttgtagcgccctttttgaccatgtagccccaacttggatacgtcgtctgagtggcaagttcataggcaacatcaggatgaccgaacatggtgagcgcaggcatcagccacttgatgccaatgaagccggtggtgagatgggtgttgtggtagtaaacgatatcgtcatagaggtcgcgcatgataaggccgcgactcttggcggggggaaggttcaacgccagagccatggcgttagcggtctgcgtgccggttgcataaccacccgcatcgggatgaaagtatttgcggttgatcgcgtctttgatctggcttgccagttgggaataggtctgggcgtccgccgtgttgccaagcacgtgcgcaatccgggagagaatccaagtgtcatagtaataatacgccgcagaaacaaaatcccccggtgtgtgcacgatgggaacccagtcgccataatagctgtaggtcagcagattgcccggagctcggctgcgcagaaactccacatatttcttcaccccctcatagttttcctccaggatgcggcggtcaccgtattgctgccacatgtaccagacgagttgtggataagcggttccccaggctgggtctgccggccgcgagccataacggtgcggcaccgtatcggtcacagtgccatcggctccctgaacgtcatggatatcccggatgaaattggtgtagaaggcagccatatcgaagttcatcatggcttcctccgccgtcacctgcgcatcgcccatccatccctgacgctcgtcacgctggtcacagtcagttgggatgctgaatagattcgtaagctgcgaccagtggatgaggtgctgaatctgattcagaatctgtttggaagccacgaagttcccagcagattgaactgctgtgtgcaccacctcgccgcgaatagaatcaaggcccggagtgcccggaaagccggtgacctcgacatagcgaaagccgtgataagtgaagtgggcgtggtaggtttcccagcccccgcctttgaggatataaatatcacgcgattttgcagcgcgaatattggcacgattaatcatgccgttgggatagagcagttcggaatacctcatcattacgcgtgccccgcgcggcccgcggacgtgcagcttcgcccagccgctcaggttctggcccatgtcgaagacatagacgccaggctcaggattggtgatggaacgaggtataatctcgcccactcggcgaatcggaggcatcatctgcgaggaaatggctccgtctgtccccgggacaacctgtacatttgaccacgaagaatcgtcgtagccgggccggtcccatcccggcgtttcacgccgagcatcataaatctcgccgtcgtagacgctgtcactcacaataggcccctgggttgctttccaagagccgtccgaggccaggctgaagtgctgaccgttggctagttccacattcatttgcaacagcaaggcaggctcggaataatagccgtgaaacgaacgcccgtgcgaaagcgtggcccatccgccgcccagcatgacaccgatggcattcgcgccctggcgcaaaaacggggtgacgtcataagtcgagtaaagcacgcgcttgggataagtcgtgaatgctggatcgagaacgcgatggcccacacgctgtccattcagatgaagctcgtagtagcccagtgccgtggcatatacccaggcgcgtgttggctgcgacggcaactggaactccttgcgcaactcgttgcccccgctgatccatttcccttgccagtcatcgcgggaaagcagacccatcgcgaaacttgccggttcactgtaggcgctggctcggccctcgcgatcccagaaccgcacagcccagtagtagatgtgaccgctggcgagcggcttgcctgcgtaggacacttggattgaatgatccgaggctaccttaccgctgtcccactggtcgccctgttgtcgtgccagccgctgcggacttgttgccaccaaaatctggtaggctgattgaagctcgccgcggtcggaatcctccagcacccatgaaaatcgaggctggcgaacgtcaatccctacagggttcgtcaggtattcgcaacgcaaatcgaaaggcgcggaagggccgacctgactgtagctcagatgagtcgagcccgcgacactggcaacaaaaatgcataagaagagcaaacgaatgaacttgttaggctgcatgaagtccctcgcaaagatttggaatgattgaggtgttcctctgtgaatttcccgcttcccgtgcggtctggtctcctctcgcattgggttctccgccatggggacccccatgatcgccccttggtccattctcgggagagagggaattccttcctcgcttatggaggaggaaaagtatctgttttaaagaattggtcgagacaggatacctggtgtctgccctcttcggcattgtcaaagtctttgagtttcggactacatcaattttttccagcgttcccggaaggtttgaggtgcgagggcagggaagtctcgcccttcagtccagcgcgacatgggaaagagcggaaatttccggatccagccctggcgggcataaaatttttgtccccatcgtgccaccctgccgcccaaggcatagattcgcgggcgtttcatagcccaggcccatatttgcatggaggcacgctcgccccgaggcggtccgccggaaagggcgcgcgatgcctgcttctgtgcttcgctgcgcaggtgcagcagcaggtctggaatattgattctgaccgggcaaacttcgcgacacgcgccacacagcgaagaagcaaacggcaactcgcgcgccacgccgatgccgttgaactgaggcgtgatgagtgcgccgatcgggccgctgtaaacccagccataggcatggcccccaattttccgatagaccgggcaggcattcaagcacgccccgcagcgaatacaatagagagcttcgcgcattttttcatccgccaacgctgccgtgcgaccattatccacgagcaccacatgcatttcatccggcccgtcctcgctcgcgcgccgcggcccagtcagaagcgaagtgtaggccgttaacttctggcctgtgccggagcggcccaaaagcctaaggaaaacggccagatcctcaaatcgagggatgatcttctcaataccgatcagcgccacatgaacgcgcggagaggtcgtgcataaccgaatgttcccttcattttcagccagcaccaccgtaccggtctccgcgacggcgaagtttgcgccgctaacgcccatttccgcgcgcgcaaacgattcgcgcaacacgcgacgggcaatagcggtcaggcgctcaggttctgtagtgcgttccgcatgtaggtgctcgacaaacaggtcagacacatcctgccgcgttttgtgaatggcgggtgccacaatgtgcgccggacgatctccggcaagctgaataatcagctctcccagatcagtctcaatgccccggatgccggcggcttcgagggcctgattcaattccacttcttcacccaccatggttttggacttgacaaattctttgacgccagcctgctgcgcgatctcgcgcacgatcctgcaaacgtcttcagcagtctccgcccagtgaactttcccgcccaggcgctcgacttgatcagcaaattgcgccaggtattcatccaggtgctcaatcacttcccgcttcaatgctcgcgcccggtcgcgtaatgcctcgaagccgggcacttcgctgatggcttgcagacggtgcgtgtagagccgcagggttgaggagcgataagcctcctgcaagcttggcttctgaaataattctttggcccgctcgtgaatatgcgcgctttgaacgccggtttcaggcatgaaaagaccaaaaagttaagatgaacagccggtcagtcacctgctggtttgctttccgttgccaggcgtgtgcgatctgccgtttcttcagtctgcgccaacaattgcgccaaatgcagggttttaatgggcagaccccggcggtgaatcacacccgcaagatgcatcaggcatccggaatcattcgccaccagatattcagctccggcttccatggcggcccgcaccttatcttcccccatagccacggaaacttcagggaattttacgctgaacgtgccgccaaagccacagcacaactggaagtcctgcatttccaccagatcaaggccgcgcaccgcacgaattaatttgcgcggttcttctgaaatacccagttcgcgcagaaggtggcaggagtcgtgatacgtaacgcggtgtggaaaactcgcgcccacatcttcaaccttcagcaccttgaccagaaattccgagaactcgtaaaaacggtttcggagctgccgggccttttgcagacgcacagggtcattcaggaacaactcggaataaaagatccgcaccatcgtggagcaggaaccggagggagccacgacatagtctgcgtcatcgaagagatcgagcacgcgcgcagccacttctcttgcttcatcgcgatatccggtgttgaaagccggctggccgcaacacgtttgcgcgggattgaaaatgacctctgcccctacgcgacgcaggactttgacggcacactcgcccacctcgggaaaaaactgatcgcccagacaggtgacgaaaaacgcgacacgaggtttggaaatggtcatcgagatgcaaaaattttcggaatgggccgggccttggtggtttttacaaattgaaatcgtgcaccagccaaaagctttaatacggtaatgtaggccgctcgacgcgcgaagtcaagaaaatgcgatacgtggcccagctctgcttgaaggttcttttcggctgtgttaggcttgccccagatgggatttaaatccggcgaggaggtaactctcccatgggcaattccaccgcggccatccgggagcaattgatggtcaataacaaagaatatcaacgcctttatgaagagcatgagcgctacgacgctcaattaatgcaactggaaagcaaaaaattcctcactgagcaagaacaggtagaggaagtccgccttaagaaattaaagctacgcgccaaagaccagatggagcaactggtccaccgagcgatgggagcttgatcacactgatctattgaacccagggatttaccaggaacctcaggccacattggcgtcaggagtagaggggtaaatctgacctttcgtggcccctcccaagacgttgaacatcccccagagaacacttttggcactgcccgcggatttatggtaaaggaaggatacggatacggacttccccttttgcttatcagcggcgcgctttttggccttcatatctatatccccgcaatcgtttttctgatcgttgcactgtttgttttaaattttttccgggatcctgaccgaattgttcctgccgatgcgggggccatcgtctcccccgcggatggccgcgtggtgcagatcacggaagaggagtttgaagggcaacgaatgcagaggctgagcattttcatgtcccctctggatgttcatgtcaatcgctcccccattgccgggacggtgcggaaagtgcgttacacgccgggagcttttcgagtggcttcgcgggcggaagcgtccgtggagaatgagcagaatacttttaccattgaaggcgagcaggggactattcacgtgaagcaaattgctggcgctttggcgcgtcgcatcgtattctggaaacgtccgggcgatcaactggccaggggcgagcgcgtggggcttatcaaattcggttcgcgggttgacgtgctggttgaagttggaactgagtggcgggttcaggttggagattctgttaaagcggggagcaccatccttggattcacaaaaccaggggcgtgaggttcgcgccaacaaaacgcaaagacgcggcatctatattctgcccagcttattcaccgtcggcacgctgatttgcggatacatcgccattatttccacgcttcgtggcgctcagtttctggctgctggcgccggctccggcatcgcgttggcagcgtttgatgacgcggccaaaaagattggatgggccatcgtttttgacgggctggatggccgcatcgctcgactcacaaattccgcctccaatttcggcaaagagtttgactcgctggcggatgtcatcactttcggcattgcgcctgcctttttggcctacgcctggggcattcaagcaatccattcacaatatgaccatcgtctcgttttttatatcgaaaaggcggggtggctagtgggattcgctttcgtgatttgcggggcggccaggttggcgcgcttcaacatcgatcgcggctcgacgagcgaccggcgcttctttgtgggcttgcccatcccggccgccgccggtgtggtagcggccattgtccattgggcgaaatatccgattcaggattggttgattggcatcgtctggctattgattgtggcctgttcggcgtttctgatggtcagccgggtgcgttattacagttttaaagcgatggatctgcgaaagcgatattcctatctttttattattctcctggggctcattgtctgggccatctggtcctattccgagcccgttctcctggctctggcgatggtttatttccttcacggcccggtgatgcggctgatttcaaggacacgttctcatccgcccgcacagaaagccgagcgcgcgcccaagcaggaggttcaggccacatgaaatccgcgtctcgggattatcgcgtggccatgctgggcgctgaatcgctgctggggagggaaatcctgacggtcctcaaggaaaaaaacttcccagcctcccaagtcattaaactcaacgcgcaaggcagtcagccggaaatccctatcgtggatttcgaggatgaacctttgccgctgatggaaagtgaggacagcgggggagaggaatacgattttatatttcttgctgcttgtccagaacgagcccgtggggcttccgaggcgccggacgatcgtgaggagttcctatccagcgcttcgaacctgggtagctgggtgattgatgtgagtcacgtccctcataccacacagaatcccgtactgagcattccctatctcgatcccagccaggatgtcctggccaaggcagtcgccggaggcgagcgatttttcattgcgccgcacgctgcagtgattgccctcagccatcttctgttgcgactggccagcaactttgaaattgaacgcgcgacagtccagattttcagctccgcctcagaacttgggccggaagccattgaggaactccagaagcaaacctccaacctgctgagctttcagccgacgcctcagagtttttttggcgctcccatcgctttcaacatcctgcctcgtgtgagcggcaaggggggtgcgagtttttcaaggcttgaagaacgcattcgtaccgaaacgcgccaattcctggctggccgggctccaatccccgctttgcgcctggttcaggcaccgattttttactctctcgctttttcgctctatgtggagctgcgggcggctgcgtcggtcgtgaagatcgaacaggcgcttgccgacgagcgcatccgtatattcgggaaaacgcaaagcgctccgtctcccgtcgaagtacaaggctctccggttatgttggtggatccaatcagaatggatgacgagcgcccgggcggtttttggctgtggggaatggttgataatctgcgcctggctgcggaaaatgcggttgagattgccgagactttgcatcagttgagcttcaaacaatgaatctttggagtcacattggctgcagaattcctggggagggacagctgggcccgcggagtgtttgcacgcttatgatgctgcttgcgatcgggttcgccgggctggcctcatcgtgcggctatcatgaaggcgggcgcggcgcgcttttgcctccagacatcaagacgattgctgttcccattttcatcaatcaaacccctcaatttcgcatcgagcagcaattgacagcggcagtcactcaggaattcatcgagcgcacatcctatcggatcacgcagaatcccacccaggcagatgccgtgctgcgcggcaccgtcaaacaaatccgccagggtgttgtcactttcaatccgcaaaccggcagtgccacaacactccagattgaggtggttgccggggtcgagctcaccgacctccacactaagaaagtgattttctcgaatcctgactacatcttccgcgagcagtatcaagtgagccccacggcctcgacgctgatcgaagaggaccgtcctgctttagaccggctttctcaggaattcgcccgcaccctcgtcactgatattctggaaaatttctgaaaccgtttctgacaaagaagcttttgttagcgtctgtttttcacggccgtgatattttgcctaaaatcaccgcgtgtcgcgctcccgtaacagcaggcaggtttcccggcaggccctgcagggttcgatcggccaacagggcaaaagcgatagcttctttagcgtccacgggaagaccgtactcatccgacaggtgaaaatcaagcttaggtaacaaatctctgattcgatcaatcagaaatcggttgtgcgctccgccgccggaaatgatcaaccggtgaatttgggctcggggaaagacaaaacggcgaagagaatcagcaattgagcgtgccgagagttctgttgccgtacagatcaaatccgcaggttgtgccttgcgctgcgaaagaaaataacgcgaaagaaatgtgctgccaaattgttcccgtcccgcgctcttgggtggaggctgatgaaaaaagggcagccgtaggattctgttgagtaaaggctccaggagcttgccttttgcagcccacttcccacttttatcataagttctgcgcgctcgtgtgaggtggcgcattaagccatcaatcagcatgtttccagggccggtatcaaacccaaaaacctcttgcgacgccgcaccagcgggaatcacggtgacattggcgatgccgccgatattcagcgctacggaacccagttccttgtgacgaagcagcagataatcaaccagcgggacaagcggtgcaccttgtccaccggcagccatatccgccacacgaaagtcagccacgacaggaacgccgactctttccgcgatcaccgcagcttcaccaagctgaagggtgctcgaacggaaagaatactcctgccgtttgttccgtgtcccgcttgaggagcctagatgaaatacggtttgcccatgcgagccaatgaccgtgagttttccaggcgacacgccgccttggccacacacggcaagggctgcatgagcgaacatttcacccaacgcaaaattcagcgtgctgatttcctgcgcggatgtggctgagccgcccgccacgcgcaggagtcgattacggattgcgggaggatagggaagagtctggaatgcttgtagtcggacgttgagttgattccccaggccttcaatttgcaccagtgcggcatcaatgccatccatcgacgtgcctgagatcagccccacagcccagcgcactctggggatcgtcatgattggagctgccttttgagttccgccaggagattcagcgcctcaatcggcttcagatgatcaaggtcggtttcttcgatggcgcgaacgatttcagaatcgagcggcgtaaaaatggtgagttggagggggcccgcgtgaacttcgctcgggcgggcggcaaggcgttcgctcagacgatgctcagtctgttcgtgccgcgcgagaatctcgcgcgctctttcgatgaccaaaggtggcagcccagccagccgcgccacctcaacgccgtaactcttatcagcgctgcccgcttcaaccttacgcaagaagatgatgttcgagccggactctttcaccgccacatggtaattccgaacgcccggcagaagttccgccagttccgtcagttcgtgataatgggtggcaaagagcgtcttcgcgccggtatgagattgcagatattcgaccactgcccaggcgatggccaagccgtcaaaagtagaagtgccgcggcccacttcgtcaagcagcacgagactcttgggcgtggccgtattcaaaatggcggctgcctcggtcatctccaccataaacgtcgagcgaccctgggcaagattatcggaagcaccgatgcgcgtaaaaatacggtcgagaatcggcaacttggcgcgttcagcaggaacaaagcatcccgcctgcgccatcagacaaatcagggccgtctggcgtaagtaggtggacttcccacccatgttggggccggtaatgatcaggatgcggtcagtcgtggaattctgatagaggtcgttgggaataaaaggtccggtctgattttgcgaactgatgcactcgataaccggatggcgtccttgaatgatcatcagttcctcatcatcggaaatctgcggcgcgtgatagttacgctccgccgccagccaggcaaagcaggcgaggacatccagttcagcgagtgcagcggctgtcgcgcggatgcggcgcgcctccgcgcccacccgtcggcgaatctcaatgaagagatcgcgctcaagctcctggcgcttttcctccgcttcaaggattctgacttcgagttccttgagttcaggcgttgtaaagcgctcagcgttcaccagtgtctgcttgcgttcatagtcggagggtgcgagatgtaggttggacttcgagatctcgatatagtagccaaaaatattgttgaatcgcaccttcaggctcgaaatgccggtccgctcacgctcacgggcctcgatttgagcgatcagttgtttgctgttgcggctgagtgcgcggagtgcatcaagttcggcatgataaccgggacggatcaggtctccctccgtcaacactgccggaggctccgggtggatggaactttccagcagttctcgtacgtcgctgagttcgtcaagtttttcgcgcaactcgatcagcctggatgcctgaaagggatgaagggaagctttgacgaagggcaactgcgcaagcgaaaatttcattgcgaggagatcacgagcgttggccgtctcgagcgtgattttgctcaacagccgttcgaggtcctggacctttcccagcgtgcgccttaattcctcgcgcgcaatggtgtgggcaaggagatcgctcaccgcctcccaacggctctcaatttccctacgatcaacaaaaggtcgaagaagacgttgcttcaggagccgcgctccgaaagtggtcatgcagtaatcaagcgcagcaagcaaagtggaatcctgactcccgctgaagagcggttcgaccacttccagattccgaagcgtggtgggatcgaggatgagaaattcctgctgctggtaataacgaatcctgtcgagatgcaggagcgaaccgcgttgcgtttcacggacgtaatggagaatagctcccgcagcggcgacggcctgcggatgatcctccaggccgtatccggccagggtagcgactcgaaagtgttcgcgcaacaggcggttgccatagtcttcgctgaaaatccattcttcaagagacgtctgggttgccggcggcgaagaaagcgcgtgaaggatttgggacaaggattgcgacccgttggaggtccagcccgtagagacatggcgagttgctttgatcgaactgtcttcggccggcaacaggatttcactgggccgcatccgctcaaattcctcgcgcaatcgactcctggcttcttcgcctcgaaactccgtggcgcagaaatcgccggtggaaagatcggcaaaggccaggccgatactgccgtctttctcaacggctgaagccagataattgttggcacgcggttcaagcgcttcggtgtgaatcgaagtgccgggactcacgatgcgcgtcacctcgcgcttcaccaactttttggcaaagcgcgggtcttccatctggtcacagatggccacgcggaaacccttgcgcaccaggcgcgcaatataggcctcggcggcgtggtaaggaacaccgcacatcgggatggcctggcccttctccttattccgcgaggtgagcgtgatctgaagctctttggaagcaacgatagcatcctcaaaaaagagttcgtagaaatcgcccaggcgaaagaagagcagcgcttgcggatggcgctctttaatcgaactgtactgccgcatcagcggcgtcgaaaactctgtcataacgtgaatcggtgagaaattgattatgcggttgggcgcggcgttttgtaaaccggggcaaagtggcgggaggtttgctattctggcatgagatggaatcaagttgtctatccatcaaactgatgaaagatcgagctgatgaaagatcgagcggtgttcacccgtttttatgaagtcccgatttgtgctacgatagcgaagaaaaggcgaataggccggcttcagaatgaacctcgaagagaaactttgccagctcaggaatgcggcgaatagaaccgatcgtgatcggtcacttgaacagcagcttgaaagtttgcgcaggttggagctgagaaggaccactccctcgtcctcgtcaacgaatatcacattgggctcgaattgggacggcgcttcgcacgctccctatcgcgtggaggattgcattgagggtcagatcgagcaggacgagttgggccaattcttttttgcccgccagtctctgcctttcggtcgaccttatgggaagttccgcatcggggatatttctttggctaatctgagccctctgaatcttttcctgggtcacgcgaccctgcctgatccagcgcgtctggtcttcctggatacggagaccacgggcctggctgtggatggcagcgcctacgcgtttctgattgggattgggttgattgagggcacgcggtttgtggttcgtcagtattttttgcgtgactatactgatgagaaagcggcgctttcttctcttgcgaaggcactcgaaagctatgagggactaatcaccttcaatggcaggatatttgacattccgcttcttgaggctcgttacgccgcttgttgtctccgttcacccttcggccggcttgtccatttggacattcttcatcccgcgcggcaactctggaagctgcgcctggaaaagtgccgtcttacagacctggaaagacacgtgcttggcatcgccagagatggcgatgttcccggatcagaaattcctggaatctacttcgactatcttcgtacgggggatccacgccgccttcaacccatcttttttcataatgcgcttgacatcatctcgctggctgcgcttaccgttgagttgtccgaagtcatgaaatctgctcgggaagggaagtgtaccctccatggtttggatctcttcagcttgagccgtatctttgagcgtgcgggagcgttggagctctcagcctcaatctgcgatcaggcgctgagtgccggcctgccggaagctttggagcctcgagctttgtggcatctggccaaacaatgcaagcggttgggacgcttcgatgccgctgtggaaatctggctgaaccttgcccgccgcgatagttcctatgtcatcgatgcgcaccgagaactgatcatccactatgagcgtcgccagcgcgatctgcggagggctctggaatttatcgaagcggctctcgcgctgttgcgcccggattcacttacgtcgccagcccgtcgcatcgccgcaagccagatggaacgcctcatgcgccgtcgctctcggttgcaaagacgactgaccacagctaaatctgaatcctcctaatcatgagctttttccacgcacgattttttaccggagtcccgctgtttaaagacttcatcggcaattaacaggccctcccagcaggcagggaaacccgcgtaaggcgccatatgaaggagggtctccagaatttcctgttctgtggcgccgttattcagggccatttcgatgttcaaacgcaagccgtttggtcggcccagggctgtcatggcggcaactgttatcaggcttcgggttttcagattgaggcctggccgcgcccagatgtcgcccgccaggaaatccgtcacgtagcgtgcaaagtcaggtgaaagcttttcccacgccgtgcgcacctcctgagcacgacgctcgcccagcatccgctgtagcatttcaagccctttttcgttcatggaaagcctgcctcgctacattcccgggtaaagaccatacccggcgctcacgtcaattacctggccggtaatgttccgtgctgcgtccgaacagagaaacaaaaccgtttggctgatatcccgcggcgtgaccatgcggcgaagcgctgccggtcgcatgaattgttctcgcattttctcaatcgaaattccaagagcgcgagcccgagcggccagtacggtttcaatggcatctcccgccacagggccagggcagacagcgtttacctgaacattgacttcgcctgcctcctgtgcaagcgtcagcgtgagactgaggagaccggcttttgaggcggcataggaagcccgcaacgggtaagcccagtgtcctactaccgaagcgatgttgacgatgcggccttcgcggcgccgagccatatgtttcaaggactcacgcgaaaggagaaaagggccggtaaggtttgtgtccatcacttcctgccagtcccgcaagcgtaatcgagtgatgggcgttgtcgggccgcgggctccggcattatttaccaggatatcaatacgcccaaagcggcgaagcgtcgcgcgaatcgcgcggcgaacgtctctctccctgcgaatatcagcacggatggcgagagagcgcccttgatctgtcgttgtcttttggagacatgcttcaagcgagcgcttttgtctccccactccgaccacacaagcgcccgctgccagcaggtccgcagcgatcacggagccgatatctcccgcggcacctgtgacaatcgcaaccttgccagagacaccctcaagattcagaagcgtattcataagcaatgatcagcaaagccatgaaaacgacaaatggcgactgacaaaaactccagcagccgggccttcccagcatcgaaggtggtcccgagcttgccagggaggagtcccgtcagtggtcctttttcagagcgagattcctcctcatcgcttcgctcggggttgaaatgacagcattcagaatcgttctcttatcgccagtcattgtggtggcccttcgttttttcccatggacttcaggacaacttgttgcgtttgcactttgcgctcgccggtcaccgaattttccgtgatgatctgaagctcgccgaccaaacgcagataatcaggatcacccggcttgctccccgcgccgcgctcgaccttgccctgaaagcgataatacttctcatggattttgcgagtcctgaattccaccaggttgccatgacgtgaaccaatcgtgatgggatagctcagaatgacatccgattcgttctcacccggatagacgtcgatgtaacctttcagaagatcttcctcctgaaggatagccagcgtatcctgtggtccgagaaaatgatagcgaccggtcatccggggaacgctctgcgaggcgtcctgtgggtaggctgagacagcaaaaagcgccaggagagaaatgcataaaaaattgattttccttttaagcatcgtcggtcttttccagtctattccttccccgcagccgccacaaggaatcctgagggtggtgtagcaacgtagaaattgttttcattacagatccaatcccgccgagggcatgcgctcctcgggattcgccgattgttgctcgaggatgtcacgttaaagcacgacgaaccttcaggacgctcgtcaatctttgccgatacgaccaagttttccttgcgcagtgtccttcgactgtacactcccaaacttataatttactacctatctcactgtgagaagacttttatggctgcgacgaaaatgtttgattgggctgggatcgtgaactatgcaaaacgcttcgacgccgccgccacggctcggcttaacataccaccctgcatctcgtcattcctcaccaagaggaggaatcccgctctgccaataaaacccttgctatactcctcgccacttggggttcctcggaatgacaggttgcaagagtttttagcgcctcgctgatatctgatacctaaaacctacaaattgagacctgtcacctacagattaagtcgctttcgcgccaggacgacggctccgagcgctccggcattgtcgccgagggcgcccggaacaatcttgatttttttggcagcggggggatgcaggaagtattcataagcggtcttgcgaattggagcgacaaaatcatcacccagccgttccgcgatgcctccgccgatcaccacccgcgccgggtcaagcacgttgacggcattagccaccagaatccccaggtaatactccgcccgcttcatgacttcctgcatcacctgatcttttcttgccagggcttcctgaatcacgctgctggtgatccggtccttattcttttctttcatgatctgcggcaccaggcttttctgtcccgccttgatggcatttcgcacatccctttcgagggccgtgcggctggccaacgcctcggcgcagccgcgatgtccgcaactgcagacggggccatccacgagtaaaactgtgtgaccaatctccccggcccagccgttgctcccttcgtagagttcgccgccggaaataattccaccaccgattccggtgcctacaaagattcctaccaactcttccacctgctcgccggcgcccaaggcgtgctcgccgatcaccccgacattcacatcgttgtccaccaccaccggcacgccgcccagcagggatttcaaagtgtctgagagaggaacatttttccagccaagatttggcgcttcattgacaatgccacgccggacgtcaatagcccccggagcaccgatgctcacggccgcgagcgtcttcaccttgcagcccgcacttttagccacactttcgaccactccggcaatttccctgatcaggactttgggttttacggctgcttccgtctttttcttttccgttgccagaatcttgttttttccattgaccgcgatggccttgatgctggtgccacccagatcaactcccaccataatctcctttttatgcggcataggtctcctcgcttggcgtccgctcgaaaggcgcggcagtttcgcgccgccagagatgattgagaacttccctgtagtgacacgcaggcggtcgcagcggtcggcgcctgcccaaagcacgctactcttccaccatcaaaagcgagtgcggagccaggcgcagcatcgagccgtccgcagaaagcgaggctccggggctggcgaagactggtcgcagcctgtcactcgcgctgccctggcttgccagatggcacgccacaggtagctcggtgaaattcatcactccgacacgcccgctgcccattggaaatatggcgacgcgcggcggcgcgtctaaagaggtcggaacctgagttgccaccttctcccgccactcacgaagggcaagtcgtagggctggtgtaagctgctcgatacgattcccggcatccacaaaagcaagtcgcggcaaggcatctgagaatatcaccatttcgccctgtttttccttgacggtcttcaaatattccccttcattcaagccaattccatcgggcaccggcagacgcgggtcgccgttcagtcggtgggcaaggtcttcgctgacaaaagctgtgccgctctgagcaaagaattgcacaagtttcgtaacgaattgagcatctgtcagcgcatgatctgtgaaaagcgccatcttggctccttttggaaactcggccaccggcagtaaaggaatccccagcatgccaatttcatcgaagatgtaaggttctgatcctgggtcgctggaaggaggcttgtaggccggaatgccgcgccatccgcccacaagcttcgcaagtgcggcgagattttcctgacgggccatcagcgcttctgcctgagcctgataatgtgtggaatcaagatcaccgaagttgaagagcagaatttccggcgccccagccactacggaaacataagcctgatcgagataaaaggtggcgtcagttccatatggatcaaaccaggcgccgccggtcttggcgccgcccacatccgtgagccatcggtagagaaaaaagccctcatactgctgcttatggccccagtggctggaactggggtcgcgcaactcggtgcccacccagatgcggtcgtaaagcgcagtttcggcagacacacggtagcctcgcgcctgatattggtcgtaccactgcgggtatttcagaatgatttttacgtgcggattcacctgtcgcgccgggcccagcacgtcatggcggctgacaccgagcatcaggttctttcgatattgctgccagctcaggctgcctttcgcggctgcgcactccgagcattgacaatccgtgaagaaaaaatcatcgatgatgatttcattgaaaaggccggcggcatcgcggaagatgtggcccagatgcatgcggttggctcggtcggtgtaacacgccacaatcttccatcccgtcgagggtttgcccagtcgggtggtggcgaccgctccggaaacctggaagcccgcgcgctggaaaaaatccctcgcagccttcagggttgtgggatcggcctcatacccgtcgcggaagacttcgatatagactttgctcaaatgcaggcgccgacaaaaggccagagcttcctcgcggccttggggcgtcgaaagccggtcgcgaaccgtctgagcggtgaagatcgtagaccattgcgtagaaagtgccgtctgaggaaaaatcgcggtgaaaatgactcccaagatcatcacagccggcgccagcctgagcttttctctcagatcggatgttttgtaaggctttctcacttctacactctccatattcaatcttcaacggattgcgcccggggcggaaaaccaacgacgtcaatatatcccaatgtaatatttttgaactttgaatctatcggctccctgaaagcttgccgcccgtgcgataaaagatataaaaagccaagtacgttttgcttaaacagtacacctcccggaccaatccttgaaagatggctgtgtcttacccttcactcatgggaacagcctcgttacaaatcctgcagaaaaggattcaattcgcgctcttcgcccagtgtggtcgaaggaccgtggcctgggaagaccggcgtttcatccgcaaaacacaacagcttactgcggatggaggcgaggatttggtgataatccccaccccagagatcggtccggccaatactgcctttgaagagtgtgtctccgctgaaaattttctgcccttctccagatgaaagcaatgagatgctgccaggggaatgacccggcgtcgagagtacctccagggaagatgatcctactcgcagtacatctccctcctttaaaaagtcttttaattgcactgtgccgggcaactcgacgcccaaccaggcggcctgagccgcgagattctggtagagaggaaggtctgccgcatgcatcaggactggcgcacccgttgcttcctgaagcttctgaaggccacccacgtgatcgatgtgggcatgagtggccacaatgtatttcacttgaagctggtgctgctgaaggatcgcgcggacgcgatcaatttcatctcccggatcaatgacaatagcctcgtgagtggcctcgtcacccagaatcgagcaattgcaagccagcataccaacaggaagaatgtggtgaatcatcaagaatacctgtctttacaaaaagacttctttcgcccgagctgaaacagaatcagagatccctggggatgctatggtccgctgcccgggcggaaatgcccccactattttatttccaacgaacgatcactgcggcaaagaatccgtccatccggccgccgcctggccaagtataaaaatagcctgaatccctgaaaagcggggacagatggggaaactcttgtcctaattctgtagcactgagcgcacggaacccttgagatttacccaccacactggaaacgacatcttcattttcttccggttcaagcgaacacgtcgaataaaccaaccttccacttaaggcgagagccgcaagtccctgctgtaagattgagcgttgtatcgcggcaagccggggaatatcctccggttggagtcgccacttgatttcaggattgcgtgccagcgtgccggtacctgaacaagggacgtcaacaagaattcggtcaaaggttggggtgagtggaagaggttgggcagcgtcgagcagcacccgatgtaattgaacgccttccggccaccggcgtgaaagagttttccgaagcgcgcgcattcgccgcaggctgcggtcgcaggccacaatagaaccctgacccatctcatcggctatttgccaggttttgattccgggagcggcgcaaaggtccaaggcccggtttcctcgttgcggagccaggagttcagggaccagttgcgacgcttcgtcctgaattaccacgcgaccttcacgccaggctcgggttttgatgaccctaccggattccacccacaatgcccgcttcccgaagtttccaaggtgcgtctggatgtgatcagccagaagttcatcacgcattttttgccggtcagagcagggacccgtaacgcgaaggtgggtgagcgggatcgcctggctagccgtaatcaaggcacgtgcggcttcactgccgaagtttttctcccagcgcttatgaagccaagcaggaatcgagcggcgtgcgctttcaagatattcctcattcgcagcgtcgggcgggtcacttgcgttgaaggatgctttctcgcatcgccgcaatactgcattgaccaaccccgcggccgacttcttgcgggcagctttcactaattcgaccgattcattcactgcagcggagcggggaatggaactcaaaagacggatttggtatacacccatacggagcgcctcaagaacttcgcggtcaaagtattggatcggttttccagagagtttctcgatcgtgaaatcgagatcacctcgccagcggaggactcccatgaccagatctgtaaccaacctccggtctacttcttttagacgcgaaatggccggtcggtgcaacaagtccactgcgtaatttcgcttttcatccaactgacaaagaatctggaaagcggctagacgagcggatgagatgggcatgtagggtgtggtctatcgtacggataacagaaattccccgcgcctcataaaagactccagcaagggatctgtaaggggccgagggcggagattaggactatttacctttaaataactacgaaattgtggtatgagtaaaaggccgaattgcagacaacccgactcggatcaacaaaaattataggggctctctgcaatgggatcgcgtttggcgcgaatttgactcacttcgggaaaggagaagtatcatgaatcagactcacaattctgtagaagcttccatccgcaaggccttcgagctcctcattcaaattcgagggcatcggcaagctgaccgtctgctggctcttgccaacggttacctgcgcacgctcttgcattccacccccgagagcaccccgatcatggtttccatccgcgcggtcaggatccgcgagccttaagcacgcgagcggctgcggattacagactcattcagcctgaatcgcgggggcgccgctcgcaacttctgacggttgggctctttcggccttcaattgggcaacctggcgctgaagctcagacgccagatcctccagaatgcgtagttgctccgagcggcgctcaatggcgctttccagccgcgctatttgctggcggagccgggcattttcccgttgcagcatttgggaaccggtgtcgggaagtcctcgcttcacaccggcattccgcacgcgcgcttcgggcgcaccggcaacccgctcctgaatctgccggataacagcatccacctccttgcgttcggccccgggagggcagatgctgcgcaagagaaggagccgcgccaaatcaggctggttgcgcccacgttcccaatgttgaatagcccctttggtggcgttcaatcgccgcgataaaccttcctggctaaggcccaggcgctgccgtacccggcggattactttcggaatgtcaagcgttgtggccataaaattcctcccatgcgaaatagtacttgacaagagctatggtactaggctagactttgaaatgttcccgcttccatagctgtcgtctgatcttcagaagtcggctggaagaagagaacgacgctttttccgcaggttttgaacgctccacgagtataccagcggggcggcctcctgcggcgcgccttgtgacttgccatgccttgtgcatggctttttctggtatatgttagttactctttgtataataatcacgaatataacgccttcaaagagcactggttgcgtggtcccttgccactcaggaatgtggcttggtgcgccgataactgcacggcatggttcattgttcattcttctctcaattcgggcacaaaatatcgttagacaaacggctcgcaagctacaccgattcctgtttatagattacaggcccccgctcatctgctggaggatgttcaagagttcattctgttctcgagcctgccgatctttcaggcgcctcctcagcaagaacttccagagggtcaaagctgccgcatggagattccgccttcgatcacagctagcctacatcacaagacctctcgggtcaagagaggatttatttctagcctacactagggtgggtaccggctggcagccatgccgctgcaagggcttgttttcaaggcaaagtgaacgctgctcgcagcgcttgatctcgtgctcgcccctctcaagagttcgccttataagaaatcaagaagggcagcttcaatctttgaatcatatcccctcgcgcactcttagtttcagatcccctcgcaaatttaaaacatggatcagccgctgtgcggagaggagattagacgatgcaacctgtcactcatgcccccggcatgttgaatcaatccgggatgttaaaaacaaccacccacccgatccccgcgtcactcgtccttgcgccacccggggaactccggtggaagccctccaacccgggagaggcggaaatagccgtcccacttccctcaaatccgcgatgcgcagaaaggggctgcgtttttcccgctgctcctgatacggcagggatgtgccttcatcattaccggcaaatccaggaaccgatcctatttgcctctcaccaacccacacgagcagttgtggaacgcgggaggtttggcatcccagagcatgaagttgacacatcccgactgagagaccgccgtcggctggcagccttgcgggaggcttttttggaagatgaatttactcgttaagcgagccctgtgaactgaggtgaaagatggcagcacctttacaatcctggacacaaaatgtcacttctccctctgctgggaggacgactggcgggagcagccacgcccccttgctcacagcttccagcgcatggcttgctcttcagggtcgaaccgggatcccgattggccgcgccacattctatcgatggcttagcaacggaaaaatcttctccgttcggattgggaccaagatgtatattccactttccgtgatcgaggagattgtccggcgctgccagtcgggcgacggactatagtgtctgcttcttgctcgttcctttgaagctaagtttaacgcgtcagcagatgttcaagagctgattgcaattccggaaatcggaatgggtagccggaggctttcagacgggcagggtcagcgcgctggctggccagaagcacttcatcggccatttccccaaaggcaagtcgcgtcgcaaacgccggcattctcagcaaggtgggacgcttcagaatcctgcccagcgtctcaatgaattcgctgtttcttaccggatggggagaagccagaatcaccgggccgctcagttcagtgttagcgaggcaatgctgaatggctccgatagcatcatccagcgcaatccaactcatgtattgccttccgcttccaatccgcccacccaatccttttcggaaaaccggaagcattcgagcgagcgctccaccttccgcgcttaacaccatactatttctcagaatgacggtgcgaatacctttttcagcggctggcgctgcggcttcttcccattcgcggcagacttgcgctaaaaatcccgacccggccggcgtttcttcccgcagaatctcatctccacgattcccgtaatatccaattgcagacgcgcttaccagtgtcttcggaggatttgaaagcctggtgagagactcacagagcaatcgggttcctgccacgcgactttcccggattctggccttttgttccggggtccatcgacgcgcggcgatattttcacctgcaagatgaattacggcatcaatttcctggtcagaaagcgcaggaggaaggttagactcgggatcccacaggatggcgtcgtgagccacgtgggttctcgaacgtaccaggcgaacggtctgatgcccggcggctgtaagctctctgagtagcgctgagccaatcagtccgcttgaccctgtgatgaggactcgcatggaaccccgaaatgagggtgttatagcgtcatcatagcacaggcctggcaatggaattttaccttgcgctacctcagaacaaatggacgcggttggcaaggagaacgtatgaattggggggtatctggacaccgtttatcgatccgccgctttggtcaaaaaacagaagaccccgaacttgcaactggggggaagggatgaggccggcaagcccattcacattaataaattgggtttgcggattagtgatgacgtaaatattctgcccctgaaaaagcgtaaaacatgggatgaaacggaaggcaccgctcacgttatcagctcctgccgtgaggagggaagagaagttacccgaaaccgtttgaagcggaatgtaaatattactggcgtcaacggttgaagggggtgttgttgccggaggagtcgctgccaccggagcggtatatgttccatgcaccacaagttgctggccgacatttagaaatgttgaatccggggtaaggtttggaaaattaacggccggagcggaaaaatggaagccggttgaagtggagacgttgacgatgacgggcggggtatccagggggactgagttcccggttccggcagaggtattcggttcctgatcgtgaacatagagctgaaattgggtgagatttcccgaagaatctttagtgacagagatcacatagcccagaaaagctgttcggtcgttatcaagatcggtttgatcttcgattaccacggtattggcaataaaatttccctgagaatccacgtaaccattgatttccacaaagttcccggtcgtaatctgattaagcgccgcggcgccgatcagttgagagttcttagtcagattgacggtgatagcggggccagcgccttccagggatgaagtgacgttaaatcccggcaaagtttggaccacgaaactgccaataaaatttgagttagtgcttgtgttattgacgctgaggatgtagccatggaaatcatccagagtaccaaatccctgcccccctgaagctgtcagcgtcgtggcattcaccaccggcgttaccttgacggtcagggatcctggagacccggtgacattcacctggccctgagtcgtcaactcaattgattgaggcaggttgaaatcgatgttcatggcggcggcctgacaaggcgtcgtggaggtggacgagcaggccttgatcaccagtggcggattgatcgtaaagttaacgttttccgaactgagggttggagtgattacgtcaatggggggattcacagcagggtcgaaaagcgccatgctggaagcgctgaactgaacctggcctccagtataagttcccggagagacggagacgacatcggcgagggcggcggtgtcctttagagctgcaaagtccaggggaatgaaggtattggccgccagaacggaaacagaaccaccccctccctgtggagtcagcgtcagtgaagcaatatttgttcggaaagagaggaggttacacagcggaacgtcaccggcaaaaatgatcagagtccctttctcgttgcttgtggatgcagggtttgagctgcacccttctgttccaaaagcgagagctgttaggatcaagccccaaaggagtaagtgtctaaacattctcctcctcacgaaatcattcggtgaacgcttttctgcgctcagccgccgcttcttccggcgcggcttgctgcctcattgcgagtcggggtccatcaacgctagtgcaaaatggatttagcgggtgcgtaagcttgatgcaataagcttgcttctgctacagctttctcttgacgtccccttcgttcccttgcctgaacgtgaactttatgagattcgacaaaacacttaaaaaaattcagaataacacacgtcttttcagcgatgccagcttttcgatcacgcttgaaaatatcattcctctcctgtacactcacagcatcagtcatttcaaaaatcatcaactttgacaaattcagaccgccttgggacctagaggaaagggtagggtcgctatggccagtggaaaaatttttattaattatcgccgggatgacagccgggcagattcaggccgattgtatgatcgcctcaaggctcgttatccgaatcatgtctttcgcgatattgggtcccttgaaccgggtgtcgagtggcaggaagctatcgagaaggtgttgggttcaagcgatgcagtcgtggtggtgatcggcaaaagctggctgacggtgacgaattcggcgggcacccgacgacttgacgacccgaaggatacggttcgtcaggagatcttgactgctctccggcgaggcgtgcgggtgtttccagtgctggtgggtggagcccgcatgccgtcggaagaagagcttccagcagaccttcaatcgcttgcgcggcgcaacgctctcgaaattaccgagcaagactgggatgaaggcttcgagaaactcgcagaggcgcttgaccacgccttgggcgtacggggaaggacgccgaaacagcggcgccgcttcaggccgggtgtggctgccgttgcgcttcttggcgcgacaatcattgcagccgtcgtggtcacgatttatcactcagcgcagaactcgcccgtgtccgtcgtgcgcgaagacgccggccctcagaaagacgccatgcctaatgctgctgacagggcgccaacaaacggagcgggagcggagtcgaatgctggcatacgctcattgaaaacctctgtcgctccgccgcgagaacaggctagccgcacatcgtcagggccaaccaaggcttccgcaccagcgcgaataacctctgctccggtatctcccccgccggctgaaatcagctctgctcattttgttggcaactggcgggcaatagtgacaggttccggtcagcaactcatcgagagcgttgatctctacccggatttcagctttggtgtcacactgaaccgttcgtctgccgccgttggaggatggcaatacaacgccgcagatgacgttctgaatttttcaaatggcacaaattttctcaacaacggagttaagtttgcctgcaaattgaaaggcactgacggaacacacgccaactttggcgggccttgccttgacctgatgcagatgagctggaatgtggcgctgactcgtgagggaaatctttccgaggtggtttacaacgtgccgaaggttgacctttcggccctgacgatggctgaaaaagccgcctttaccgaagcgttatcgcaaggcttctgcacttgcggttgcgggatgacgatccttaattgtctgcgcaatgaccgcacctgcctggtaagccccaacctggcgcgcgcggaactggtggtgttgatgcaatacaggcgccgatgagggggtagccttgagcctgaactatcagcaagactcccttttacgacggatcaggcatcctttgtctttgtggcctgctcctgccccgccgcccacttggcgtgctcctgcgaaaccaacgactcaattctttccgccaagagtgtatggggattgatggcagcagcgtaaggaccagccccggctaaatagagatatttttcgtgcttcagggattcgcaagtggaacggtaagtgatccagttgtaatgatattgattgagttggagcacgccttccaaaattgcgatcagcgccccaaggcttcccgccacccacggcaatttgaaaccagaaaataacggaaccaggcccgccgcaccaatctcaatcaccttcatccacttgaaagtgcgctggttgaaattactcttgtgatcgtaccaaccaatttgatcttcgaggcgttcaagcgtcgggtcagcatcaggcatgtctcacctcgtctatcggagtgcctaagattctagcctaatctgcgtcaaggtctacactcagaatattcttgctggccgcataaggcattggaacaggcttgattggaacccgaaaataggttggcggagggagagggattcgaacccccgagcccctttcggggctaacggttttcaagaccgccggtttcaaccactcacccatccctccgggaagtccacttcaacggtatgaagcaatcggctttattttagcagaacaagcgccggctgaagaaccggttgcggagccttttgccccggggtcgaacttgggggagcgtgctcgcatgaaattcaccaaacatcagtattctcggccgaaggatggcttgttcgttaaagccttccacaaaaaaccccctgcatttctcgaaaaattttcgtaaaatgtgaagccttccggtgaacctccggcaaagaggaggggggcatgagctacaacctacttgaggaagattggattccagttctatggaagactggaaagctcactcgcgtcaacctcattcaggtgctcactgaagcacactgcatccgccagattgccgccaccaatcccatggaccgcgtggccaccctgcgttttctgctcgcactgctttattggtgcgtaggggatccaccgcgcgatccaacctcgggtggcaccttttccgaagcatggtttaccaaactctatgaaaacaaggaatgcttcaatttgctgggagacggaatccggttctatcagtaccgtccaggctcgggaaaagacaaaaagctttccgtcaactatctcattcatgaagtgccgacggggtccaatgtacggcatttccggcattccgcggacggagttaacggcctttgtcgggcgtgttgtgccacagggttgttgcggctacctgtattcaccacccaaggggggaaaggaaaatcaccaggcatcaatggcaaaccccccgtctacgtcatacctctcggacgatccctgtgtgagaccttgtggctctcttggcgaccacagtcgaatttgggtacgcctgcatgggagaagcctgacatggcactgcccaagactggcgaagtccccctcctgaccgggctcacatggctgccgcgacgcgtttggctggacgaccccatggaacccgaagtcccttgtatttgttgcgggcgaaaagagcttctgattcggcagtgcatatttgccggcatcggtagcggcaaggcggatggccgagtttggaacgacccgcacgtcgttcgtgacaaaaatgtggtgatgacaccaagtaatgcccttgccgattccgataaagcggctgacgattgggcaaagataactgcggcgatcctcatcgataccaagcacacttccagacgccgattctgggttgttggtttcgcaagtaaacaggacaagtacctggaagcgaaggaatttgagattttccttcaacctaccacggaaagtgctcagattcaagatgccatcaaggagatcgagagatggcaaagagaagcagcggggctggcaaaaagagttgtcagagtggtgaagaacaagaaatcctcgcgaaaacatgttgagatcgacgccctggtaaaagccattcggcctcatatcgaagccagtgcctctgtgaaattgaaccgcctcatttccgacggccacccggcatgggagggggcggccaactactatgaagggatgatggttgccatctctagatcaatttctccggattttacggccacagcgctacgacagcggcaggaaattgcgcgcgttaaaccagacatgcggttaaaaacagagaaggcagggaatctgaccgcaagagaggcgataagtgactccaacagaacagtacatcaaacgcctgacacacctgaagaccggtgacctcggattgctgcgcacccacgcggggcaggagctcgatgagaaggtagagggcttcgacctgtttacgggcctatggtggccgctgcgtcaaaggaactcgcgggcaccccgccgtgacgtggcatggctcgtcgccaagctctatgccttccggccactcgagtattcggcggaagagacgctagctttccttcttgggcaatgccaaccagaagttggcaagcgggagaagttcatccagcggtttgataggatgctgactctgcccatccgcaaaatcgaacctgcgttgcaatgggcgcttgacgtgctcaattcaaagggcatgggactcgactggataaaactcacggatgatctttcggtttgggaacgagaatccacccgtctcgaatgggcaaaggaatttttgaagtctctaggaggaggataaatgctgatccagattcacgctattcaaaatcacgctccggccaatttgaaccgagatgacttgggcgcgcccaaagcctgctatttcggcggtgtgctgcgctcgcgcatctccagccaatgcctcaagcgcagcatccgtagaagcgacgagttcaggcagttgctaggcggtgttcgtacgcggcaattagcgaaattgatagctgacaagattcccgagaaagatgtgaggaagcgtgcggagaagattcttgaaatatgcggattcaagccctggagatcggaaggcgagtccgaaaattctgagaagagcaaaatgcttgtctatactaccaaacaggctgttgaagagatggcgaacctcctccgaaacagcgatggaaaggctgagagtgaactggcggaggggttcgccggacttattgcggagcgcacggcagttccggacatggccttgtcgggccgcatgctggagccggacaaatcttctacggtttgggagaagcgtgatactaaggtggaagcagcacttcaagtggcccatgcaatctccacccatgaggcccgccccgaggtggattactacgtcgctgccgatgacatccccggcgaggacgcgggtgccggctttgtggacgaggctatgtttgcctcggcctgtttttacaaatatttctcaatccactgggagcaattggtgaaaaacctcatggggtttggggaagaacatgaaaagctggccgcacatacggtgggcgcattcattcggggggctgcgatggtgaaccccactggaaaacagaacagtttcgccgcgcataatcctcccgatggcatgctggttgagatcagggacacccctctcagctacgccaacgcttttgcgaaacccgcggttgctcagggtgaacgtgacctcatcgcccagagcatcgcgcagcttggccaatacatccacgacatggacaccgggtacggtaagccaacggagcgattctggttctcgcctaattcccgccatcctctgctggcttacatcgaggaagaacaagatggaaaaaagaaacgacgtgagattgcgcttaccgacaataatctcagttcgctcgatatcttaattcaaaaggtcatcgagaaaatcggccacaattggcatgaggttcagaaaattactgtgaacgcagaggtggtttgatgagggccaacaccttatttcttcgcttggagggtcttcttcaagcctggggagaccaccagtcaaagtttgtcatccgacggacggcggaagctccgaccaagtctggcgttgtcgggatgctgtgcgccgccctgggggttagcagatgtaaagcctctaatgaatggcttcgaaagctgggctcgctttgtatgggggcgcgcattgatgcgccgggtgtccgctggtgggactatcagacggtcggagccaaggtcggaatacccagggcagatggtgctggcgctaagagaacggccgcgacgggggaaattgaaactctcatcacgcgtcgcgaatatctctgcgacgcatccttcctgatcgctttgcagggtgaggccgacctgatagcgcagttggagaccgcagtaggagcgcccaagtggacgctctatcttggtagaaaatgctgccctccgtcacgccctttgctggaaaaacccgcaagcggtgagtttcccgatttactctcagcccttaagtcgattccttggcgcaaacggatgaaggaggatcaaccgcccaaaacggttgactgcctgctcgattggcagcccacggcagatcagcctgaagcgcctgatgatgccttcgtctggtatgatgtgccccgcacctttgaaccaccctcgcacgaaccccgattcgtgctccggcgtcaattgccagtggccatcgagggcggcgtgggcgtcgcaggccagccggcgcagaccgaaactccgccgccgccccgcccgcgggccgattacaccaactccgcctacaggaacaagcgcctggagcggcttgcccgcgaccagcagctttgcgttttttgcaaggcgccagccacaacggtacaacacatcacctatcggcgcgccggaggcaatgaaagcttggaagatctgcgttcgctctgccgtttgtgtcatgacgccgtgaccatgatcgagtatggtttaaacatgggtctggatcggatcaatcccgaagagccacgttggcgcgaccagattattgccaagcggaacgagatcatcgccttccgctcgctcgaaacgcgtcggcgacgcctcgctccagaggaggtggaatagccatgtggatttcgtgtctcctgatcgacgtcggtgacaatcccgaccgcccccgccccgggcgccaatggctgcgaaacctctatcgcgttcaccagcgcctttgcatggcgtttccctccgaccgcagaaagcagtacgacccagagtttttaaagccctaccagccagaggattttgggaacggccatgttcatgttgagcgcgggccgaccgctggctttctcttccgccttgatcccgaggaacgatgttgccgcgaagcatcacaggctcggcattccggcagtcgggtggtaattctggtacagtctgcaccaaaacctgactgggaatacgcctttcacaacgcctgttatctgctggccgccccgccggaagtaaagccattcaacccgtgctacacaacgggtcagcggcttcgattccgcctccttgcgaatcctacccgccgcctcacggaacactcgcttggagccgacggacagctcgtcaagaaatgggcgaatacggataagaaagggatgcgcgtgcctgtgccgacggatcaactcctcgattggatcaatcggcgagctgaaaaggcggggttttctatcgagaaggattccatcaatgttttgccgggttatgtgttcgccaacaaaagaggggacaggcatggaattcgcctgcgctctgtccgttatgacgggcttctcagcgttaccgagcccgcactgtttcggcaagcgattatacaaggcatcgggccaggcaaagctttcggcttcgggctgctttcggtagcgccgtgttgtaccggaggtctatgaccgccatttttgacctcctgccccgtttgattctttacagtggagaccacaccatcgccacacttaccactaccgggcccttcctcagcgaagagggtaattccccgccttggttaaggaggggataaggggtggttggtgtaaagaacgggctgagagaggacgccagccgcctcgatcatcgatggggcgcagctacaaaaacatgaaagacctccatctgttgcccaaagtccgcgatagttccagtttcctttacgtcgagcattgcaagatcgaccaggagggcaaagcgatcgccattcacgacgcgaagggccgagtgccagtaccctgcgcgtcattgctggtgctgatgctcggtcccggcaccagcatcacgcacgcggctgtgcgatctcttgctgacaatggctgcaccatcctctggacgggcgaagagggcgtccgaacctacgctcagggcatgggagaaacgcgctcttccgaacgcctgctgcatcagtcacgcctctgctctgcgcccgaattgcgcttcatagtggttaaaaggctttacaagatgcgtttcccggagaagctggacccctccctgaccatccagcaattgcgcggcatggagggtgtccgggtgcgcgacgcatacttccgcgccagccgcgaggcgggcattccgtggtccggccgatcctacaaaaccgataactggcaggccgccgatgccgtcaatcgcgccctttcggtggccaacagttgcctctacggcgtctgccacgccgccattgtttccgtcggttattcaccggccttgggatttattcacaccggaaagatgctctcctttgtctacgatgttgccgacctgtataaaaccgaagtcaccattcccctcgcctttcgggccgcagccgaaggaatgggctttcaggaaagccacgtaagaaggaaatgtcgcgacgcgtttgtggaaagccgcttattacagagaattatccccgatatcgaccgcgctctcgattggggttcttcggaaggtgggcagggggatgccagactggatgcccaaccagcggctccagggtggctctgggatcccgaagtgggggcggtggagggaggcatcaaccgcggagatgatgctgaaggaggtgacaagccacggtcgtgatggtgctcgaaaatgcccctcccagcgtgcgcggggaactgacacgatggatgctggaattgcatgctggcgtttttgtgggaaacatttccgcgctggtgcgggaaaagctctggcaggaagtctgccgcaaattggcgggtggggctggaattctggtctacaatgctgccaacgagcaggggtttgatatccgcttttggggatcgccctctcggcgggtcgaaaacttcgagggacttcttctagttcgcgggccataagccctttaaatcgcagcgtcgtccccacgcgtgtgggggtgaaccgttcatcggcgcccggccaatcaagattacgcggtcgtccccacgcgtgtgggggtgaaccatgatctgaatcgcttccgtaatcggccttcttgtcgtccccacgcgtgtgggggtgaaccgccccgcggacggccaacgaagggcgtgagacagtcgtccccacgcgtgtgggggtgaaccgcttcgccgttccgcgagactgcaggcttggatgtcgtccccacgcgtgtgggggtgaaccgcttaaccctatcccctatcccaaacccttcccgtcgtccccacgcgtgtgggggtgaaccgacaactcgcgcgataacagccagttacggaccgtcgtccccacgcgtgtgggggtgaaccgtccccaacgacggggacaatctgcgggaagctgtcgtccccacgcgtgtgggggtgaaccgtgtccggtttgtgccaaaattttaagcaaggcgtcgtccccacgcgtgtgggggtgaaccgtccgtgtggaacgttgtcatggtacttcgttcgtcgtccccacgcgtgtgggggtgaaccgctgccgctgaaggatgggatttggcagcggtcgtcgtccccacgcgtgtgggggtgaaccgcgccatgttggggtgggatgtgtcgtaggcccgtcgtccccacgcgtgtgggggtgaaccggacgccagcctcgatgagaaaaccatcaccgcgtcgtccccacgcgtgtgggggtgaaccgctggctgcggtgcttgaggccaatgtcacactgtcgtccccacgcgtgtgggggtgaaccgcctccctcttttccaccgaccttcccgcctgcgtcgtccccacgcgtgtgggggtgaaccgattctggctggattaaaagcagcggaccggcagtcgtccccacgcgtgtgggggtgaaccgcgtaccatgaatctgacaaaccctttcctgacgtcgtccccacgcgtgtgggggtgaaccgtcttgacttggagtgatcagggtgatatggaagtcgtccccacgcgtgtgggggtgaaccgtcttgacttggagtgatcagggtgatatggaagtcgtccccacgcgtgtgggggtgaaccgcgatgcgagagtttgaagaaaagaccaatgccgtcgtccccacgcgtgtgggggtgaaccgaaggagctgctggccgatgctgacggcgaaccgtcgtccccacgcgtgtgggggtgaaccgatcctcgcgagtgtgttagtccgttctgtggcagtcgtccccacgcgtgtgggggtgaaccgatgtgcccgcgaagctcctgatgacgcgcgacgtcgtccccacgcgtgtgggggtgaaccgagcaagaaaattggcactcttgaagagctaacgtcgtccccacgcgtgtgggggtgaaccgttggcgcggagaatcttttctcggtccgtaaagtcgtccccacgcgtgtgggggtgaaccgataatgccgcccgactttcaggaggtgcggatgtcgtccccacgcgtgtgggggtgaaccgctgaaggaattgaaagacgaaaaatcgctgaggccatcccccgcacgcccggagggtgaaccggctaatgtcaaatctcagtgtcgaaattgcgaataggcagaggtaaaccggggtttgtaatttaagatttcagattcccgtccccgcacggcccatgcctaattctc

SEQ ID NO: 964 - DNA, 157144 bp, Artificial Sequence
  Synthetic Oligonucleotide
  misc_feature (1)..(93683): n is a, c, g, or t
nnnnnnnnnnnnnnnnnnnnnnnnnnnnnnnnnnnnnnnnnnnnnnnnnnnnnnnnnnnnnnnnnnnnnnnnnnnnnnnnnnnnnnnnnnnnnnnnnnnnnnnnnnnnnnnnnnnnnnnnnnnnnnnnnnnnnnnnnnnnnnnnnnnnnnnnnnnnnnnnnnnnnnnnnnnnnnnnnnnnnnnnnnnnnnnnnnnnnnnnnnnnnnnnnnnnnnnnnnnnnnnnnnnnnnnnnnnnnnnnnnnnnnnnnnnnnnnnnnnnnnnnnnnnnnnnnnnnnnnnnnnnnnnnnnnnnnnnnnnnnnnnnnnnnnnnnnnnnnnnnnnnnnnnnnnnnnnnnnnnnnnnnnnnnnnnnnnnnnnnnnnnnnnnnnnnnnnnnnnnnnnnnnnnnnnnnnnnnnnnnnnnnnnnnnnnnnnnnnnnnnnnnnnnnnnnnnnnnnnnnnnnnnnnnnnnnnnnnnnnnnnnnnnnnnnnnnnnnnnnnnnnnnnnnnnnnnnnnnnnnnnnnnnnnnnnnnnnnnnnnnnnnnnnnnnnnnnnnnnnnnnnnnnnnnnnnnnnnnnnnnnnnnnnnnnnnnnnnnnnnnnnnnnnnnnnnnnnnnnnnnnnnnnnnnnnnnnnnnnnnnnnnnnnnnnnnnnnnnnnnnnnnnnnnnnnnnnnnnnnnnnnnnnnnnnnnnnnnnnnnnnnnnnnnnnnnnnnnnnnnnnnnnnnnnnnnnnnnnnnnnnnnnnnnnnnnnnnnnnnnnnnnnnnnnnnnnnnnnnnnnnnnnnnnnnnnnnnnnnnnnnnnnnnnnnnnnnnnnnnnnnnnnnnnnnnnnnnnnnnnnnnnnnnnnnnnnnnnnnnnnnnnnnnnnnnnnnnnnnnnnnnnnnnnnnnnnnnnnnnnnnnnnnnnnnnnnnnnnnnnnnnnnnnnnnnnnnnnnnnnnnnnnnnnnnnnnnnnnnnnnnnnnnnnnnnnnnnnnnnnnnnnnnnnnnnnnnnnnnnnnnnnnnnnnnnnnnnnnnnnnnnnnnnnnnnnnnnnnnnnnnnnnnnnnnnnnnnnnnnnnnnnnnnnnnnnnnnnnnnnnnnnnnnnnnnnnnnnnnnnnnnnnnnnnnnnnnnnnnnnnnnnnnnnnnnnnnnnnnnnnnnnnnnnnnnnnnnnnnnnnnnnnnnnnnnnnnnnnnnnnnnnnnnnnnnnnnnnnnnnnnnnnnnnnnnnnnnnnnnnnnnnnnnnnnnnnnnnnnnnnnnnnnnnnnnnnnnnnnnnnnnnnnnnnnnnnnnnnnnnnnnnnnnnnnnnnnnnnnnnnnnnnnnnnnnnnnnnnnnnnnnnnnnnnnnnnnnnnnnnnnnnnnnnnnnnnnnnnnnnnnnnnnnnnnnnnnnnnnnnnnnnnnnnnnnnnnnnnnnnnnnnnnnnnnnnnnnnnnnnnnnnnnnnnnnnnnnnnnnnnnnnnnnnnnnnnnnnnnnnnnnnnnnnnnnnnnnnnnnnnnnnnnnnnnnnnnnnnnnnnnnnnnnnnnnnnnnnnnnnnnnnnnnnnnnnnnnnnnnnnnnnnnnnnnnnnnnnnnnnnnnnnnnnnnnnnnnnnnnnnnnnnnnnnnnnnnnnnnnnnnnnnnnnnnnnnnnnnnnnnnnnnnnnnnnnnnnnnnnnnnnnnnnnnnnnnnnnnnnnnnnnnnnnnnnnnnnnnnnnnnnnnnnnnnnnnnnnnnnnnnnnnnnnnnnnnnnnnnnnnnnnnnnnnnnnnnnnnnnnnnnnnnnnnnnnnnnnnnnnnnnnnnnnnnnnnnnnnnnnnnnnnnnnnnnnnnnnnnnnnnnnnnnnnnnnnnnnnnnnnnnnnnnnnnnnnnnnnnnnnnnnnnnnnnnnnnnnnnnnnnnnnnnnnnnnnnnnnnnnnnnnnnnnnnnnnnnnnnnnnnnnnnnnnnnnnnnnnnnnnnnnnnnnnnnnnnnnnnnnnnnnnnnnnnnnnnnnnnnnnnnnnnnnnnnnnnnnnnnnnnnnnnnnnnnnnnnnnnnnnnnnnnnnnnnnnnnnnnnnnnnnnnnnnnnnnnnnnnnnnnnnnnnnnnnnnnnnnnnnnnnnnnnnnnnnnnnnnnnnnnnnnnnnnnnnnnnnnnnnnnnnnnnnnnnnnnnnnnnnnnnnnnnnnnnnnnnnnnnnnnnnnnnnnnnnnnnnnnnnnnnnnnnnnnnnnnnnnnnnnnnnnnnnnnnnnnnnnnnnnnnnnnnnnnnnnnnnnnnnnnnnnnnnnnnnnnnnnnnnnnnnnnnnnnnnnnnnnnnnnnnnnnnnnnnnnnnnnnnnnnnnnnnnnnnnnnnnnnnnnnnnnnnnnnnnnnnnnnnnnnnnnnnnnnnnnnnnnnnnnnnnnnnnnnnnnnnnnnnnnnnnnnnnnnnnnnnnnnnnnnnnnnnnnnnnnnnnnnnnnnnnnnnnnnnnnnnnnnnnnnnnnnnnnnnnnnnnnnnnnnnnnnnnnnnnnnnnnnnnnnnnnnnnnnnnnnnnnnnnnnnnnnnnnnnnnnnnnnnnnnnnnnnnnnnnnnnnnnnnnnnnnnnnnnnnnnnnnnnnnnnnnnnnnnnnnnnnnnnnnnnnnnnnnnnnnnnnnnnnnnnnnnnnnnnnnnnnnnnnnnnnnnnnnnnnnnnnnnnnnnnnnnnnnnnnnnnnnnnnnnnnnnnnnnnnnnnnnnnnnnnnnnnnnnnnnnnnnnnnnnnnnnnnnnnnnnnnnnnnnnnnnnnnnnnnnnnnnnnnnnnnnnnnnnnnnnnnnnnnnnnnnnnnnnnnnnnnnnnnnnnnnnnnnnnnnnnnnnnnnnnnnnnnnnnnnnnnnnnnnnnnnnnnnnnnnnnnnnnnnnnnnnnnnnnnnnnnnnnnnnnnnnnnnnnnnnnnnnnnnnnnnnnnnnnnnnnnnnnnnnnnnnnnnnnnnnnnnnnnnnnnnnnnnnnnnnnnnnnnnnnnnnnnnnnnnnnnnnnnnnnnnnnnnnnnnnnnnnnnnnnnnnnnnnnnnnnnnnnnnnnnnnnnnnnnnnnnnnnnnnnnnnnnnnnnnnnnnnnnnnnnnnnnnnnnnnnnnnnnnnnnnnnnnnnnnnnnnnnnnnnnnnnnnnnnnnnnnnnnnnnnnnnnnnnnnnnnnnnnnnnnnnnnnnnnnnnnnnnnnnnnnnnnnnnnnnnnnnnnnnnnnnnnnnnnnnnnnnnnnnnnnnnnnnnnnnnnnnnnnnnnnnnnnnnnnnnnnnnnnnnnnnnnnnnnnnnnnnnnnnnnnnnnnnnnnnnnnnnnnnnnnnnnnnnnnnnnnnnnnnnnnnnnnnnnnnnnnnnnnnnnnnnnnnnnnnnnnnnnnnnnnnnnnnnnnnnnnnnnnnnnnnnnnnnnnnnnnnnnnnnnnnnnnnnnnnnnnnnnnnnnnnnnnnnnnnnnnnnnnnnnnnnnnnnnnnnnnnnnnnnnnnnnnnnnnnnnnnnnnnnnnnnnnnnnnnnnnnnnnnnnnnnnnnnnnnnnnnnnnnnnnnnnnnnnnnnnnnnnnnnnnnnnnnnnnnnnnnnnnnnnnnnnnnnnnnnnnnnnnnnnnnnnnnnnnnnnnnnnnnnnnnnnnnnnnnnnnnnnnnnnnnnnnnnnnnnnnnnnnnnnnnnnnnnnnnnnnnnnnnnnnnnnnnnnnnnnnnnnnnnnnnnnnnnnnnnnnnnnnnnnnnnnnnnnnnnnnnnnnnnnnnnnnnnnnnnnnnnnnnnnnnnnnnnnnnnnnnnnnnnnnnnnnnnnnnnnnnnnnnnnnnnnnnnnnnnnnnnnnnnnnnnnnnnnnnnnnnnnnnnnnnnnnnnnnnnnnnnnnnnnnnnnnnnnnnnnnnnnnnnnnnnnnnnnnnnnnnnnnnnnnnnnnnnnnnnnnnnnnnnnnnnnnnnnnnnnnnnnnnnnnnnnnnnnnnnnnnnnnnnnnnnnnnnnnnnnnnnnnnnnnnnnnnnnnnnnnnnnnnnnnnnnnnnnnnnnnnnnnnnnnnnnnnnnnnnnnnnnnnnnnnnnnnnnnnnnnnnnnnnnnnnnnnnnnnnnnnnnnnnnnnnnnnnnnnnnnnnnnnnnnnnnnnnnnnnnnnnnnnnnnnnnnnnnnnnnnnnnnnnnnnnnnnnnnnnnnnnnnnnnnnnnnnnnnnnnnnnnnnnnnnnnnnnnnnnnnnnnnnnnnnnnnnnnnnnnnnnnnnnnnnnnnnnnnnnnnnnnnnnnnnnnnnnnnnnnnnnnnnnnnnnnnnnnnnnnnnnnnnnnnnnnnnnnnnnnnnnnnnnnnnnnnnnnnnnnnnnnnnnnnnnnnnnnnnnnnnnnnnnnnnnnnnnnnnnnnnnnnnnnnnnnnnnnnnnnnnnnnnnnnnnnnnnnnnnnnnnnnnnnnnnnnnnnnnnnnnnnnnnnnnnnnnnnnnnnnnnnnnnnnnnnnnnnnnnnnnnnnnnnnnnnnnnnnnnnnnnnnnnnnnnnnnnnnnnnnnnnnnnnnnnnnnnnnnnnnnnnnnnnnnnnnnnnnnnnnnnnnnnnnnnnnnnnnnnnnnnnnnnnnnnnnnnnnnnnnnnnnnnnnnnnnnnnnnnnnnnnnnnnnnnnnnnnnnnnnnnnnnnnnnnnnnnnnnnnnnnnnnnnnnnnnnnnnnnnnnnnnnnnnnnnnnnnnnnnnnnnnnnnnnnnnnnnnnnnnnnnnnnnnnnnnnnnnnnnnnnnnnnnnnnnnnnnnnnnnnnnnnnnnnnnnnnnnnnnnnnnnnnnnnnnnnnnnnnnnnnnnnnnnnnnnnnnnnnnnnnnnnnnnnnnnnnnnnnnnnnnnnnnnnnnnnnnnnnnnnnnnnnnnnnnnnnnnnnnnnnnnnnnnnnnnnnnnnnnnnnnnnnnnnnnnnnnnnnnnnnnnnnnnnnnnnnnnnnnnnnnnnnnnnnnnnnnnnnnnnnnnnnnnnnnnnnnnnnnnnnnnnnnnnnnnnnnnnnnnnnnnnnnnnnnnnnnnnnnnnnnnnnnnnnnnnnnnnnnnnnnnnnnnnnnnnnnnnnnnnnnnnnnnnnnnnnnnnnnnnnnnnnnnnnnnnnnnnnnnnnnnnnnnnnnnnnnnnnnnnnnnnnnnnnnnnnnnnnnnnnnnnnnnnnnnnnnnnnnnnnnnnnnnnnnnnnnnnnnnnnnnnnnnnnnnnnnnnnnnnnnnnnnnnnnnnnnnnnnnnnnnnnnnnnnnnnnnnnnnnnnnnnnnnnnnnnnnnnnnnnnnnnnnnnnnnnnnnnnnnnnnnnnnnnnnnnnnnnnnnnnnnnnnnnnnnnnnnnnnnnnnnnnnnnnnnnnnnnnnnnnnnnnnnnnnnnnnnnnnnnnnnnnnnnnnnnnnnnnnnnnnnnnnnnnnnnnnnnnnnnnnnnnnnnnnnnnnnnnnnnnnnnnnnnnnnnnnnnnnnnnnnnnnnnnnnnnnnnnnnnnnnnnnnnnnnnnnnnnnnnnnnnnnnnnnnnnnnnnnnnnnnnnnnnnnnnnnnnnnnnnnnnnnnnnnnnnnnnnnnnnnnnnnnnnnnnnnnnnnnnnnnnnnnnnnnnnnnnnnnnnnnnnnnnnnnnnnnnnnnnnnnnnnnnnnnnnnnnnnnnnnnnnnnnnnnnnnnnnnnnnnnnnnnnnnnnnnnnnnnnnnnnnnnnnnnnnnnnnnnnnnnnnnnnnnnnnnnnnnnnnnnnnnnnnnnnnnnnnnnnnnnnnnnnnnnnnnnnnnnnnnnnnnnnnnnnnnnnnnnnnnnnnnnnnnnnnnnnnnnnnnnnnnnnnnnnnnnnnnnnnnnnnnnnnnnnnnnnnnnnnnnnnnnnnnnnnnnnnnnnnnnnnnnnnnnnnnnnnnnnnnnnnnnnnnnnnnnnnnnnnnnnnnnnnnnnnnnnnnnnnnnnnnnnnnnnnnnnnnnnnnnnnnnnnnnnnnnnnnnnnnnnnnnnnnnnnnnnnnnnnnnnnnnnnnnnnnnnnnnnnnnnnnnnnnnnnnnnnnnnnnnnnnnnnnnnnnnnnnnnnnnnnnnnnnnnnnnnnnnnnnnnnnnnnnnnnnnnnnnnnnnnnnnnnnnnnnnnnnnnnnnnnnnnnnnnnnnnnnnnnnnnnnnnnnnnnnnnnnnnnnnnnnnnnnnnnnnnnnnnnnnnnnnnnnnnnnnnnnnnnnnnnnnnnnnnnnnnnnnnnnnnnnnnnnnnnnnnnnnnnnnnnnnnnnnnnnnnnnnnnnnnnnnnnnnnnnnnnnnnnnnnnnnnnnnnnnnnnnnnnnnnnnnnnnnnnnnnnnnnnnnnnnnnnnnnnnnnnnnnnnnnnnnnnnnnnnnnnnnnnnnnnnnnnnnnnnnnnnnnnnnnnnnnnnnnnnnnnnnnnnnnnnnnnnnnnnnnnnnnnnnnnnnnnnnnnnnnnnnnnnnnnnnnnnnnnnnnnnnnnnnnnnnnnnnnnnnnnnnnnnnnnnnnnnnnnnnnnnnnnnnnnnnnnnnnnnnnnnnnnnnnnnnnnnnnnnnnnnnnnnnnnnnnnnnnnnnnnnnnnnnnnnnnnnnnnnnnnnnnnnnnnnnnnnnnnnnnnnnnnnnnnnnnnnnnnnnnnnnnnnnnnnnnnnnnnnnnnnnnnnnnnnnnnnnnnnnnnnnnnnnnnnnnnnnnnnnnnnnnnnnnnnnnnnnnnnnnnnnnnnnnnnnnnnnnnnnnnnnnnnnnnnnnnnnnnnnnnnnnnnnnnnnnnnnnnnnnnnnnnnnnnnnnnnnnnnnnnnnnnnnnnnnnnnnnnnnnnnnnnnnnnnnnnnnnnnnnnnnnnnnnnnnnnnnnnnnnnnnnnnnnnnnnnnnnnnnnnnnnnnnnnnnnnnnnnnnnnnnnnnnnnnnnnnnnnnnnnnnnnnnnnnnnnnnnnnnnnnnnnnnnnnnnnnnnnnnnnnnnnnnnnnnnnnnnnnnnnnnnnnnnnnnnnnnnnnnnnnnnnnnnnnnnnnnnnnnnnnnnnnnnnnnnnnnnnnnnnnnnnnnnnnnnnnnnnnnnnnnnnnnnnnnnnnnnnnnnnnnnnnnnnnnnnnnnnnnnnnnnnnnnnnnnnnnnnnnnnnnnnnnnnnnnnnnnnnnnnnnnnnnnnnnnnnnnnnnnnnnnnnnnnnnnnnnnnnnnnnnnnnnnnnnnnnnnnnnnnnnnnnnnnnnnnnnnnnnnnnnnnnnnnnnnnnnnnnnnnnnnnnnnnnnnnnnnnnnnnnnnnnnnnnnnnnnnnnnnnnnnnnnnnnnnnnnnnnnnnnnnnnnnnnnnnnnnnnnnnnnnnnnnnnnnnnnnnnnnnnnnnnnnnnnnnnnnnnnnnnnnnnnnnnnnnnnnnnnnnnnnnnnnnnnnnnnnnnnnnnnnnnnnnnnnnnnnnnnnnnnnnnnnnnnnnnnnnnnnnnnnnnnnnnnnnnnnnnnnnnnnnnnnnnnnnnnnnnnnnnnnnnnnnnnnnnnnnnnnnnnnnnnnnnnnnnnnnnnnnnnnnnnnnnnnnnnnnnnnnnnnnnnnnnnnnnnnnnnnnnnnnnnnnnnnnnnnnnnnnnnnnnnnnnnnnnnnnnnnnnnnnnnnnnnnnnnnnnnnnnnnnnnnnnnnnnnnnnnnnnnnnnnnnnnnnnnnnnnnnnnnnnnnnnnnnnnnnnnnnnnnnnnnnnnnnnnnnnnnnnnnnnnnnnnnnnnnnnnnnnnnnnnnnnnnnnnnnnnnnnnnnnnnnnnnnnnnnnnnnnnnnnnnnnnnnnnnnnnnnnnnnnnnnnnnnnnnnnnnnnnnnnnnnnnnnnnnnnnnnnnnnnnnnnnnnnnnnnnnnnnnnnnnnnnnnnnnnnnnnnnnnnnnnnnnnnnnnnnnnnnnnnnnnnnnnnnnnnnnnnnnnnnnnnnnnnnnnnnnnnnnnnnnnnnnnnnnnnnnnnnnnnnnnnnnnnnnnnnnnnnnnnnnnnnnnnnnnnnnnnnnnnnnnnnnnnnnnnnnnnnnnnnnnnnnnnnnnnnnnnnnnnnnnnnnnnnnnnnnnnnnnnnnnnnnnnnnnnnnnnnnnnnnnnnnnnnnnnnnnnnnnnnnnnnnnnnnnnnnnnnnnnnnnnnnnnnnnnnnnnnnnnnnnnnnnnnnnnnnnnnnnnnnnnnnnnnnnnnnnnnnnnnnnnnnnnnnnnnnnnnnnnnnnnnnnnnnnnnnnnnnnnnnnnnnnnnnnnnnnnnnnnnnnnnnnnnnnnnnnnnnnnnnnnnnnnnnnnnnnnnnnnnnnnnnnnnnnnnnnnnnnnnnnnnnnnnnnnnnnnnnnnnnnnnnnnnnnnnnnnnnnnnnnnnnnnnnnnnnnnnnnnnnnnnnnnnnnnnnnnnnnnnnnnnnnnnnnnnnnnnnnnnnnnnnnnnnnnnnnnnnnnnnnnnnnnnnnnnnnnnnnnnnnnnnnnnnnnnnnnnnnnnnnnnnnnnnnnnnnnnnnnnnnnnnnnnnnnnnnnnnnnnnnnnnnnnnnnnnnnnnnnnnnnnnnnnnnnnnnnnnnnnnnnnnnnnnnnnnnnnnnnnnnnnnnnnnnnnnnnnnnnnnnnnnnnnnnnnnnnnnnnnnnnnnnnnnnnnnnnnnnnnnnnnnnnnnnnnnnnnnnnnnnnnnnnnnnnnnnnnnnnnnnnnnnnnnnnnnnnnnnnnnnnnnnnnnnnnnnnnnnnnnnnnnnnnnnnnnnnnnnnnnnnnnnnnnnnnnnnnnnnnnnnnnnnnnnnnnnnnnnnnnnnnnnnnnnnnnnnnnnnnnnnnnnnnnnnnnnnnnnnnnnnnnnnnnnnnnnnnnnnnnnnnnnnnnnnnnnnnnnnnnnnnnnnnnnnnnnnnnnnnnnnnnnnnnnnnnnnnnnnnnnnnnnnnnnnnnnnnnnnnnnnnnnnnnnnnnnnnnnnnnnnnnnnnnnnnnnnnnnnnnnnnnnnnnnnnnnnnnnnnnnnnnnnnnnnnnnnnnnnnnnnnnnnnnnnnnnnnnnnnnnnnnnnnnnnnnnnnnnnnnnnnnnnnnnnnnnnnnnnnnnnnnnnnnnnnnnnnnnnnnnnnnnnnnnnnnnnnnnnnnnnnnnnnnnnnnnnnnnnnnnnnnnnnnnnnnnnnnnnnnnnnnnnnnnnnnnnnnnnnnnnnnnnnnnnnnnnnnnnnnnnnnnnnnnnnnnnnnnnnnnnnnnnnnnnnnnnnnnnnnnnnnnnnnnnnnnnnnnnnnnnnnnnnnnnnnnnnnnnnnnnnnnnnnnnnnnnnnnnnnnnnnnnnnnnnnnnnnnnnnnnnnnnnnnnnnnnnnnnnnnnnnnnnnnnnnnnnnnnnnnnnnnnnnnnnnnnnnnnnnnnnnnnnnnnnnnnnnnnnnnnnnnnnnnnnnnnnnnnnnnnnnnnnnnnnnnnnnnnnnnnnnnnnnnnnnnnnnnnnnnnnnnnnnnnnnnnnnnnnnnnnnnnnnnnnnnnnnnnnnnnnnnnnnnnnnnnnnnnnnnnnnnnnnnnnnnnnnnnnnnnnnnnnnnnnnnnnnnnnnnnnnnnnnnnnnnnnnnnnnnnnnnnnnnnnnnnnnnnnnnnnnnnnnnnnnnnnnnnnnnnnnnnnnnnnnnnnnnnnnnnnnnnnnnnnnnnnnnnnnnnnnnnnnnnnnnnnnnnnnnnnnnnnnnnnnnnnnnnnnnnnnnnnnnnnnnnnnnnnnnnnnnnnnnnnnnnnnnnnnnnnnnnnnnnnnnnnnnnnnnnnnnnnnnnnnnnnnnnnnnnnnnnnnnnnnnnnnnnnnnnnnnnnnnnnnnnnnnnnnnnnnnnnnnnnnnnnnnnnnnnnnnnnnnnnnnnnnnnnnnnnnnnnnnnnnnnnnnnnnnnnnnnnnnnnnnnnnnnnnnnnnnnnnnnnnnnnnnnnnnnnnnnnnnnnnnnnnnnnnnnnnnnnnnnnnnnnnnnnnnnnnnnnnnnnnnnnnnnnnnnnnnnnnnnnnnnnnnnnnnnnnnnnnnnnnnnnnnnnnnnnnnnnnnnnnnnnnnnnnnnnnnnnnnnnnnnnnnnnnnnnnnnnnnnnnnnnnnnnnnnnnnnnnnnnnnnnnnnnnnnnnnnnnnnnnnnnnnnnnnnnnnnnnnnnnnnnnnnnnnnnnnnnnnnnnnnnnnnnnnnnnnnnnnnnnnnnnnnnnnnnnnnnnnnnnnnnnnnnnnnnnnnnnnnnnnnnnnnnnnnnnnnnnnnnnnnnnnnnnnnnnnnnnnnnnnnnnnnnnnnnnnnnnnnnnnnnnnnnnnnnnnnnnnnnnnnnnnnnnnnnnnnnnnnnnnnnnnnnnnnnnnnnnnnnnnnnnnnnnnnnnnnnnnnnnnnnnnnnnnnnnnnnnnnnnnnnnnnnnnnnnnnnnnnnnnnnnnnnnnnnnnnnnnnnnnnnnnnnnnnnnnnnnnnnnnnnnnnnnnnnnnnnnnnnnnnnnnnnnnnnnnnnnnnnnnnnnnnnnnnnnnnnnnnnnnnnnnnnnnnnnnnnnnnnnnnnnnnnnnnnnnnnnnnnnnnnnnnnnnnnnnnnnnnnnnnnnnnnnnnnnnnnnnnnnnnnnnnnnnnnnnnnnnnnnnnnnnnnnnnnnnnnnnnnnnnnnnnnnnnnnnnnnnnnnnnnnnnnnnnnnnnnnnnnnnnnnnnnnnnnnnnnnnnnnnnnnnnnnnnnnnnnnnnnnnnnnnnnnnnnnnnnnnnnnnnnnnnnnnnnnnnnnnnnnnnnnnnnnnnnnnnnnnnnnnnnnnnnnnnnnnnnnnnnnnnnnnnnnnnnnnnnnnnnnnnnnnnnnnnnnnnnnnnnnnnnnnnnnnnnnnnnnnnnnnnnnnnnnnnnnnnnnnnnnnnnnnnnnnnnnnnnnnnnnnnnnnnnnnnnnnnnnnnnnnnnnnnnnnnnnnnnnnnnnnnnnnnnnnnnnnnnnnnnnnnnnnnnnnnnnnnnnnnnnnnnnnnnnnnnnnnnnnnnnnnnnnnnnnnnnnnnnnnnnnnnnnnnnnnnnnnnnnnnnnnnnnnnnnnnnnnnnnnnnnnnnnnnnnnnnnnnnnnnnnnnnnnnnnnnnnnnnnnnnnnnnnnnnnnnnnnnnnnnnnnnnnnnnnnnnnnnnnnnnnnnnnnnnnnnnnnnnnnnnnnnnnnnnnnnnnnnnnnnnnnnnnnnnnnnnnnnnnnnnnnnnnnnnnnnnnnnnnnnnnnnnnnnnnnnnnnnnnnnnnnnnnnnnnnnnnnnnnnnnnnnnnnnnnnnnnnnnnnnnnnnnnnnnnnnnnnnnnnnnnnnnnnnnnnnnnnnnnnnnnnnnnnnnnnnnnnnnnnnnnnnnnnnnnnnnnnnnnnnnnnnnnnnnnnnnnnnnnnnnnnnnnnnnnnnnnnnnnnnnnnnnnnnnnnnnnnnnnnnnnnnnnnnnnnnnnnnnnnnnnnnnnnnnnnnnnnnnnnnnnnnnnnnnnnnnnnnnnnnnnnnnnnnnnnnnnnnnnnnnnnnnnnnnnnnnnnnnnnnnnnnnnnnnnnnnnnnnnnnnnnnnnnnnnnnnnnnnnnnnnnnnnnnnnnnnnnnnnnnnnnnnnnnnnnnnnnnnnnnnnnnnnnnnnnnnnnnnnnnnnnnnnnnnnnnnnnnnnnnnnnnnnnnnnnnnnnnnnnnnnnnnnnnnnnnnnnnnnnnnnnnnnnnnnnnnnnnnnnnnnnnnnnnnnnnnnnnnnnnnnnnnnnnnnnnnnnnnnnnnnnnnnnnnnnnnnnnnnnnnnnnnnnnnnnnnnnnnnnnnnnnnnnnnnnnnnnnnnnnnnnnnnnnnnnnnnnnnnnnnnnnnnnnnnnnnnnnnnnnnnnnnnnnnnnnnnnnnnnnnnnnnnnnnnnnnnnnnnnnnnnnnnnnnnnnnnnnnnnnnnnnnnnnnnnnnnnnnnnnnnnnnnnnnnnnnnnnnnnnnnnnnnnnnnnnnnnnnnnnnnnnnnnnnnnnnnnnnnnnnnnnnnnnnnnnnnnnnnnnnnnnnnnnnnnnnnnnnnnnnnnnnnnnnnnnnnnnnnnnnnnnnnnnnnnnnnnnnnnnnnnnnnnnnnnnnnnnnnnnnnnnnnnnnnnnnnnnnnnnnnnnnnnnnnnnnnnnnnnnnnnnnnnnnnnnnnnnnnnnnnnnnnnnnnnnnnnnnnnnnnnnnnnnnnnnnnnnnnnnnnnnnnnnnnnnnnnnnnnnnnnnnnnnnnnnnnnnnnnnnnnnnnnnnnnnnnnnnnnnnnnnnnnnnnnnnnnnnnnnnnnnnnnnnnnnnnnnnnnnnnnnnnnnnnnnnnnnnnnnnnnnnnnnnnnnnnnnnnnnnnnnnnnnnnnnnnnnnnnnnnnnnnnnnnnnnnnnnnnnnnnnnnnnnnnnnnnnnnnnnnnnnnnnnnnnnnnnnnnnnnnnnnnnnnnnnnnnnnnnnnnnnnnnnnnnnnnnnnnnnnnnnnnnnnnnnnnnnnnnnnnnnnnnnnnnnnnnnnnnnnnnnnnnnnnnnnnnnnnnnnnnnnnnnnnnnnnnnnnnnnnnnnnnnnnnnnnnnnnnnnnnnnnnnnnnnnnnnnnnnnnnnnnnnnnnnnnnnnnnnnnnnnnnnnnnnnnnnnnnnnnnnnnnnnnnnnnnnnnnnnnnnnnnnnnnnnnnnnnnnnnnnnnnnnnnnnnnnnnnnnnnnnnnnnnnnnnnnnnnnnnnnnnnnnnnnnnnnnnnnnnnnnnnnnnnnnnnnnnnnnnnnnnnnnnnnnnnnnnnnnnnnnnnnnnnnnnnnnnnnnnnnnnnnnnnnnnnnnnnnnnnnnnnnnnnnnnnnnnnnnnnnnnnnnnnnnnnnnnnnnnnnnnnnnnnnnnnnnnnnnnnnnnnnnnnnnnnnnnnnnnnnnnnnnnnnnnnnnnnnnnnnnnnnnnnnnnnnnnnnnnnnnnnnnnnnnnnnnnnnnnnnnnnnnnnnnnnnnnnnnnnnnnnnnnnnnnnnnnnnnnnnnnnnnnnnnnnnnnnnnnnnnnnnnnnnnnnnnnnnnnnnnnnnnnnnnnnnnnnnnnnnnnnnnnnnnnnnnnnnnnnnnnnnnnnnnnnnnnnnnnnnnnnnnnnnnnnnnnnnnnnnnnnnnnnnnnnnnnnnnnnnnnnnnnnnnnnnnnnnnnnnnnnnnnnnnnnnnnnnnnnnnnnnnnnnnnnnnnnnnnnnnnnnnnnnnnnnnnnnnnnnnnnnnnnnnnnnnnnnnnnnnnnnnnnnnnnnnnnnnnnnnnnnnnnnnnnnnnnnnnnnnnnnnnnnnnnnnnnnnnnnnnnnnnnnnnnnnnnnnnnnnnnnnnnnnnnnnnnnnnnnnnnnnnnnnnnnnnnnnnnnnnnnnnnnnnnnnnnnnnnnnnnnnnnnnnnnnnnnnnnnnnnnnnnnnnnnnnnnnnnnnnnnnnnnnnnnnnnnnnnnnnnnnnnnnnnnnnnnnnnnnnnnnnnnnnnnnnnnnnnnnnnnnnnnnnnnnnnnnnnnnnnnnnnnnnnnnnnnnnnnnnnnnnnnnnnnnnnnnnnnnnnnnnnnnnnnnnnnnnnnnnnnnnnnnnnnnnnnnnnnnnnnnnnnnnnnnnnnnnnnnnnnnnnnnnnnnnnnnnnnnnnnnnnnnnnnnnnnnnnnnnnnnnnnnnnnnnnnnnnnnnnnnnnnnnnnnnnnnnnnnnnnnnnnnnnnnnnnnnnnnnnnnnnnnnnnnnnnnnnnnnnnnnnnnnnnnnnnnnnnnnnnnnnnnnnnnnnnnnnnnnnnnnnnnnnnnnnnnnnnnnnnnnnnnnnnnnnnnnnnnnnnnnnnnnnnnnnnnnnnnnnnnnnnnnnnnnnnnnnnnnnnnnnnnnnnnnnnnnnnnnnnnnnnnnnnnnnnnnnnnnnnnnnnnnnnnnnnnnnnnnnnnnnnnnnnnnnnnnnnnnnnnnnnnnnnnnnnnnnnnnnnnnnnnnnnnnnnnnnnnnnnnnnnnnnnnnnnnnnnnnnnnnnnnnnnnnnnnnnnnnnnnnnnnnnnnnnnnnnnnnnnnnnnnnnnnnnnnnnnnnnnnnnnnnnnnnnnnnnnnnnnnnnnnnnnnnnnnnnnnnnnnnnnnnnnnnnnnnnnnnnnnnnnnnnnnnnnnnnnnnnnnnnnnnnnnnnnnnnnnnnnnnnnnnnnnnnnnnnnnnnnnnnnnnnnnnnnnnnnnnnnnnnnnnnnnnnnnnnnnnnnnnnnnnnnnnnnnnnnnnnnnnnnnnnnnnnnnnnnnnnnnnnnnnnnnnnnnnnnnnnnnnnnnnnnnnnnnnnnnnnnnnnnnnnnnnnnnnnnnnnnnnnnnnnnnnnnnnnnnnnnnnnnnnnnnnnnnnnnnnnnnnnnnnnnnnnnnnnnnnnnnnnnnnnnnnnnnnnnnnnnnnnnnnnnnnnnnnnnnnnnnnnnnnnnnnnnnnnnnnnnnnnnnnnnnnnnnnnnnnnnnnnnnnnnnnnnnnnnnnnnnnnnnnnnnnnnnnnnnnnnnnnnnnnnnnnnnnnnnnnnnnnnnnnnnnnnnnnnnnnnnnnnnnnnnnnnnnnnnnnnnnnnnnnnnnnnnnnnnnnnnnnnnnnnnnnnnnnnnnnnnnnnnnnnnnnnnnnnnnnnnnnnnnnnnnnnnnnnnnnnnnnnnnnnnnnnnnnnnnnnnnnnnnnnnnnnnnnnnnnnnnnnnnnnnnnnnnnnnnnnnnnnnnnnnnnnnnnnnnnnnnnnnnnnnnnnnnnnnnnnnnnnnnnnnnnnnnnnnnnnnnnnnnnnnnnnnnnnnnnnnnnnnnnnnnnnnnnnnnnnnnnnnnnnnnnnnnnnnnnnnnnnnnnnnnnnnnnnnnnnnnnnnnnnnnnnnnnnnnnnnnnnnnnnnnnnnnnnnnnnnnnnnnnnnnnnnnnnnnnnnnnnnnnnnnnnnnnnnnnnnnnnnnnnnnnnnnnnnnnnnnnnnnnnnnnnnnnnnnnnnnnnnnnnnnnnnnnnnnnnnnnnnnnnnnnnnnnnnnnnnnnnnnnnnnnnnnnnnnnnnnnnnnnnnnnnnnnnnnnnnnnnnnnnnnnnnnnnnnnnnnnnnnnnnnnnnnnnnnnnnnnnnnnnnnnnnnnnnnnnnnnnnnnnnnnnnnnnnnnnnnnnnnnnnnnnnnnnnnnnnnnnnnnnnnnnnnnnnnnnnnnnnnnnnnnnnnnnnnnnnnnnnnnnnnnnnnnnnnnnnnnnnnnnnnnnnnnnnnnnnnnnnnnnnnnnnnnnnnnnnnnnnnnnnnnnnnnnnnnnnnnnnnnnnnnnnnnnnnnnnnnnnnnnnnnnnnnnnnnnnnnnnnnnnnnnnnnnnnnnnnnnnnnnnnnnnnnnnnnnnnnnnnnnnnnnnnnnnnnnnnnnnnnnnnnnnnnnnnnnnnnnnnnnnnnnnnnnnnnnnnnnnnnnnnnnnnnnnnnnnnnnnnnnnnnnnnnnnnnnnnnnnnnnnnnnnnnnnnnnnnnnnnnnnnnnnnnnnnnnnnnnnnnnnnnnnnnnnnnnnnnnnnnnnnnnnnnnnnnnnnnnnnnnnnnnnnnnnnnnnnnnnnnnnnnnnnnnnnnnnnnnnnnnnnnnnnnnnnnnnnnnnnnnnnnnnnnnnnnnnnnnnnnnnnnnnnnnnnnnnnnnnnnnnnnnnnnnnnnnnnnnnnnnnnnnnnnnnnnnnnnnnnnnnnnnnnnnnnnnnnnnnnnnnnnnnnnnnnnnnnnnnnnnnnnnnnnnnnnnnnnnnnnnnnnnnnnnnnnnnnnnnnnnnnnnnnnnnnnnnnnnnnnnnnnnnnnnnnnnnnnnnnnnnnnnnnnnnnnnnnnnnnnnnnnnnnnnnnnnnnnnnnnnnnnnnnnnnnnnnnnnnnnnnnnnnnnnnnnnnnnnnnnnnnnnnnnnnnnnnnnnnnnnnnnnnnnnnnnnnnnnnnnnnnnnnnnnnnnnnnnnnnnnnnnnnnnnnnnnnnnnnnnnnnnnnnnnnnnnnnnnnnnnnnnnnnnnnnnnnnnnnnnnnnnnnnnnnnnnnnnnnnnnnnnnnnnnnnnnnnnnnnnnnnnnnnnnnnnnnnnnnnnnnnnnnnnnnnnnnnnnnnnnnnnnnnnnnnnnnnnnnnnnnnnnnnnnnnnnnnnnnnnnnnnnnnnnnnnnnnnnnnnnnnnnnnnnnnnnnnnnnnnnnnnnnnnnnnnnnnnnnnnnnnnnnnnnnnnnnnnnnnnnnnnnnnnnnnnnnnnnnnnnnnnnnnnnnnnnnnnnnnnnnnnnnnnnnnnnnnnnnnnnnnnnnnnnnnnnnnnnnnnnnnnnnnnnnnnnnnnnnnnnnnnnnnnnnnnnnnnnnnnnnnnnnnnnnnnnnnnnnnnnnnnnnnnnnnnnnnnnnnnnnnnnnnnnnnnnnnnnnnnnnnnnnnnnnnnnnnnnnnnnnnnnnnnnnnnnnnnnnnnnnnnnnnnnnnnnnnnnnnnnnnnnnnnnnnnnnnnnnnnnnnnnnnnnnnnnnnnnnnnnnnnnnnnnnnnnnnnnnnnnnnnnnnnnnnnnnnnnnnnnnnnnnnnnnnnnnnnnnnnnnnnnnnnnnnnnnnnnnnnnnnnnnnnnnnnnnnnnnnnnnnnnnnnnnnnnnnnnnnnnnnnnnnnnnnnnnnnnnnnnnnnnnnnnnnnnnnnnnnnnnnnnnnnnnnnnnnnnnnnnnnnnnnnnnnnnnnnnnnnnnnnnnnnnnnnnnnnnnnnnnnnnnnnnnnnnnnnnnnnnnnnnnnnnnnnnnnnnnnnnnnnnnnnnnnnnnnnnnnnnnnnnnnnnnnnnnnnnnnnnnnnnnnnnnnnnnnnnnnnnnnnnnnnnnnnnnnnnnnnnnnnnnnnnnnnnnnnnnnnnnnnnnnnnnnnnnnnnnnnnnnnnnnnnnnnnnnnnnnnnnnnnnnnnnnnnnnnnnnnnnnnnnnnnnnnnnnnnnnnnnnnnnnnnnnnnnnnnnnnnnnnnnnnnnnnnnnnnnnnnnnnnnnnnnnnnnnnnnnnnnnnnnnnnnnnnnnnnnnnnnnnnnnnnnnnnnnnnnnnnnnnnnnnnnnnnnnnnnnnnnnnnnnnnnnnnnnnnnnnnnnnnnnnnnnnnnnnnnnnnnnnnnnnnnnnnnnnnnnnnnnnnnnnnnnnnnnnnnnnnnnnnnnnnnnnnnnnnnnnnnnnnnnnnnnnnnnnnnnnnnnnnnnnnnnnnnnnnnnnnnnnnnnnnnnnnnnnnnnnnnnnnnnnnnnnnnnnnnnnnnnnnnnnnnnnnnnnnnnnnnnnnnnnnnnnnnnnnnnnnnnnnnnnnnnnnnnnnnnnnnnnnnnnnnnnnnnnnnnnnnnnnnnnnnnnnnnnnnnnnnnnnnnnnnnnnnnnnnnnnnnnnnnnnnnnnnnnnnnnnnnnnnnnnnnnnnnnnnnnnnnnnnnnnnnnnnnnnnnnnnnnnnnnnnnnnnnnnnnnnnnnnnnnnnnnnnnnnnnnnnnnnnnnnnnnnnnnnnnnnnnnnnnnnnnnnnnnnnnnnnnnnnnnnnnnnnnnnnnnnnnnnnnnnnnnnnnnnnnnnnnnnnnnnnnnnnnnnnnnnnnnnnnnnnnnnnnnnnnnnnnnnnnnnnnnnnnnnnnnnnnnnnnnnnnnnnnnnnnnnnnnnnnnnnnnnnnnnnnnnnnnnnnnnnnnnnnnnnnnnnnnnnnnnnnnnnnnnnnnnnnnnnnnnnnnnnnnnnnnnnnnnnnnnnnnnnnnnnnnnnnnnnnnnnnnnnnnnnnnnnnnnnnnnnnnnnnnnnnnnnnnnnnnnnnnnnnnnnnnnnnnnnnnnnnnnnnnnnnnnnnnnnnnnnnnnnnnnnnnnnnnnnnnnnnnnnnnnnnnnnnnnnnnnnnnnnnnnnnnnnnnnnnnnnnnnnnnnnnnnnnnnnnnnnnnnnnnnnnnnnnnnnnnnnnnnnnnnnnnnnnnnnnnnnnnnnnnnnnnnnnnnnnnnnnnnnnnnnnnnnnnnnnnnnnnnnnnnnnnnnnnnnnnnnnnnnnnnnnnnnnnnnnnnnnnnnnnnnnnnnnnnnnnnnnnnnnnnnnnnnnnnnnnnnnnnnnnnnnnnnnnnnnnnnnnnnnnnnnnnnnnnnnnnnnnnnnnnnnnnnnnnnnnnnnnnnnnnnnnnnnnnnnnnnnnnnnnnnnnnnnnnnnnnnnnnnnnnnnnnnnnnnnnnnnnnnnnnnnnnnnnnnnnnnnnnnnnnnnnnnnnnnnnnnnnnnnnnnnnnnnnnnnnnnnnnnnnnnnnnnnnnnnnnnnnnnnnnnnnnnnnnnnnnnnnnnnnnnnnnnnnnnnnnnnnnnnnnnnnnnnnnnnnnnnnnnnnnnnnnnnnnnnnnnnnnnnnnnnnnnnnnnnnnnnnnnnnnnnnnnnnnnnnnnnnnnnnnnnnnnnnnnnnnnnnnnnnnnnnnnnnnnnnnnnnnnnnnnnnnnnnnnnnnnnnnnnnnnnnnnnnnnnnnnnnnnnnnnnnnnnnnnnnnnnnnnnnnnnnnnnnnnnnnnnnnnnnnnnnnnnnnnnnnnnnnnnnnnnnnnnnnnnnnnnnnnnnnnnnnnnnnnnnnnnnnnnnnnnnnnnnnnnnnnnnnnnnnnnnnnnnnnnnnnnnnnnnnnnnnnnnnnnnnnnnnnnnnnnnnnnnnnnnnnnnnnnnnnnnnnnnnnnnnnnnnnnnnnnnnnnnnnnnnnnnnnnnnnnnnnnnnnnnnnnnnnnnnnnnnnnnnnnnnnnnnnnnnnnnnnnnnnnnnnnnnnnnnnnnnnnnnnnnnnnnnnnnnnnnnnnnnnnnnnnnnnnnnnnnnnnnnnnnnnnnnnnnnnnnnnnnnnnnnnnnnnnnnnnnnnnnnnnnnnnnnnnnnnnnnnnnnnnnnnnnnnnnnnnnnnnnnnnnnnnnnnnnnnnnnnnnnnnnnnnnnnnnnnnnnnnnnnnnnnnnnnnnnnnnnnnnnnnnnnnnnnnnnnnnnnnnnnnnnnnnnnnnnnnnnnnnnnnnnnnnnnnnnnnnnnnnnnnnnnnnnnnnnnnnnnnnnnnnnnnnnnnnnnnnnnnnnnnnnnnnnnnnnnnnnnnnnnnnnnnnnnnnnnnnnnnnnnnnnnnnnnnnnnnnnnnnnnnnnnnnnnnnnnnnnnnnnnnnnnnnnnnnnnnnnnnnnnnnnnnnnnnnnnnnnnnnnnnnnnnnnnnnnnnnnnnnnnnnnnnnnnnnnnnnnnnnnnnnnnnnnnnnnnnnnnnnnnnnnnnnnnnnnnnnnnnnnnnnnnnnnnnnnnnnnnnnnnnnnnnnnnnnnnnnnnnnnnnnnnnnnnnnnnnnnnnnnnnnnnnnnnnnnnnnnnnnnnnnnnnnnnnnnnnnnnnnnnnnnnnnnnnnnnnnnnnnnnnnnnnnnnnnnnnnnnnnnnnnnnnnnnnnnnnnnnnnnnnnnnnnnnnnnnnnnnnnnnnnnnnnnnnnnnnnnnnnnnnnnnnnnnnnnnnnnnnnnnnnnnnnnnnnnnnnnnnnnnnnnnnnnnnnnnnnnnnnnnnnnnnnnnnnnnnnnnnnnnnnnnnnnnnnnnnnnnnnnnnnnnnnnnnnnnnnnnnnnnnnnnnnnnnnnnnnnnnnnnnnnnnnnnnnnnnnnnnnnnnnnnnnnnnnnnnnnnnnnnnnnnnnnnnnnnnnnnnnnnnnnnnnnnnnnnnnnnnnnnnnnnnnnnnnnnnnnnnnnnnnnnnnnnnnnnnnnnnnnnnnnnnnnnnnnnnnnnnnnnnnnnnnnnnnnnnnnnnnnnnnnnnnnnnnnnnnnnnnnnnnnnnnnnnnnnnnnnnnnnnnnnnnnnnnnnnnnnnnnnnnnnnnnnnnnnnnnnnnnnnnnnnnnnnnnnnnnnnnnnnnnnnnnnnnnnnnnnnnnnnnnnnnnnnnnnnnnnnnnnnnnnnnnnnnnnnnnnnnnnnnnnnnnnnnnnnnnnnnnnnnnnnnnnnnnnnnnnnnnnnnnnnnnnnnnnnnnnnnnnnnnnnnnnnnnnnnnnnnnnnnnnnnnnnnnnnnnnnnnnnnnnnnnnnnnnnnnnnnnnnnnnnnnnnnnnnnnnnnnnnnnnnnnnnnnnnnnnnnnnnnnnnnnnnnnnnnnnnnnnnnnnnnnnnnnnnnnnnnnnnnnnnnnnnnnnnnnnnnnnnnnnnnnnnnnnnnnnnnnnnnnnnnnnnnnnnnnnnnnnnnnnnnnnnnnnnnnnnnnnnnnnnnnnnnnnnnnnnnnnnnnnnnnnnnnnnnnnnnnnnnnnnnnnnnnnnnnnnnnnnnnnnnnnnnnnnnnnnnnnnnnnnnnnnnnnnnnnnnnnnnnnnnnnnnnnnnnnnnnnnnnnnnnnnnnnnnnnnnnnnnnnnnnnnnnnnnnnnnnnnnnnnnnnnnnnnnnnnnnnnnnnnnnnnnnnnnnnnnnnnnnnnnnnnnnnnnnnnnnnnnnnnnnnnnnnnnnnnnnnnnnnnnnnnnnnnnnnnnnnnnnnnnnnnnnnnnnnnnnnnnnnnnnnnnnnnnnnnnnnnnnnnnnnnnnnnnnnnnnnnnnnnnnnnnnnnnnnnnnnnnnnnnnnnnnnnnnnnnnnnnnnnnnnnnnnnnnnnnnnnnnnnnnnnnnnnnnnnnnnnnnnnnnnnnnnnnnnnnnnnnnnnnnnnnnnnnnnnnnnnnnnnnnnnnnnnnnnnnnnnnnnnnnnnnnnnnnnnnnnnnnnnnnnnnnnnnnnnnnnnnnnnnnnnnnnnnnnnnnnnnnnnnnnnnnnnnnnnnnnnnnnnnnnnnnnnnnnnnnnnnnnnnnnnnnnnnnnnnnnnnnnnnnnnnnnnnnnnnnnnnnnnnnnnnnnnnnnnnnnnnnnnnnnnnnnnnnnnnnnnnnnnnnnnnnnnnnnnnnnnnnnnnnnnnnnnnnnnnnnnnnnnnnnnnnnnnnnnnnnnnnnnnnnnnnnnnnnnnnnnnnnnnnnnnnnnnnnnnnnnnnnnnnnnnnnnnnnnnnnnnnnnnnnnnnnnnnnnnnnnnnnnnnnnnnnnnnnnnnnnnnnnnnnnnnnnnnnnnnnnnnnnnnnnnnnnnnnnnnnnnnnnnnnnnnnnnnnnnnnnnnnnnnnnnnnnnnnnnnnnnnnnnnnnnnnnnnnnnnnnnnnnnnnnnnnnnnnnnnnnnnnnnnnnnnnnnnnnnnnnnnnnnnnnnnnnnnnnnnnnnnnnnnnnnnnnnnnnnnnnnnnnnnnnnnnnnnnnnnnnnnnnnnnnnnnnnnnnnnnnnnnnnnnnnnnnnnnnnnnnnnnnnnnnnnnnnnnnnnnnnnnnnnnnnnnnnnnnnnnnnnnnnnnnnnnnnnnnnnnnnnnnnnnnnnnnnnnnnnnnnnnnnnnnnnnnnnnnnnnnnnnnnnnnnnnnnnnnnnnnnnnnnnnnnnnnnnnnnnnnnnnnnnnnnnnnnnnnnnnnnnnnnnnnnnnnnnnnnnnnnnnnnnnnnnnnnnnnnnnnnnnnnnnnnnnnnnnnnnnnnnnnnnnnnnnnnnnnnnnnnnnnnnnnnnnnnnnnnnnnnnnnnnnnnnnnnnnnnnnnnnnnnnnnnnnnnnnnnnnnnnnnnnnnnnnnnnnnnnnnnnnnnnnnnnnnnnnnnnnnnnnnnnnnnnnnnnnnnnnnnnnnnnnnnnnnnnnnnnnnnnnnnnnnnnnnnnnnnnnnnnnnnnnnnnnnnnnnnnnnnnnnnnnnnnnnnnnnnnnnnnnnnnnnnnnnnnnnnnnnnnnnnnnnnnnnnnnnnnnnnnnnnnnnnnnnnnnnnnnnnnnnnnnnnnnnnnnnnnnnnnnnnnnnnnnnnnnnnnnnnnnnnnnnnnnnnnnnnnnnnnnnnnnnnnnnnnnnnnnnnnnnnnnnnnnnnnnnnnnnnnnnnnnnnnnnnnnnnnnnnnnnnnnnnnnnnnnnnnnnnnnnnnnnnnnnnnnnnnnnnnnnnnnnnnnnnnnnnnnnnnnnnnnnnnnnnnnnnnnnnnnnnnnnnnnnnnnnnnnnnnnnnnnnnnnnnnnnnnnnnnnnnnnnnnnnnnnnnnnnnnnnnnnnnnnnnnnnnnnnnnnnnnnnnnnnnnnnnnnnnnnnnnnnnnnnnnnnnnnnnnnnnnnnnnnnnnnnnnnnnnnnnnnnnnnnnnnnnnnnnnnnnnnnnnnnnnnnnnnnnnnnnnnnnnnnnnnnnnnnnnnnnnnnnnnnnnnnnnnnnnnnnnnnnnnnnnnnnnnnnnnnnnnnnnnnnnnnnnnnnnnnnnnnnnnnnnnnnnnnnnnnnnnnnnnnnnnnnnnnnnnnnnnnnnnnnnnnnnnnnnnnnnnnnnnnnnnnnnnnnnnnnnnnnnnnnnnnnnnnnnnnnnnnnnnnnnnnnnnnnnnnnnnnnnnnnnnnnnnnnnnnnnnnnnnnnnnnnnnnnnnnnnnnnnnnnnnnnnnnnnnnnnnnnnnnnnnnnnnnnnnnnnnnnnnnnnnnnnnnnnnnnnnnnnnnnnnnnnnnnnnnnnnnnnnnnnnnnnnnnnnnnnnnnnnnnnnnnnnnnnnnnnnnnnnnnnnnnnnnnnnnnnnnnnnnnnnnnnnnnnnnnnnnnnnnnnnnnnnnnnnnnnnnnnnnnnnnnnnnnnnnnnnnnnnnnnnnnnnnnnnnnnnnnnnnnnnnnnnnnnnnnnnnnnnnnnnnnnnnnnnnnnnnnnnnnnnnnnnnnnnnnnnnnnnnnnnnnnnnnnnnnnnnnnnnnnnnnnnnnnnnnnnnnnnnnnnnnnnnnnnnnnnnnnnnnnnnnnnnnnnnnnnnnnnnnnnnnnnnnnnnnnnnnnnnnnnnnnnnnnnnnnnnnnnnnnnnnnnnnnnnnnnnnnnnnnnnnnnnnnnnnnnnnnnnnnnnnnnnnnnnnnnnnnnnnnnnnnnnnnnnnnnnnnnnnnnnnnnnnnnnnnnnnnnnnnnnnnnnnnnnnnnnnnnnnnnnnnnnnnnnnnnnnnnnnnnnnnnnnnnnnnnnnnnnnnnnnnnnnnnnnnnnnnnnnnnnnnnnnnnnnnnnnnnnnnnnnnnnnnnnnnnnnnnnnnnnnnnnnnnnnnnnnnnnnnnnnnnnnnnnnnnnnnnnnnnnnnnnnnnnnnnnnnnnnnnnnnnnnnnnnnnnnnnnnnnnnnnnnnnnnnnnnnnnnnnnnnnnnnnnnnnnnnnnnnnnnnnnnnnnnnnnnnnnnnnnnnnnnnnnnnnnnnnnnnnnnnnnnnnnnnnnnnnnnnnnnnnnnnnnnnnnnnnnnnnnnnnnnnnnnnnnnnnnnnnnnnnnnnnnnnnnnnnnnnnnnnnnnnnnnnnnnnnnnnnnnnnnnnnnnnnnnnnnnnnnnnnnnnnnnnnnnnnnnnnnnnnnnnnnnnnnnnnnnnnnnnnnnnnnnnnnnnnnnnnnnnnnnnnnnnnnnnnnnnnnnnnnnnnnnnnnnnnnnnnnnnnnnnnnnnnnnnnnnnnnnnnnnnnnnnnnnnnnnnnnnnnnnnnnnnnnnnnnnnnnnnnnnnnnnnnnnnnnnnnnnnnnnnnnnnnnnnnnnnnnnnnnnnnnnnnnnnnnnnnnnnnnnnnnnnnnnnnnnnnnnnnnnnnnnnnnnnnnnnnnnnnnnnnnnnnnnnnnnnnnnnnnnnnnnnnnnnnnnnnnnnnnnnnnnnnnnnnnnnnnnnnnnnnnnnnnnnnnnnnnnnnnnnnnnnnnnnnnnnnnnnnnnnnnnnnnnnnnnnnnnnnnnnnnnnnnnnnnnnnnnnnnnnnnnnnnnnnnnnnnnnnnnnnnnnnnnnnnnnnnnnnnnnnnnnnnnnnnnnnnnnnnnnnnnnnnnnnnnnnnnnnnnnnnnnnnnnnnnnnnnnnnnnnnnnnnnnnnnnnnnnnnnnnnnnnnnnnnnnnnnnnnnnnnnnnnnnnnnnnnnnnnnnnnnnnnnnnnnnnnnnnnnnnnnnnnnnnnnnnnnnnnnnnnnnnnnnnnnnnnnnnnnnnnnnnnnnnnnnnnnnnnnnnnnnnnnnnnnnnnnnnnnnnnnnnnnnnnnnnnnnnnnnnnnnnnnnnnnnnnnnnnnnnnnnnnnnnnnnnnnnnnnnnnnnnnnnnnnnnnnnnnnnnnnnnnnnnnnnnnnnnnnnnnnnnnnnnnnnnnnnnnnnnnnnnnnnnnnnnnnnnnnnnnnnnnnnnnnnnnnnnnnnnnnnnnnnnnnnnnnnnnnnnnnnnnnnnnnnnnnnnnnnnnnnnnnnnnnnnnnnnnnnnnnnnnnnnnnnnnnnnnnnnnnnnnnnnnnnnnnnnnnnnnnnnnnnnnnnnnnnnnnnnnnnnnnnnnnnnnnnnnnnnnnnnnnnnnnnnnnnnnnnnnnnnnnnnnnnnnnnnnnnnnnnnnnnnnnnnnnnnnnnnnnnnnnnnnnnnnnnnnnnnnnnnnnnnnnnnnnnnnnnnnnnnnnnnnnnnnnnnnnnnnnnnnnnnnnnnnnnnnnnnnnnnnnnnnnnnnnnnnnnnnnnnnnnnnnnnnnnnnnnnnnnnnnnnnnnnnnnnnnnnnnnnnnnnnnnnnnnnnnnnnnnnnnnnnnnnnnnnnnnnnnnnnnnnnnnnnnnnnnnnnnnnnnnnnnnnnnnnnnnnnnnnnnnnnnnnnnnnnnnnnnnnnnnnnnnnnnnnnnnnnnnnnnnnnnnnnnnnnnnnnnnnnnnnnnnnnnnnnnnnnnnnnnnnnnnnnnnnnnnnnnnnnnnnnnnnnnnnnnnnnnnnnnnnnnnnnnnnnnnnnnnnnnnnnnnnnnnnnnnnnnnnnnnnnnnnnnnnnnnnnnnnnnnnnnnnnnnnnnnnnnnnnnnnnnnnnnnnnnnnnnnnnnnnnnnnnnnnnnnnnnnnnnnnnnnnnnnnnnnnnnnnnnnnnnnnnnnnnnnnnnnnnnnnnnnnnnnnnnnnnnnnnnnnnnnnnnnnnnnnnnnnnnnnnnnnnnnnnnnnnnnnnnnnnnnnnnnnnnnnnnnnnnnnnnnnnnnnnnnnnnnnnnnnnnnnnnnnnnnnnnnnnnnnnnnnnnnnnnnnnnnnnnnnnnnnnnnnnnnnnnnnnnnnnnnnnnnnnnnnnnnnnnnnnnnnnnnnnnnnnnnnnnnnnnnnnnnnnnnnnnnnnnnnnnnnnnnnnnnnnnnnnnnnnnnnnnnnnnnnnnnnnnnnnnnnnnnnnnnnnnnnnnnnnnnnnnnnnnnnnnnnnnnnnnnnnnnnnnnnnnnnnnnnnnnnnnnnnnnnnnnnnnnnnnnnnnnnnnnnnnnnnnnnnnnnnnnnnnnnnnnnnnnnnnnnnnnnnnnnnnnnnnnnnnnnnnnnnnnnnnnnnnnnnnnnnnnnnnnnnnnnnnnnnnnnnnnnnnnnnnnnnnnnnnnnnnnnnnnnnnnnnnnnnnnnnnnnnnnnnnnnnnnnnnnnnnnnnnnnnnnnnnnnnnnnnnnnnnnnnnnnnnnnnnnnnnnnnnnnnnnnnnnnnnnnnnnnnnnnnnnnnnnnnnnnnnnnnnnnnnnnnnnnnnnnnnnnnnnnnnnnnnnnnnnnnnnnnnnnnnnnnnnnnnnnnnnnnnnnnnnnnnnnnnnnnnnnnnnnnnnnnnnnnnnnnnnnnnnnnnnnnnnnnnnnnnnnnnnnnnnnnnnnnnnnnnnnnnnnnnnnnnnnnnnnnnnnnnnnnnnnnnnnnnnnnnnnnnnnnnnnnnnnnnnnnnnnnnnnnnnnnnnnnnnnnnnnnnnnnnnnnnnnnnnnnnnnnnnnnnnnnnnnnnnnnnnnnnnnnnnnnnnnnnnnnnnnnnnnnnnnnnnnnnnnnnnnnnnnnnnnnnnnnnnnnnnnnnnnnnnnnnnnnnnnnnnnnnnnnnnnnnnnnnnnnnnnnnnnnnnnnnnnnnnnnnnnnnnnnnnnnnnnnnnnnnnnnnnnnnnnnnnnnnnnnnnnnnnnnnnnnnnnnnnnnnnnnnnnnnnnnnnnnnnnnnnnnnnnnnnnnnnnnnnnnnnnnnnnnnnnnnnnnnnnnnnnnnnnnnnnnnnnnnnnnnnnnnnnnnnnnnnnnnnnnnnnnnnnnnnnnnnnnnnnnnnnnnnnnnnnnnnnnnnnnnnnnnnnnnnnnnnnnnnnnnnnnnnnnnnnnnnnnnnnnnnnnnnnnnnnnnnnnnnnnnnnnnnnnnnnnnnnnnnnnnnnnnnnnnnnnnnnnnnnnnnnnnnnnnnnnnnnnnnnnnnnnnnnnnnnnnnnnnnnnnnnnnnnnnnnnnnnnnnnnnnnnnnnnnnnnnnnnnnnnnnnnnnnnnnnnnnnnnnnnnnnnnnnnnnnnnnnnnnnnnnnnnnnnnnnnnnnnnnnnnnnnnnnnnnnnnnnnnnnnnnnnnnnnnnnnnnnnnnnnnnnnnnnnnnnnnnnnnnnnnnnnnnnnnnnnnnnnnnnnnnnnnnnnnnnnnnnnnnnnnnnnnnnnnnnnnnnnnnnnnnnnnnnnnnnnnnnnnnnnnnnnnnnnnnnnnnnnnnnnnnnnnnnnnnnnnnnnnnnnnnnnnnnnnnnnnnnnnnnnnnnnnnnnnnnnnnnnnnnnnnnnnnnnnnnnnnnnnnnnnnnnnnnnnnnnnnnnnnnnnnnnnnnnnnnnnnnnnnnnnnnnnnnnnnnnnnnnnnnnnnnnnnnnnnnnnnnnnnnnnnnnnnnnnnnnnnnnnnnnnnnnnnnnnnnnnnnnnnnnnnnnnnnnnnnnnnnnnnnnnnnnnnnnnnnnnnnnnnnnnnnnnnnnnnnnnnnnnnnnnnnnnnnnnnnnnnnnnnnnnnnnnnnnnnnnnnnnnnnnnnnnnnnnnnnnnnnnnnnnnnnnnnnnnnnnnnnnnnnnnnnnnnnnnnnnnnnnnnnnnnnnnnnnnnnnnnnnnnnnnnnnnnnnnnnnnnnnnnnnnnnnnnnnnnnnnnnnnnnnnnnnnnnnnnnnnnnnnnnnnnnnnnnnnnnnnnnnnnnnnnnnnnnnnnnnnnnnnnnnnnnnnnnnnnnnnnnnnnnnnnnnnnnnnnnnnnnnnnnnnnnnnnnnnnnnnnnnnnnnnnnnnnnnnnnnnnnnnnnnnnnnnnnnnnnnnnnnnnnnnnnnnnnnnnnnnnnnnnnnnnnnnnnnnnnnnnnnnnnnnnnnnnnnnnnnnnnnnnnnnnnnnnnnnnnnnnnnnnnnnnnnnnnnnnnnnnnnnnnnnnnnnnnnnnnnnnnnnnnnnnnnnnnnnnnnnnnnnnnnnnnnnnnnnnnnnnnnnnnnnnnnnnnnnnnnnnnnnnnnnnnnnnnnnnnnnnnnnnnnnnnnnnnnnnnnnnnnnnnnnnnnnnnnnnnnnnnnnnnnnnnnnnnnnnnnnnnnnnnnnnnnnnnnnnnnnnnnnnnnnnnnnnnnnnnnnnnnnnnnnnnnnnnnnnnnnnnnnnnnnnnnnnnnnnnnnnnnnnnnnnnnnnnnnnnnnnnnnnnnnnnnnnnnnnnnnnnnnnnnnnnnnnnnnnnnnnnnnnnnnnnnnnnnnnnnnnnnnnnnnnnnnnnnnnnnnnnnnnnnnnnnnnnnnnnnnnnnnnnnnnnnnnnnnnnnnnnnnnnnnnnnnnnnnnnnnnnnnnnnnnnnnnnnnnnnnnnnnnnnnnnnnnnnnnnnnnnnnnnnnnnnnnnnnnnnnnnnnnnnnnnnnnnnnnnnnnnnnnnnnnnnnnnnnnnnnnnnnnnnnnnnnnnnnnnnnnnnnnnnnnnnnnnnnnnnnnnnnnnnnnnnnnnnnnnnnnnnnnnnnnnnnnnnnnnnnnnnnnnnnnnnnnnnnnnnnnnnnnnnnnnnnnnnnnnnnnnnnnnnnnnnnnnnnnnnnnnnnnnnnnnnnnnnnnnnnnnnnnnnnnnnnnnnnnnnnnnnnnnnnnnnnnnnnnnnnnnnnnnnnnnnnnnnnnnnnnnnnnnnnnnnnnnnnnnnnnnnnnnnnnnnnnnnnnnnnnnnnnnnnnnnnnnnnnnnnnnnnnnnnnnnnnnnnnnnnnnnnnnnnnnnnnnnnnnnnnnnnnnnnnnnnnnnnnnnnnnnnnnnnnnnnnnnnnnnnnnnnnnnnnnnnnnnnnnnnnnnnnnnnnnnnnnnnnnnnnnnnnnnnnnnnnnnnnnnnnnnnnnnnnnnnnnnnnnnnnnnnnnnnnnnnnnnnnnnnnnnnnnnnnnnnnnnnnnnnnnnnnnnnnnnnnnnnnnnnnnnnnnnnnnnnnnnnnnnnnnnnnnnnnnnnnnnnnnnnnnnnnnnnnnnnnnnnnnnnnnnnnnnnnnnnnnnnnnnnnnnnnnnnnnnnnnnnnnnnnnnnnnnnnnnnnnnnnnnnnnnnnnnnnnnnnnnnnnnnnnnnnnnnnnnnnnnnnnnnnnnnnnnnnnnnnnnnnnnnnnnnnnnnnnnnnnnnnnnnnnnnnnnnnnnnnnnnnnnnnnnnnnnnnnnnnnnnnnnnnnnnnnnnnnnnnnnnnnnnnnnnnnnnnnnnnnnnnnnnnnnnnnnnnnnnnnnnnnnnnnnnnnnnnnnnnnnnnnnnnnnnnnnnnnnnnnnnnnnnnnnnnnnnnnnnnnnnnnnnnnnnnnnnnnnnnnnnnnnnnnnnnnnnnnnnnnnnnnnnnnnnnnnnnnnnnnnnnnnnnnnnnnnnnnnnnnnnnnnnnnnnnnnnnnnnnnnnnnnnnnnnnnnnnnnnnnnnnnnnnnnnnnnnnnnnnnnnnnnnnnnnnnnnnnnnnnnnnnnnnnnnnnnnnnnnnnnnnnnnnnnnnnnnnnnnnnnnnnnnnnnnnnnnnnnnnnnnnnnnnnnnnnnnnnnnnnnnnnnnnnnnnnnnnnnnnnnnnnnnnnnnnnnnnnnnnnnnnnnnnnnnnnnnnnnnnnnnnnnnnnnnnnnnnnnnnnnnnnnnnnnnnnnnnnnnnnnnnnnnnnnnnnnnnnnnnnnnnnnnnnnnnnnnnnnnnnnnnnnnnnnnnnnnnnnnnnnnnnnnnnnnnnnnnnnnnnnnnnnnnnnnnnnnnnnnnnnnnnnnnnnnnnnnnnnnnnnnnnnnnnnnnnnnnnnnnnnnnnnnnnnnnnnnnnnnnnnnnnnnnnnnnnnnnnnnnnnnnnnnnnnnnnnnnnnnnnnnnnnnnnnnnnnnnnnnnnnnnnnnnnnnnnnnnnnnnnnnnnnnnnnnnnnnnnnnnnnnnnnnnnnnnnnnnnnnnnnnnnnnnnnnnnnnnnnnnnnnnnnnnnnnnnnnnnnnnnnnnnnnnnnnnnnnnnnnnnnnnnnnnnnnnnnnnnnnnnnnnnnnnnnnnnnnnnnnnnnnnnnnnnnnnnnnnnnnnnnnnnnnnnnnnnnnnnnnnnnnnnnnnnnnnnnnnnnnnnnnnnnnnnnnnnnnnnnnnnnnnnnnnnnnnnnnnnnnnnnnnnnnnnnnnnnnnnnnnnnnnnnnnnnnnnnnnnnnnnnnnnnnnnnnnnnnnnnnnnnnnnnnnnnnnnnnnnnnnnnnnnnnnnnnnnnnnnnnnnnnnnnnnnnnnnnnnnnnnnnnnnnnnnnnnnnnnnnnnnnnnnnnnnnnnnnnnnnnnnnnnnnnnnnnnnnnnnnnnnnnnnnnnnnnnnnnnnnnnnnnnnnnnnnnnnnnnnnnnnnnnnnnnnnnnnnnnnnnnnnnnnnnnnnnnnnnnnnnnnnnnnnnnnnnnnnnnnnnnnnnnnnnnnnnnnnnnnnnnnnnnnnnnnnnnnnnnnnnnnnnnnnnnnnnnnnnnnnnnnnnnnnnnnnnnnnnnnnnnnnnnnnnnnnnnnnnnnnnnnnnnnnnnnnnnnnnnnnnnnnnnnnnnnnnnnnnnnnnnnnnnnnnnnnnnnnnnnnnnnnnnnnnnnnnnnnnnnnnnnnnnnnnnnnnnnnnnnnnnnnnnnnnnnnnnnnnnnnnnnnnnnnnnnnnnnnnnnnnnnnnnnnnnnnnnnnnnnnnnnnnnnnnnnnnnnnnnnnnnnnnnnnnnnnnnnnnnnnnnnnnnnnnnnnnnnnnnnnnnnnnnnnnnnnnnnnnnnnnnnnnnnnnnnnnnnnnnnnnnnnnnnnnnnnnnnnnnnnnnnnnnnnnnnnnnnnnnnnnnnnnnnnnnnnnnnnnnnnnnnnnnnnnnnnnnnnnnnnnnnnnnnnnnnnnnnnnnnnnnnnnnnnnnnnnnnnnnnnnnnnnnnnnnnnnnnnnnnnnnnnnnnnnnnnnnnnnnnnnnnnnnnnnnnnnnnnnnnnnnnnnnnnnnnnnnnnnnnnnnnnnnnnnnnnnnnnnnnnnnnnnnnnnnnnnnnnnnnnnnnnnnnnnnnnnnnnnnnnnnnnnnnnnnnnnnnnnnnnnnnnnnnnnnnnnnnnnnnnnnnnnnnnnnnnnnnnnnnnnnnnnnnnnnnnnnnnnnnnnnnnnnnnnnnnnnnnnnnnnnnnnnnnnnnnnnnnnnnnnnnnnnnnnnnnnnnnnnnnnnnnnnnnnnnnnnnnnnnnnnnnnnnnnnnnnnnnnnnnnnnnnnnnnnnnnnnnnnnnnnnnnnnnnnnnnnnnnnnnnnnnnnnnnnnnnnnnnnnnnnnnnnnnnnnnnnnnnnnnnnnnnnnnnnnnnnnnnnnnnnnnnnnnnnnnnnnnnnnnnnnnnnnnnnnnnnnnnnnnnnnnnnnnnnnnnnnnnnnnnnnnnnnnnnnnnnnnnnnnnnnnnnnnnnnnnnnnnnnnnnnnnnnnnnnnnnnnnnnnnnnnnnnnnnnnnnnnnnnnnnnnnnnnnnnnnnnnnnnnnnnnnnnnnnnnnnnnnnnnnnnnnnnnnnnnnnnnnnnnnnnnnnnnnnnnnnnnnnnnnnnnnnnnnnnnnnnnnnnnnnnnnnnnnnnnnnnnnnnnnnnnnnnnnnnnnnnnnnnnnnnnnnnnnnnnnnnnnnnnnnnnnnnnnnnnnnnnnnnnnnnnnnnnnnnnnnnnnnnnnnnnnnnnnnnnnnnnnnnnnnnnnnnnnnnnnnnnnnnnnnnnnnnnnnnnnnnnnnnnnnnnnnnnnnnnnnnnnnnnnnnnnnnnnnnnnnnnnnnnnnnnnnnnnnnnnnnnnnnnnnnnnnnnnnnnnnnnnnnnnnnnnnnnnnnnnnnnnnnnnnnnnnnnnnnnnnnnnnnnnnnnnnnnnnnnnnnnnnnnnnnnnnnnnnnnnnnnnnnnnnnnnnnnnnnnnnnnnnnnnnnnnnnnnnnnnnnnnnnnnnnnnnnnnnnnnnnnnnnnnnnnnnnnnnnnnnnnnnnnnnnnnnnnnnnnnnnnnnnnnnnnnnnnnnnnnnnnnnnnnnnnnnnnnnnnnnnnnnnnnnnnnnnnnnnnnnnnnnnnnnnnnnnnnnnnnnnnnnnnnnnnnnnnnnnnnnnnnnnnnnnnnnnnnnnnnnnnnnnnnnnnnnnnnnnnnnnnnnnnnnnnnnnnnnnnnnnnnnnnnnnnnnnnnnnnnnnnnnnnnnnnnnnnnnnnnnnnnnnnnnnnnnnnnnnnnnnnnnnnnnnnnnnnnnnnnnnnnnnnnnnnnnnnnnnnnnnnnnnnnnnnnnnnnnnnnnnnnnnnnnnnnnnnnnnnnnnnnnnnnnnnnnnnnnnnnnnnnnnnnnnnnnnnnnnnnnnnnnnnnnnnnnnnnnnnnnnnnnnnnnnnnnnnnnnnnnnnnnnnnnnnnnnnnnnnnnnnnnnnnnnnnnnnnnnnnnnnnnnnnnnnnnnnnnnnnnnnnnnnnnnnnnnnnnnnnnnnnnnnnnnnnnnnnnnnnnnnnnnnnnnnnnnnnnnnnnnnnnnnnnnnnnnnnnnnnnnnnnnnnnnnnnnnnnnnnnnnnnnnnnnnnnnnnnnnnnnnnnnnnnnnnnnnnnnnnnnnnnnnnnnnnnnnnnnnnnnnnnnnnnnnnnnnnnnnnnnnnnnnnnnnnnnnnnnnnnnnnnnnnnnnnnnnnnnnnnnnnnnnnnnnnnnnnnnnnnnnnnnnnnnnnnnnnnnnnnnnnnnnnnnnnnnnnnnnnnnnnnnnnnnnnnnnnnnnnnnnnnnnnnnnnnnnnnnnnnnnnnnnnnnnnnnnnnnnnnnnnnnnnnnnnnnnnnnnnnnnnnnnnnnnnnnnnnnnnnnnnnnnnnnnnnnnnnnnnnnnnnnnnnnnnnnnnnnnnnnnnnnnnnnnnnnnnnnnnnnnnnnnnnnnnnnnnnnnnnnnnnnnnnnnnnnnnnnnnnnnnnnnnnnnnnnnnnnnnnnnnnnnnnnnnnnnnnnnnnnnnnnnnnnnnnnnnnnnnnnnnnnnnnnnnnnnnnnnnnnnnnnnnnnnnnnnnnnnnnnnnnnnnnnnnnnnnnnnnnnnnnnnnnnnnnnnnnnnnnnnnnnnnnnnnnnnnnnnnnnnnnnnnnnnnnnnnnnnnnnnnnnnnnnnnnnnnnnnnnnnnnnnnnnnnnnnnnnnnnnnnnnnnnnnnnnnnnnnnnnnnnnnnnnnnnnnnnnnnnnnnnnnnnnnnnnnnnnnnnnnnnnnnnnnnnnnnnnnnnnnnnnnnnnnnnnnnnnnnnnnnnnnnnnnnnnnnnnnnnnnnnnnnnnnnnnnnnnnnnnnnnnnnnnnnnnnnnnnnnnnnnnnnnnnnnnnnnnnnnnnnnnnnnnnnnnnnnnnnnnnnnnnnnnnnnnnnnnnnnnnnnnnnnnnnnnnnnnnnnnnnnnnnnnnnnnnnnnnnnnnnnnnnnnnnnnnnnnnnnnnnnnnnnnnnnnnnnnnnnnnnnnnnnnnnnnnnnnnnnnnnnnnnnnnnnnnnnnnnnnnnnnnnnnnnnnnnnnnnnnnnnnnnnnnnnnnnnnnnnnnnnnnnnnnnnnnnnnnnnnnnnnnnnnnnnnnnnnnnnnnnnnnnnnnnnnnnnnnnnnnnnnnnnnnnnnnnnnnnnnnnnnnnnnnnnnnnnnnnnnnnnnnnnnnnnnnnnnnnnnnnnnnnnnnnnnnnnnnnnnnnnnnnnnnnnnnnnnnnnnnnnnnnnnnnnnnnnnnnnnnnnnnnnnnnnnnnnnnnnnnnnnnnnnnnnnnnnnnnnnnnnnnnnnnnnnnnnnnnnnnnnnnnnnnnnnnnnnnnnnnnnnnnnnnnnnnnnnnnnnnnnnnnnnnnnnnnnnnnnnnnnnnnnnnnnnnnnnnnnnnnnnnnnnnnnnnnnnnnnnnnnnnnnnnnnnnnnnnnnnnnnnnnnnnnnnnnnnnnnnnnnnnnnnnnnnnnnnnnnnnnnnnnnnnnnnnnnnnnnnnnnnnnnnnnnnnnnnnnnnnnnnnnnnnnnnnnnnnnnnnnnnnnnnnnnnnnnnnnnnnnnnnnnnnnnnnnnnnnnnnnnnnnnnnnnnnnnnnnnnnnnnnnnnnnnnnnnnnnnnnnnnnnnnnnnnnnnnnnnnnnnnnnnnnnnnnnnnnnnnnnnnnnnnnnnnnnnnnnnnnnnnnnnnnnnnnnnnnnnnnnnnnnnnnnnnnnnnnnnnnnnnnnnnnnnnnnnnnnnnnnnnnnnnnnnnnnnnnnnnnnnnnnnnnnnnnnnnnnnnnnnnnnnnnnnnnnnnnnnnnnnnnnnnnnnnnnnnnnnnnnnnnnnnnnnnnnnnnnnnnnnnnnnnnnnnnnnnnnnnnnnnnnnnnnnnnnnnnnnnnnnnnnnnnnnnnnnnnnnnnnnnnnnnnnnnnnnnnnnnnnnnnnnnnnnnnnnnnnnnnnnnnnnnnnnnnnnnnnnnnnnnnnnnnnnnnnnnnnnnnnnnnnnnnnnnnnnnnnnnnnnnnnnnnnnnnnnnnnnnnnnnnnnnnnnnnnnnnnnnnnnnnnnnnnnnnnnnnnnnnnnnnnnnnnnnnnnnnnnnnnnnnnnnnnnnnnnnnnnnnnnnnnnnnnnnnnnnnnnnnnnnnnnnnnnnnnnnnnnnnnnnnnnnnnnnnnnnnnnnnnnnnnnnnnnnnnnnnnnnnnnnnnnnnnnnnnnnnnnnnnnnnnnnnnnnnnnnnnnnnnnnnnnnnnnnnnnnnnnnnnnnnnnnnnnnnnnnnnnnnnnnnnnnnnnnnnnnnnnnnnnnnnnnnnnnnnnnnnnnnnnnnnnnnnnnnnnnnnnnnnnnnnnnnnnnnnnnnnnnnnnnnnnnnnnnnnnnnnnnnnnnnnnnnnnnnnnnnnnnnnnnnnnnnnnnnnnnnnnnnnnnnnnnnnnnnnnnnnnnnnnnnnnnnnnnnnnnnnnnnnnnnnnnnnnnnnnnnnnnnnnnnnnnnnnnnnnnnnnnnnnnnnnnnnnnnnnnnnnnnnnnnnnnnnnnnnnnnnnnnnnnnnnnnnnnnnnnnnnnnnnnnnnnnnnnnnnnnnnnnnnnnnnnnnnnnnnnnnnnnnnnnnnnnnnnnnnnnnnnnnnnnnnnnnnnnnnnnnnnnnnnnnnnnnnnnnnnnnnnnnnnnnnnnnnnnnnnnnnnnnnnnnnnnnnnnnnnnnnnnnnnnnnnnnnnnnnnnnnnnnnnnnnnnnnnnnnnnnnnnnnnnnnnnnnnnnnnnnnnnnnnnnnnnnnnnnnnnnnnnnnnnnnnnnnnnnnnnnnnnnnnnnnnnnnnnnnnnnnnnnnnnnnnnnnnnnnnnnnnnnnnnnnnnnnnnnnnnnnnnnnnnnnnnnnnnnnnnnnnnnnnnnnnnnnnnnnnnnnnnnnnnnnnnnnnnnnnnnnnnnnnnnnnnnnnnnnnnnnnnnnnnnnnnnnnnnnnnnnnnnnnnnnnnnnnnnnnnnnnnnnnnnnnnnnnnnnnnnnnnnnnnnnnnnnnnnnnnnnnnnnnnnnnnnnnnnnnnnnnnnnnnnnnnnnnnnnnnnnnnnnnnnnnnnnnnnnnnnnnnnnnnnnnnnnnnnnnnnnnnnnnnnnnnnnnnnnnnnnnnnnnnnnnnnnnnnnnnnnnnnnnnnnnnnnnnnnnnnnnnnnnnnnnnnnnnnnnnnnnnnnnnnnnnnnnnnnnnnnnnnnnnnnnnnnnnnnnnnnnnnnnnnnnnnnnnnnnnnnnnnnnnnnnnnnnnnnnnnnnnnnnnnnnnnnnnnnnnnnnnnnnnnnnnnnnnnnnnnnnnnnnnnnnnnnnnnnnnnnnnnnnnnnnnnnnnnnnnnnnnnnnnnnnnnnnnnnnnnnnnnnnnnnnnnnnnnnnnnnnnnnnnnnnnnnnnnnnnnnnnnnnnnnnnnnnnnnnnnnnnnnnnnnnnnnnnnnnnnnnnnnnnnnnnnnnnnnnnnnnnnnnnnnnnnnnnnnnnnnnnnnnnnnnnnnnnnnnnnnnnnnnnnnnnnnnnnnnnnnnnnnnnnnnnnnnnnnnnnnnnnnnnnnnnnnnnnnnnnnnnnnnnnnnnnnnnnnnnnnnnnnnnnnnnnnnnnnnnnnnnnnnnnnnnnnnnnnnnnnnnnnnnnnnnnnnnnnnnnnnnnnnnnnnnnnnnnnnnnnnnnnnnnnnnnnnnnnnnnnnnnnnnnnnnnnnnnnnnnnnnnnnnnnnnnnnnnnnnnnnnnnnnnnnnnnnnnnnnnnnnnnnnnnnnnnnnnnnnnnnnnnnnnnnnnnnnnnnnnnnnnnnnnnnnnnnnnnnnnnnnnnnnnnnnnnnnnnnnnnnnnnnnnnnnnnnnnnnnnnnnnnnnnnnnnnnnnnnnnnnnnnnnnnnnnnnnnnnnnnnnnnnnnnnnnnnnnnnnnnnnnnnnnnnnnnnnnnnnnnnnnnnnnnnnnnnnnnnnnnnnnnnnnnnnnnnnnnnnnnnnnnnnnnnnnnnnnnnnnnnnnnnnnnnnnnnnnnnnnnnnnnnnnnnnnnnnnnnnnnnnnnnnnnnnnnnnnnnnnnnnnnnnnnnnnnnnnnnnnnnnnnnnnnnnnnnnnnnnnnnnnnnnnnnnnnnnnnnnnnnnnnnnnnnnnnnnnnnnnnnnnnnnnnnnnnnnnnnnnnnnnnnnnnnnnnnnnnnnnnnnnnnnnnnnnnnnnnnnnnnnnnnnnnnnnnnnnnnnnnnnnnnnnnnnnnnnnnnnnnnnnnnnnnnnnnnnnnnnnnnnnnnnnnnnnnnnnnnnnnnnnnnnnnnnnnnnnnnnnnnnnnnnnnnnnnnnnnnnnnnnnnnnnnnnnnnnnnnnnnnnnnnnnnnnnnnnnnnnnnnnnnnnnnnnnnnnnnnnnnnnnnnnnnnnnnnnnnnnnnnnnnnnnnnnnnnnnnnnnnnnnnnnnnnnnnnnnnnnnnnnnnnnnnnnnnnnnnnnnnnnnnnnnnnnnnnnnnnnnnnnnnnnnnnnnnnnnnnnnnnnnnnnnnnnnnnnnnnnnnnnnnnnnnnnnnnnnnnnnnnnnnnnnnnnnnnnnnnnnnnnnnnnnnnnnnnnnnnnnnnnnnnnnnnnnnnnnnnnnnnnnnnnnnnnnnnnnnnnnnnnnnnnnnnnnnnnnnnnnnnnnnnnnnnnnnnnnnnnnnnnnnnnnnnnnnnnnnnnnnnnnnnnnnnnnnnnnnnnnnnnnnnnnnnnnnnnnnnnnnnnnnnnnnnnnnnnnnnnnnnnnnnnnnnnnnnnnnnnnnnnnnnnnnnnnnnnnnnnnnnnnnnnnnnnnnnnnnnnnnnnnnnnnnnnnnnnnnnnnnnnnnnnnnnnnnnnnnnnnnnnnnnnnnnnnnnnnnnnnnnnnnnnnnnnnnnnnnnnnnnnnnnnnnnnnnnnnnnnnnnnnnnnnnnnnnnnnnnnnnnnnnnnnnnnnnnnnnnnnnnnnnnnnnnnnnnnnnnnnnnnnnnnnnnnnnnnnnnnnnnnnnnnnnnnnnnnnnnnnnnnnnnnnnnnnnnnnnnnnnnnnnnnnnnnnnnnnnnnnnnnnnnnnnnnnnnnnnnnnnnnnnnnnnnnnnnnnnnnnnnnnnnnnnnnnnnnnnnnnnnnnnnnnnnnnnnnnnnnnnnnnnnnnnnnnnnnnnnnnnnnnnnnnnnnnnnnnnnnnnnnnnnnnnnnnnnnnnnnnnnnnnnnnnnnnnnnnnnnnnnnnnnnnnnnnnnnnnnnnnnnnnnnnnnnnnnnnnnnnnnnnnnnnnnnnnnnnnnnnnnnnnnnnnnnnnnnnnnnnnnnnnnnnnnnnnnnnnnnnnnnnnnnnnnnnnnnnnnnnnnnnnnnnnnnnnnnnnnnnnnnnnnnnnnnnnnnnnnnnnnnnnnnnnnnnnnnnnnnnnnnnnnnnnnnnnnnnnnnnnnnnnnnnnnnnnnnnnnnnnnnnnnnnnnnnnnnnnnnnnnnnnnnnnnnnnnnnnnnnnnnnnnnnnnnnnnnnnnnnnnnnnnnnnnnnnnnnnnnnnnnnnnnnnnnnnnnnnnnnnnnnnnnnnnnnnnnnnnnnnnnnnnnnnnnnnnnnnnnnnnnnnnnnnnnnnnnnnnnnnnnnnnnnnnnnnnnnnnnnnnnnnnnnnnnnnnnnnnnnnnnnnnnnnnnnnnnnnnnnnnnnnnnnnnnnnnnnnnnnnnnnnnnnnnnnnnnnnnnnnnnnnnnnnnnnnnnnnnnnnnnnnnnnnnnnnnnnnnnnnnnnnnnnnnnnnnnnnnnnnnnnnnnnnnnnnnnnnnnnnnnnnnnnnnnnnnnnnnnnnnnnnnnnnnnnnnnnnnnnnnnnnnnnnnnnnnnnnnnnnnnnnnnnnnnnnnnnnnnnnnnnnnnnnnnnnnnnnnnnnnnnnnnnnnnnnnnnnnnnnnnnnnnnnnnnnnnnnnnnnnnnnnnnnnnnnnnnnnnnnnnnnnnnnnnnnnnnnnnnnnnnnnnnnnnnnnnnnnnnnnnnnnnnnnnnnnnnnnnnnnnnnnnnnnnnnnnnnnnnnnnnnnnnnnnnnnnnnnnnnnnnnnnnnnnnnnnnnnnnnnnnnnnnnnnnnnnnnnnnnnnnnnnnnnnnnnnnnnnnnnnnnnnnnnnnnnnnnnnnnnnnnnnnnnnnnnnnnnnnnnnnnnnnnnnnnnnnnnnnnnnnnnnnnnnnnnnnnnnnnnnnnnnnnnnnnnnnnnnnnnnnnnnnnnnnnnnnnnnnnnnnnnnnnnnnnnnnnnnnnnnnnnnnnnnnnnnnnnnnnnnnnnnnnnnnnnnnnnnnnnnnnnnnnnnnnnnnnnnnnnnnnnnnnnnnnnnnnnnnnnnnnnnnnnnnnnnnnnnnnnnnnnnnnnnnnnnnnnnnnnnnnnnnnnnnnnnnnnnnnnnnnnnnnnnnnnnnnnnnnnnnnnnnnnnnnnnnnnnnnnnnnnnnnnnnnnnnnnnnnnnnnnnnnnnnnnnnnnnnnnnnnnnnnnnnnnnnnnnnnnnnnnnnnnnnnnnnnnnnnnnnnnnnnnnnnnnnnnnnnnnnnnnnnnnnnnnnnnnnnnnnnnnnnnnnnnnnnnnnnnnnnnnnnnnnnnnnnnnnnnnnnnnnnnnnnnnnnnnnnnnnnnnnnnnnnnnnnnnnnnnnnnnnnnnnnnnnnnnnnnnnnnnnnnnnnnnnnnnnnnnnnnnnnnnnnnnnnnnnnnnnnnnnnnnnnnnnnnnnnnnnnnnnnnnnnnnnnnnnnnnnnnnnnnnnnnnnnnnnnnnnnnnnnnnnnnnnnnnnnnnnnnnnnnnnnnnnnnnnnnnnnnnnnnnnnnnnnnnnnnnnnnnnnnnnnnnnnnnnnnnnnnnnnnnnnnnnnnnnnnnnnnnnnnnnnnnnnnnnnnnnnnnnnnnnnnnnnnnnnnnnnnnnnnnnnnnnnnnnnnnnnnnnnnnnnnnnnnnnnnnnnnnnnnnnnnnnnnnnnnnnnnnnnnnnnnnnnnnnnnnnnnnnnnnnnnnnnnnnnnnnnnnnnnnnnnnnnnnnnnnnnnnnnnnnnnnnnnnnnnnnnnnnnnnnnnnnnnnnnnnnnnnnnnnnnnnnnnnnnnnnnnnnnnnnnnnnnnnnnnnnnnnnnnnnnnnnnnnnnnnnnnnnnnnnnnnnnnnnnnnnnnnnnnnnnnnnnnnnnnnnnnnnnnnnnnnnnnnnnnnnnnnnnnnnnnnnnnnnnnnnnnnnnnnnnnnnnnnnnnnnnnnnnnnnnnnnnnnnnnnnnnnnnnnnnnnnnnnnnnnnnnnnnnnnnnnnnnnnnnnnnnnnnnnnnnnnnnnnnnnnnnnnnnnnnnnnnnnnnnnnnnnnnnnnnnnnnnnnnnnnnnnnnnnnnnnnnnnnnnnnnnnnnnnnnnnnnnnnnnnnnnnnnnnnnnnnnnnnnnnnnnnnnnnnnnnnnnnnnnnnnnnnnnnnnnnnnnnnnnnnnnnnnnnnnnnnnnnnnnnnnnnnnnnnnnnnnnnnnnnnnnnnnnnnnnnnnnnnnnnnnnnnnnnnnnnnnnnnnnnnnnnnnnnnnnnnnnnnnnnnnnnnnnnnnnnnnnnnnnnnnnnnnnnnnnnnnnnnnnnnnnnnnnnnnnnnnnnnnnnnnnnnnnnnnnnnnnnnnnnnnnnnnnnnnnnnnnnnnnnnnnnnnnnnnnnnnnnnnnnnnnnnnnnnnnnnnnnnnnnnnnnnnnnnnnnnnnnnnnnnnnnnnnnnnnnnnnnnnnnnnnnnnnnnnnnnnnnnnnnnnnnnnnnnnnnnnnnnnnnnnnnnnnnnnnnnnnnnnnnnnnnnnnnnnnnnnnnnnnnnnnnnnnnnnnnnnnnnnnnnnnnnnnnnnnnnnnnnnnnnnnnnnnnnnnnnnnnnnnnnnnnnnnnnnnnnnnnnnnnnnnnnnnnnnnnnnnnnnnnnnnnnnnnnnnnnnnnnnnnnnnnnnnnnnnnnnnnnnnnnnnnnnnnnnnnnnnnnnnnnnnnnnnnnnnnnnnnnnnnnnnnnnnnnnnnnnnnnnnnnnnnnnnnnnnnnnnnnnnnnnnnnnnnnnnnnnnnnnnnnnnnnnnnnnnnnnnnnnnnnnnnnnnnnnnnnnnnnnnnnnnnnnnnnnnnnnnnnnnnnnnnnnnnnnnnnnnnnnnnnnnnnnnnnnnnnnnnnnnnnnnnnnnnnnnnnnnnnnnnnnnnnnnnnnnnnnnnnnnnnnnnnnnnnnnnnnnnnnnnnnnnnnnnnnnnnnnnnnnnnnnnnnnnnnnnnnnnnnnnnnnnnnnnnnnnnnnnnnnnnnnnnnnnnnnnnnnnnnnnnnnnnnnnnnnnnnnnnnnnnnnnnnnnnnnnnnnnnnnnnnnnnnnnnnnnnnnnnnnnnnnnnnnnnnnnnnnnnnnnnnnnnnnnnnnnnnnnnnnnnnnnnnnnnnnnnnnnnnnnnnnnnnnnnnnnnnnnnnnnnnnnnnnnnnnnnnnnnnnnnnnnnnnnnnnnnnnnnnnnnnnnnnnnnnnnnnnnnnnnnnnnnnnnnnnnnnnnnnnnnnnnnnnnnnnnnnnnnnnnnnnnnnnnnnnnnnnnnnnnnnnnnnnnnnnnnnnnnnnnnnnnnnnnnnnnnnnnnnnnnnnnnnnnnnnnnnnnnnnnnnnnnnnnnnnnnnnnnnnnnnnnnnnnnnnnnnnnnnnnnnnnnnnnnnnnnnnnnnnnnnnnnnnnnnnnnnnnnnnnnnnnnnnnnnnnnnnnnnnnnnnnnnnnnnnnnnnnnnnnnnnnnnnnnnnnnnnnnnnnnnnnnnnnnnnnnnnnnnnnnnnnnnnnnnnnnnnnnnnnnnnnnnnnnnnnnnnnnnnnnnnnnnnnnnnnnnnnnnnnnnnnnnnnnnnnnnnnnnnnnnnnnnnnnnnnnnnnnnnnnnnnnnnnnnnnnnnnnnnnnnnnnnnnnnnnnnnnnnnnnnnnnnnnnnnnnnnnnnnnnnnnnnnnnnnnnnnnnnnnnnnnnnnnnnnnnnnnnnnnnnnnnnnnnnnnnnnnnnnnnnnnnnnnnnnnnnnnnnnnnnnnnnnnnnnnnnnnnnnnnnnnnnnnnnnnnnnnnnnnnnnnnnnnnnnnnnnnnnnnnnnnnnnnnnnnnnnnnnnnnnnnnnnnnnnnnnnnnnnnnnnnnnnnnnnnnnnnnnnnnnnnnnnnnnnnnnnnnnnnnnnnnnnnnnnnnnnnnnnnnnnnnnnnnnnnnnnnnnnnnnnnnnnnnnnnnnnnnnnnnnnnnnnnnnnnnnnnnnnnnnnnnnnnnnnnnnnnnnnnnnnnnnnnnnnnnnnnnnnnnnnnnnnnnnnnnnnnnnnnnnnnnnnnnnnnnnnnnnnnnnnnnnnnnnnnnnnnnnnnnnnnnnnnnnnnnnnnnnnnnnnnnnnnnnnnnnnnnnnnnnnnnnnnnnnnnnnnnnnnnnnnnnnnnnnnnnnnnnnnnnnnnnnnnnnnnnnnnnnnnnnnnnnnnnnnnnnnnnnnnnnnnnnnnnnnnnnnnnnnnnnnnnnnnnnnnnnnnnnnnnnnnnnnnnnnnnnnnnnnnnnnnnnnnnnnnnnnnnnnnnnnnnnnnnnnnnnnnnnnnnnnnnnnnnnnnnnnnnnnnnnnnnnnnnnnnnnnnnnnnnnnnnnnnnnnnnnnnnnnnnnnnnnnnnnnnnnnnnnnnnnnnnnnnnnnnnnnnnnnnnnnnnnnnnnnnnnnnnnnnnnnnnnnnnnnnnnnnnnnnnnnnnnnnnnnnnnnnnnnnnnnnnnnnnnnnnnnnnnnnnnnnnnnnnnnnnnnnnnnnnnnnnnnnnnnnnnnnnnnnnnnnnnnnnnnnnnnnnnnnnnnnnnnnnnnnnnnnnnnnnnnnnnnnnnnnnnnnnnnnnnnnnnnnnnnnnnnnnnnnnnnnnnnnnnnnnnnnnnnnnnnnnnnnnnnnnnnnnnnnnnnnnnnnnnnnnnnnnnnnnnnnnnnnnnnnnnnnnnnnnnnnnnnnnnnnnnnnnnnnnnnnnnnnnnnnnnnnnnnnnnnnnnnnnnnnnnnnnnnnnnnnnnnnnnnnnnnnnnnnnnnnnnnnnnnnnnnnnnnnnnnnnnnnnnnnnnnnnnnnnnnnnnnnnnnnnnnnnnnnnnnnnnnnnnnnnnnnnnnnnnnnnnnnnnnnnnnnnnnnnnnnnnnnnnnnnnnnnnnnnnnnnnnnnnnnnnnnnnnnnnnnnnnnnnnnnnnnnnnnnnnnnnnnnnnnnnnnnnnnnnnnnnnnnnnnnnnnnnnnnnnnnnnnnnnnnnnnnnnnnnnnnnnnnnnnnnnnnnnnnnnnnnnnnnnnnnnnnnnnnnnnnnnnnnnnnnnnnnnnnnnnnnnnnnnnnnnnnnnnnnnnnnnnnnnnnnnnnnnnnnnnnnnnnnnnnnnnnnnnnnnnnnnnnnnnnnnnnnnnnnnnnnnnnnnnnnnnnnnnnnnnnnnnnnnnnnnnnnnnnnnnnnnnnnnnnnnnnnnnnnnnnnnnnnnnnnnnnnnnnnnnnnnnnnnnnnnnnnnnnnnnnnnnnnnnnnnnnnnnnnnnnnnnnnnnnnnnnnnnnnnnnnnnnnnnnnnnnnnnnnnnnnnnnnnnnnnnnnnnnnnnnnnnnnnnnnnnnnnnnnnnnnnnnnnnnnnnnnnnnnnnnnnnnnnnnnnnnnnnnnnnnnnnnnnnnnnnnnnnnnnnnnnnnnnnnnnnnnnnnnnnnnnnnnnnnnnnnnnnnnnnnnnnnnnnnnnnnnnnnnnnnnnnnnnnnnnnnnnnnnnnnnnnnnnnnnnnnnnnnnnnnnnnnnnnnnnnnnnnnnnnnnnnnnnnnnnnnnnnnnnnnnnnnnnnnnnnnnnnnnnnnnnnnnnnnnnnnnnnnnnnnnnnnnnnnnnnnnnnnnnnnnnnnnnnnnnnnnnnnnnnnnnnnnnnnnnnnnnnnnnnnnnnnnnnnnnnnnnnnnnnnnnnnnnnnnnnnnnnnnnnnnnnnnnnnnnnnnnnnnnnnnnnnnnnnnnnnnnnnnnnnnnnnnnnnnnnnnnnnnnnnnnnnnnnnnnnnnnnnnnnnnnnnnnnnnnnnnnnnnnnnnnnnnnnnnnnnnnnnnnnnnnnnnnnnnnnnnnnnnnnnnnnnnnnnnnnnnnnnnnnnnnnnnnnnnnnnnnnnnnnnnnnnnnnnnnnnnnnnnnnnnnnnnnnnnnnnnnnnnnnnnnnnnnnnnnnnnnnnnnnnnnnnnnnnnnnnnnnnnnnnnnnnnnnnnnnnnnnnnnnnnnnnnnnnnnnnnnnnnnnnnnnnnnnnnnnnnnnnnnnnnnnnnnnnnnnnnnnnnnnnnnnnnnnnnnnnnnnnnnnnnnnnnnnnnnnnnnnnnnnnnnnnnnnnnnnnnnnnnnnnnnnnnnnnnnnnnnnnnnnnnnnnnnnnnnnnnnnnnnnnnnnnnnnnnnnnnnnnnnnnnnnnnnnnnnnnnnnnnnnnnnnnnnnnnnnnnnnnnnnnnnnnnnnnnnnnnnnnnnnnnnnnnnnnnnnnnnnnnnnnnnnnnnnnnnnnnnnnnnnnnnnnnnnnnnnnnnnnnnnnnnnnnnnnnnnnnnnnnnnnnnnnnnnnnnnnnnnnnnnnnnnnnnnnnnnnnnnnnnnnnnnnnnnnnnnnnnnnnnnnnnnnnnnnnnnnnnnnnnnnnnnnnnnnnnnnnnnnnnnnnnnnnnnnnnnnnnnnnnnnnnnnnnnnnnnnnnnnnnnnnnnnnnnnnnnnnnnnnnnnnnnnnnnnnnnnnnnnnnnnnnnnnnnnnnnnnnnnnnnnnnnnnnnnnnnnnnnnnnnnnnnnnnnnnnnnnnnnnnnnnnnnnnnnnnnnnnnnnnnnnnnnnnnnnnnnnnnnnnnnnnnnnnnnnnnnnnnnnnnnnnnnnnnnnnnnnnnnnnnnnnnnnnnnnnnnnnnnnnnnnnnnnnnnnnnnnnnnnnnnnnnnnnnnnnnnnnnnnnnnnnnnnnnnnnnnnnnnnnnnnnnnnnnnnnnnnnnnnnnnnnnnnnnnnnnnnnnnnnnnnnnnnnnnnnnnnnnnnnnnnnnnnnnnnnnnnnnnnnnnnnnnnnnnnnnnnnnnnnnnnnnnnnnnnnnnnnnnnnnnnnnnnnnnnnnnnnnnnnnnnnnnnnnnnnnnnnnnnnnnnnnnnnnnnnnnnnnnnnnnnnnnnnnnnnnnnnnnnnnnnnnnnnnnnnnnnnnnnnnnnnnnnnnnnnnnnnnnnnnnnnnnnnnnnnnnnnnnnnnnnnnnnnnnnnnnnnnnnnnnnnnnnnnnnnnnnnnnnnnnnnnnnnnnnnnnnnnnnnnnnnnnnnnnnnnnnnnnnnnnnnnnnnnnnnnnnnnnnnnnnnnnnnnnnnnnnnnnnnnnnnnnnnnnnnnnnnnnnnnnnnnnnnnnnnnnnnnnnnnnnnnnnnnnnnnnnnnnnnnnnnnnnnnnnnnnnnnnnnnnnnnnnnnnnnnnnnnnnnnnnnnnnnnnnnnnnnnnnnnnnnnnnnnnnnnnnnnnnnnnnnnnnnnnnnnnnnnnnnnnnnnnnnnnnnnnnnnnnnnnnnnnnnnnnnnnnnnnnnnnnnnnnnnnnnnnnnnnnnnnnnnnnnnnnnnnnnnnnnnnnnnnnnnnnnnnnnnnnnnnnnnnnnnnnnnnnnnnnnnnnnnnnnnnnnnnnnnnnnnnnnnnnnnnnnnnnnnnnnnnnnnnnnnnnnnnnnnnnnnnnnnnnnnnnnnnnnnnnnnnnnnnnnnnnnnnnnnnnnnnnnnnnnnnnnnnnnnnnnnnnnnnnnnnnnnnnnnnnnnnnnnnnnnnnnnnnnnnnnnnnnnnnnnnnnnnnnnnnnnnnnnnnnnnnnnnnnnnnnnnnnnnnnnnnnnnnnnnnnnnnnnnnnnnnnnnnnnnnnnnnnnnnnnnnnnnnnnnnnnnnnnnnnnnnnnnnnnnnnnnnnnnnnnnnnnnnnnnnnnnnnnnnnnnnnnnnnnnnnnnnnnnnnnnnnnnnnnnnnnnnnnnnnnnnnnnnnnnnnnnnnnnnnnnnnnnnnnnnnnnnnnnnnnnnnnnnnnnnnnnnnnnnnnnnnnnnnnnnnnnnnnnnnnnnnnnnnnnnnnnnnnnnnnnnnnnnnnnnnnnnnnnnnnnnnnnnnnnnnnnnnnnnnnnnnnnnnnnnnnnnnnnnnnnnnnnnnnnnnnnnnnnnnnnnnnnnnnnnnnnnnnnnnnnnnnnnnnnnnnnnnnnnnnnnnnnnnnnnnnnnnnnnnnnnnnnnnnnnnnnnnnnnnnnnnnnnnnnnnnnnnnnnnnnnnnnnnnnnnnnnnnnnnnnnnnnnnnnnnnnnnnnnnnnnnnnnnnnnnnnnnnnnnnnnnnnnnnnnnnnnnnnnnnnnnnnnnnnnnnnnnnnnnnnnnnnnnnnnnnnnnnnnnnnnnnnnnnnnnnnnnnnnnnnnnnnnnnnnnnnnnnnnnnnnnnnnnnnnnnnnnnnnnnnnnnnnnnnnnnnnnnnnnnnnnnnnnnnnnnnnnnnnnnnnnnnnnnnnnnnnnnnnnnnnnnnnnnnnnnnnnnnnnnnnnnnnnnnnnnnnnnnnnnnnnnnnnnnnnnnnnnnnnnnnnnnnnnnnnnnnnnnnnnnnnnnnnnnnnnnnnnnnnnnnnnnnnnnnnnnnnnnnnnnnnnnnnnnnnnnnnnnnnnnnnnnnnnnnnnnnnnnnnnnnnnnnnnnnnnnnnnnnnnnnnnnnnnnnnnnnnnnnnnnnnnnnnnnnnnnnnnnnnnnnnnnnnnnnnnnnnnnnnnnnnnnnnnnnnnnnnnnnnnnnnnnnnnnnnnnnnnnnnnnnnnnnnnnnnnnnnnnnnnnnnnnnnnnnnnnnnnnnnnnnnnnnnnnnnnnnnnnnnnnnnnnnnnnnnnnnnnnnnnnnnnnnnnnnnnnnnnnnnnnnnnnnnnnnnnnnnnnnnnnnnnnnnnnnnnnnnnnnnnnnnnnnnnnnnnnnnnnnnnnnnnnnnnnnnnnnnnnnnnnnnnnnnnnnnnnnnnnnnnnnnnnnnnnnnnnnnnnnnnnnnnnnnnnnnnnnnnnnnnnnnnnnnnnnnnnnnnnnnnnnnnnnnnnnnnnnnnnnnnnnnnnnnnnnnnnnnnnnnnnnnnnnnnnnnnnnnnnnnnnnnnnnnnnnnnnnnnnnnnnnnnnnnnnnnnnnnnnnnnnnnnnnnnnnnnnnnnnnnnnnnnnnnnnnnnnnnnnnnnnnnnnnnnnnnnnnnnnnnnnnnnnnnnnnnnnnnnnnnnnnnnnnnnnnnnnnnnnnnnnnnnnnnnnnnnnnnnnnnnnnnnnnnnnnnnnnnnnnnnnnnnnnnnnnnnnnnnnnnnnnnnnnnnnnnnnnnnnnnnnnnnnnnnnnnnnnnnnnnnnnnnnnnnnnnnnnnnnnnnnnnnnnnnnnnnnnnnnnnnnnnnnnnnnnnnnnnnnnnnnnnnnnnnnnnnnnnnnnnnnnnnnnnnnnnnnnnnnnnnnnnnnnnnnnnnnnnnnnnnnnnnnnnnnnnnnnnnnnnnnnnnnnnnnnnnnnnnnnnnnnnnnnnnnnnnnnnnnnnnnnnnnnnnnnnnnnnnnnnnnnnnnnnnnnnnnnnnnnnnnnnnnnnnnnnnnnnnnnnnnnnnnnnnnnnnnnnnnnnnnnnnnnnnnnnnnnnnnnnnnnnnnnnnnnnnnnnnnnnnnnnnnnnnnnnnnnnnnnnnnnnnnnnnnnnnnnnnnnnnnnnnnnnnnnnnnnnnnnnnnnnnnnnnnnnnnnnnnnnnnnnnnnnnnnnnnnnnnnnnnnnnnnnnnnnnnnnnnnnnnnnnnnnnnnnnnnnnnnnnnnnnnnnnnnnnnnnnnnnnnnnnnnnnnnnnnnnnnnnnnnnnnnnnnnnnnnnnnnnnnnnnnnnnnnnnnnnnnnnnnnnnnnnnnnnnnnnnnnnnnnnnnnnnnnnnnnnnnnnnnnnnnnnnnnnnnnnnnnnnnnnnnnnnnnnnnnnnnnnnnnnnnnnnnnnnnnnnnnnnnnnnnnnnnnnnnnnnnnnnnnnnnnnnnnnnnnnnnnnnnnnnnnnnnnnnnnnnnnnnnnnnnnnnnnnnnnnnnnnnnnnnnnnnnnnnnnnnnnnnnnnnnnnnnnnnnnnnnnnnnnnnnnnnnnnnnnnnnnnnnnnnnnnnnnnnnnnnnnnnnnnnnnnnnnnnnnnnnnnnnnnnnnnnnnnnnnnnnnnnnnnnnnnnnnnnnnnnnnnnnnnnnnnnnnnnnnnnnnnnnnnnnnnnnnnnnnnnnnnnnnnnnnnnnnnnnnnnnnnnnnnnnnnnnnnnnnnnnnnnnnnnnnnnnnnnnnnnnnnnnnnnnnnnnnnnnnnnnnnnnnnnnnnnnnnnnnnnnnnnnnnnnnnnnnnnnnnnnnnnnnnnnnnnnnnnnnnnnnnnnnnnnnnnnnnnnnnnnnnnnnnnnnnnnnnnnnnnnnnnnnnnnnnnnnnnnnnnnnnnnnnnnnnnnnnnnnnnnnnnnnnnnnnnnnnnnnnnnnnnnnnnnnnnnnnnnnnnnnnnnnnnnnnnnnnnnnnnnnnnnnnnnnnnnnnnnnnnnnnnnnnnnnnnnnnnnnnnnnnnnnnnnnnnnnnnnnnnnnnnnnnnnnnnnnnnnnnnnnnnnnnnnnnnnnnnnnnnnnnnnnnnnnnnnnnnnnnnnnnnnnnnnnnnnnnnnnnnnnnnnnnnnnnnnnnnnnnnnnnnnnnnnnnnnnnnnnnnnnnnnnnnnnnnnnnnnnnnnnnnnnnnnnnnnnnnnnnnnnnnnnnnnnnnnnnnnnnnnnnnnnnnnnnnnnnnnnnnnnnnnnnnnnnnnnnnnnnnnnnnnnnnnnnnnnnnnnnnnnnnnnnnnnnnnnnnnnnnnnnnnnnnnnnnnnnnnnnnnnnnnnnnnnnnnnnnnnnnnnnnnnnnnnnnnnnnnnnnnnnnnnnnnnnnnnnnnnnnnnnnnnnnnnnnnnnnnnnnnnnnnnnnnnnnnnnnnnnnnnnnnnnnnnnnnnnnnnnnnnnnnnnnnnnnnnnnnnnnnnnnnnnnnnnnnnnnnnnnnnnnnnnnnnnnnnnnnnnnnnnnnnnnnnnnnnnnnnnnnnnnnnnnnnnnnnnnnnnnnnnnnnnnnnnnnnnnnnnnnnnnnnnnnnnnnnnnnnnnnnnnnnnnnnnnnnnnnnnnnnnnnnnnnnnnnnnnnnnnnnnnnnnnnnnnnnnnnnnnnnnnnnnnnnnnnnnnnnnnnnnnnnnnnnnnnnnnnnnnnnnnnnnnnnnnnnnnnnnnnnnnnnnnnnnnnnnnnnnnnnnnnnnnnnnnnnnnnnnnnnnnnnnnnnnnnnnnnnnnnnnnnnnnnnnnnnnnnnnnnnnnnnnnnnnnnnnnnnnnnnnnnnnnnnnnnnnnnnnnnnnnnnnnnnnnnnnnnnnnnnnnnnnnnnnnnnnnnnnnnnnnnnnnnnnnnnnnnnnnnnnnnnnnnnnnnnnnnnnnnnnnnnnnnnnnnnnnnnnnnnnnnnnnnnnnnnnnnnnnnnnnnnnnnnnnnnnnnnnnnnnnnnnnnnnnnnnnnnnnnnnnnnnnnnnnnnnnnnnnnnnnnnnnnnnnnnnnnnnnnnnnnnnnnnnnnnnnnnnnnnnnnnnnnnnnnnnnnnnnnnnnnnnnnnnnnnnnnnnnnnnnnnnnnnnnnnnnnnnnnnnnnnnnnnnnnnnnnnnnnnnnnnnnnnnnnnnnnnnnnnnnnnnnnnnnnnnnnnnnnnnnnnnnnnnnnnnnnnnnnnnnnnnnnnnnnnnnnnnnnnnnnnnnnnnnnnnnnnnnnnnnnnnnnnnnnnnnnnnnnnnnnnnnnnnnnnnnnnnnnnnnnnnnnnnnnnnnnnnnnnnnnnnnnnnnnnnnnnnnnnnnnnnnnnnnnnnnnnnnnnnnnnnnnnnnnnnnnnnnnnnnnnnnnnnnnnnnnnnnnnnnnnnnnnnnnnnnnnnnnnnnnnnnnnnnnnnnnnnnnnnnnnnnnnnnnnnnnnnnnnnnnnnnnnnnnnnnnnnnnnnnnnnnnnnnnnnnnnnnnnnnnnnnnnnnnnnnnnnnnnnnnnnnnnnnnnnnnnnnnnnnnnnnnnnnnnnnnnnnnnnnnnnnnnnnnnnnnnnnnnnnnnnnnnnnnnnnnnnnnnnnnnnnnnnnnnnnnnnnnnnnnnnnnnnnnnnnnnnnnnnnnnnnnnnnnnnnnnnnnnnnnnnnnnnnnnnnnnnnnnnnnnnnnnnnnnnnnnnnnnnnnnnnnnnnnnnnnnnnnnnnnnnnnnnnnnnnnnnnnnnnnnnnnnnnnnnnnnnnnnnnnnnnnnnnnnnnnnnnnnnnnnnnnnnnnnnnnnnnnnnnnnnnnnnnnnnnnnnnnnnnnnnnnnnnnnnnnnnnnnnnnnnnnnnnnnnnnnnnnnnnnnnnnnnnnnnnnnnnnnnnnnnnnnnnnnnnnnnnnnnnnnnnnnnnnnnnnnnnnnnnnnnnnnnnnnnnnnnnnnnnnnnnnnnnnnnnnnnnnnnnnnnnnnnnnnnnnnnnnnnnnnnnnnnnnnnnnnnnnnnnnnnnnnnnnnnnnnnnnnnnnnnnnnnnnnnnnnnnnnnnnnnnnnnnnnnnnnnnnnnnnnnnnnnnnnnnnnnnnnnnnnnnnnnnnnnnnnnnnnnnnnnnnnnnnnnnnnnnnnnnnnnnnnnnnnnnnnnnnnnnnnnnnnnnnnnnnnnnnnnnnnnnnnnnnnnnnnnnnnnnnnnnnnnnnnnnnnnnnnnnnnnnnnnnnnnnnnnnnnnnnnnnnnnnnnnnnnnnnnnnnnnnnnnnnnnnnnnnnnnnnnnnnnnnnnnnnnnnnnnnnnnnnnnnnnnnnnnnnnnnnnnnnnnnnnnnnnnnnnnnnnnnnnnnnnnnnnnnnnnnnnnnnnnnnnnnnnnnnnnnnnnnnnnnnnnnnnnnnnnnnnnnnnnnnnnnnnnnnnnnnnnnnnnnnnnnnnnnnnnnnnnnnnnnnnnnnnnnnnnnnnnnnnnnnnnnnnnnnnnnnnnnnnnnnnnnnnnnnnnnnnnnnnnnnnnnnnnnnnnnnnnnnnnnnnnnnnnnnnnnnnnnnnnnnnnnnnnnnnnnnnnnnnnnnnnnnnnnnnnnnnnnnnnnnnnnnnnnnnnnnnnnnnnnnnnnnnnnnnnnnnnnnnnnnnnnnnnnnnnnnnnnnnnnnnnnnnnnnnnnnnnnnnnnnnnnnnnnnnnnnnnnnnnnnnnnnnnnnnnnnnnnnnnnnnnnnnnnnnnnnnnnnnnnnnnnnnnnnnnnnnnnnnnnnnnnnnnnnnnnnnnnnnnnnnnnnnnnnnnnnnnnnnnnnnnnnnnnnnnnnnnnnnnnnnnnnnnnnnnnnnnnnnnnnnnnnnnnnnnnnnnnnnnnnnnnnnnnnnnnnnnnnnnnnnnnnnnnnnnnnnnnnnnnnnnnnnnnnnnnnnnnnnnnnnnnnnnnnnnnnnnnnnnnnnnnnnnnnnnnnnnnnnnnnnnnnnnnnnnnnnnnnnnnnnnnnnnnnnnnnnnnnnnnnnnnnnnnnnnnnnnnnnnnnnnnnnnnnnnnnnnnnnnnnnnnnnnnnnnnnnnnnnnnnnnnnnnnnnnnnnnnnnnnnnnnnnnnnnnnnnnnnnnnnnnnnnnnnnnnnnnnnnnnnnnnnnnnnnnnnnnnnnnnnnnnnnnnnnnnnnnnnnnnnnnnnnnnnnnnnnnnnnnnnnnnnnnnnnnnnnnnnnnnnnnnnnnnnnnnnnnnnnnnnnnnnnnnnnnnnnnnnnnnnnnnnnnnnnnnnnnnnnnnnnnnnnnnnnnnnnnnnnnnnnnnnnnnnnnnnnnnnnnnnnnnnnnnnnnnnnnnnnnnnnnnnnnnnnnnnnnnnnnnnnnnnnnnnnnnnnnnnnnnnnnnnnnnnnnnnnnnnnnnnnnnnnnnnnnnnnnnnnnnnnnnnnnnnnnnnnnnnnnnnnnnnnnnnnnnnnnnnnnnnnnnnnnnnnnnnnnnnnnnnnnnnnnnnnnnnnnnnnnnnnnnnnnnnnnnnnnnnnnnnnnnnnnnnnnnnnnnnnnnnnnnnnnnnnnnnnnnnnnnnnnnnnnnnnnnnnnnnnnnnnnnnnnnnnnnnnnnnnnnnnnnnnnnnnnnnnnnnnnnnnnnnnnnnnnnnnnnnnnnnnnnnnnnnnnnnnnnnnnnnnnnnnnnnnnnnnnnnnnnnnnnnnnnnnnnnnnnnnnnnnnnnnnnnnnnnnnnnnnnnnnnnnnnnnnnnnnnnnnnnnnnnnnnnnnnnnnnnnnnnnnnnnnnnnnnnnnnnnnnnnnnnnnnnnnnnnnnnnnnnnnnnnnnnnnnnnnnnnnnnnnnnnnnnnnnnnnnnnnnnnnnnnnnnnnnnnnnnnnnnnnnnnnnnnnnnnnnnnnnnnnnnnnnnnnnnnnnnnnnnnnnnnnnnnnnnnnnnnnnnnnnnnnnnnnnnnnnnnnnnnnnnnnnnnnnnnnnnnnnnnnnnnnnnnnnnnnnnnnnnnnnnnnnnnnnnnnnnnnnnnnnnnnnnnnnnnnnnnnnnnnnnnnnnnnnnnnnnnnnnnnnnnnnnnnnnnnnnnnnnnnnnnnnnnnnnnnnnnnnnnnnnnnnnnnnnnnnnnnnnnnnnnnnnnnnnnnnnnnnnnnnnnnnnnnnnnnnnnnnnnnnnnnnnnnnnnnnnnnnnnnnnnnnnnnnnnnnnnnnnnnnnnnnnnnnnnnnnnnnnnnnnnnnnnnnnnnnnnnnnnnnnnnnnnnnnnnnnnnnnnnnnnnnnnnnnnnnnnnnnnnnnnnnnnnnnnnnnnnnnnnnnnnnnnnnnnnnnnnnnnnnnnnnnnnnnnnnnnnnnnnnnnnnnnnnnnnnnnnnnnnnnnnnnnnnnnnnnnnnnnnnnnnnnnnnnnnnnnnnnnnnnnnnnnnnnnnnnnnnnnnnnnnnnnnnnnnnnnnnnnnnnnnnnnnnnnnnnnnnnnnnnnnnnnnnnnnnnnnnnnnnnnnnnnnnnnnnnnnnnnnnnnnnnnnnnnnnnnnnnnnnnnnnnnnnnnnnnnnnnnnnnnnnnnnnnnnnnnnnnnnnnnnnnnnnnnnnnnnnnnnnnnnnnnnnnnnnnnnnnnnnnnnnnnnnnnnnnnnnnnnnnnnnnnnnnnnnnnnnnnnnnnnnnnnnnnnnnnnnnnnnnnnnnnnnnnnnnnnnnnnnnnnnnnnnnnnnnnnnnnnnnnnnnnnnnnnnnnnnnnnnnnnnnnnnnnnnnnnnnnnnnnnnnnnnnnnnnnnnnnnnnnnnnnnnnnnnnnnnnnnnnnnnnnnnnnnnnnnnnnnnnnnnnnnnnnnnnnnnnnnnnnnnnnnnnnnnnnnnnnnnnnnnnnnnnnnnnnnnnnnnnnnnnnnnnnnnnnnnnnnnnnnnnnnnnnnnnnnnnnnnnnnnnnnnnnnnnnnnnnnnnnnnnnnnnnnnnnnnnnnnnnnnnnnnnnnnnnnnnnnnnnnnnnnnnnnnnnnnnnnnnnnnnnnnnnnnnnnnnnnnnnnnnnnnnnnnnnnnnnnnnnnnnnnnnnnnnnnnnnnnnnnnnnnnnnnnnnnnnnnnnnnnnnnnnnnnnnnnnnnnnnnnnnnnnnnnnnnnnnnnnnnnnnnnnnnnnnnnnnnnnnnnnnnnnnnnnnnnnnnnnnnnnnnnnnnnnnnnnnnnnnnnnnnnnnnnnnnnnnnnnnnnnnnnnnnnnnnnnnnnnnnnnnnnnnnnnnnnnnnnnnnnnnnnnnnnnnnnnnnnnnnnnnnnnnnnnnnnnnnnnnnnnnnnnnnnnnnnnnnnnnnnnnnnnnnnnnnnnnnnnnnnnnnnnnnnnnnnnnnnnnnnnnnnnnnnnnnnnnnnnnnnnnnnnnnnnnnnnnnnnnnnnnnnnnnnnnnnnnnnnnnnnnnnnnnnnnnnnnnnnnnnnnnnnnnnnnnnnnnnnnnnnnnnnnnnnnnnnnnnnnnnnnnnnnnnnnnnnnnnnnnnnnnnnnnnnnnnnnnnnnnnnnnnnnnnnnnnnnnnnnnnnnnnnnnnnnnnnnnnnnnnnnnnnnnnnnnnnnnnnnnnnnnnnnnnnnnnnnnnnnnnnnnnnnnnnnnnnnnnnnnnnnnnnnnnnnnnnnnnnnnnnnnnnnnnnnnnnnnnnnnnnnnnnnnnnnnnnnnnnnnnnnnnnnnnnnnnnnnnnnnnnnnnnnnnnnnnnnnnnnnnnnnnnnnnnnnnnnnnnnnnnnnnnnnnnnnnnnnnnnnnnnnnnnnnnnnnnnnnnnnnnnnnnnnnnnnnnnnnnnnnnnnnnnnnnnnnnnnnnnnnnnnnnnnnnnnnnnnnnnnnnnnnnnnnnnnnnnnnnnnnnnnnnnnnnnnnnnnnnnnnnnnnnnnnnnnnnnnnnnnnnnnnnnnnnnnnnnnnnnnnnnnnnnnnnnnnnnnnnnnnnnnnnnnnnnnnnnnnnnnnnnnnnnnnnnnnnnnnnnnnnnnnnnnnnnnnnnnnnnnnnnnnnnnnnnnnnnnnnnnnnnnnnnnnnnnnnnnnnnnnnnnnnnnnnnnnnnnnnnnnnnnnnnnnnnnnnnnnnnnnnnnnnnnnnnnnnnnnnnnnnnnnnnnnnnnnnnnnnnnnnnnnnnnnnnnnnnnnnnnnnnnnnnnnnnnnnnnnnnnnnnnnnnnnnnnnnnnnnnnnnnnnnnnnnnnnnnnnnnnnnnnnnnnnnnnnnnnnnnnnnnnnnnnnnnnnnnnnnnnnnnnnnnnnnnnnnnnnnnnnnnnnnnnnnnnnnnnnnnnnnnnnnnnnnnnnnnnnnnnnnnnnnnnnnnnnnnnnnnnnnnnnnnnnnnnnnnnnnnnnnnnnnnnnnnnnnnnnnnnnnnnnnnnnnnnnnnnnnnnnnnnnnnnnnnnnnnnnnnnnnnnnnnnnnnnnnnnnnnnnnnnnnnnnnnnnnnnnnnnnnnnnnnnnnnnnnnnnnnnnnnnnnnnnnnnnnnnnnnnnnnnnnnnnnnnnnnnnnnnnnnnnnnnnnnnnnnnnnnnnnnnnnnnnnnnnnnnnnnnnnnnnnnnnnnnnnnnnnnnnnnnnnnnnnnnnnnnnnnnnnnnnnnnnnnnnnnnnnnnnnnnnnnnnnnnnnnnnnnnnnnnnnnnnnnnnnnnnnnnnnnnnnnnnnnnnnnnnnnnnnnnnnnnnnnnnnnnnnnnnnnnnnnnnnnnnnnnnnnnnnnnnnnnnnnnnnnnnnnnnnnnnnnnnnnnnnnnnnnnnnnnnnnnnnnnnnnnnnnnnnnnnnnnnnnnnnnnnnnnnnnnnnnnnnnnnnnnnnnnnnnnnnnnnnnnnnnnnnnnnnnnnnnnnnnnnnnnnnnnnnnnnnnnnnnnnnnnnnnnnnnnnnnnnnnnnnnnnnnnnnnnnnnnnnnnnnnnnnnnnnnnnnnnnnnnnnnnnnnnnnnnnnnnnnnnnnnnnnnnnnnnnnnnnnnnnnnnnnnnnnnnnnnnnnnnnnnnnnnnnnnnnnnnnnnnnnnnnnnnnnnnnnnnnnnnnnnnnnnnnnnnnnnnnnnnnnnnnnnnnnnnnnnnnnnnnnnnnnnnnnnnnnnnnnnnnnnnnnnnnnnnnnnnnnnnnnnnnnnnnnnnnnnnnnnnnnnnnnnnnnnnnnnnnnnnnnnnnnnnnnnnnnnnnnnnnnnnnnnnnnnnnnnnnnnnnnnnnnnnnnnnnnnnnnnnnnnnnnnnnnnnnnnnnnnnnnnnnnnnnnnnnnnnnnnnnnnnnnnnnnnnnnnnnnnnnnnnnnnnnnnnnnnnnnnnnnnnnnnnnnnnnnnnnnnnnnnnnnnnnnnnnnnnnnnnnnnnnnnnnnnnnnnnnnnnnnnnnnnnnnnnnnnnnnnnnnnnnnnnnnnnnnnnnnnnnnnnnnnnnnnnnnnnnnnnnnnnnnnnnnnnnnnnnnnnnnnnnnnnnnnnnnnnnnnnnnnnnnnnnnnnnnnnnnnnnnnnnnnnnnnnnnnnnnnnnnnnnnnnnnnnnnnnnnnnnnnnnnnnnnnnnnnnnnnnnnnnnnnnnnnnnnnnnnnnnnnnnnnnnnnnnnnnnnnnnnnnnnnnnnnnnnnnnnnnnnnnnnnnnnnnnnnnnnnnnnnnnnnnnnnnnnnnnnnnnnnnnnnnnnnnnnnnnnnnnnnnnnnnnnnnnnnnnnnnnnnnnnnnnnnnnnnnnnnnnnnnnnnnnnnnnnnnnnnnnnnnnnnnnnnnnnnnnnnnnnnnnnnnnnnnnnnnnnnnnnnnnnnnnnnnnnnnnnnnnnnnnnnnnnnnnnnnnnnnnnnnnnnnnnnnnnnnnnnnnnnnnnnnnnnnnnnnnnnnnnnnnnnnnnnnnnnnnnnnnnnnnnnnnnnnnnnnnnnnnnnnnnnnnnnnnnnnnnnnnnnnnnnnnnnnnnnnnnnnnnnnnnnnnnnnnnnnnnnnnnnnnnnnnnnnnnnnnnnnnnnnnnnnnnnnnnnnnnnnnnnnnnnnnnnnnnnnnnnnnnnnnnnnnnnnnnnnnnnnnnnnnnnnnnnnnnnnnnnnnnnnnnnnnnnnnnnnnnnnnnnnnnnnnnnnnnnnnnnnnnnnnnnnnnnnnnnnnnnnnnnnnnnnnnnnnnnnnnnnnnnnnnnnnnnnnnnnnnnnnnnnnnnnnnnnnnnnnnnnnnnnnnnnnnnnnnnnnnnnnnnnnnnnnnnnnnnnnnnnnnnnnnnnnnnnnnnnnnnnnnnnnnnnnnnnnnnnnnnnnnnnnnnnnnnnnnnnnnnnnnnnnnnnnnnnnnnnnnnnnnnnnnnnnnnnnnnnnnnnnnnnnnnnnnnnnnnnnnnnnnnnnnnnnnnnnnnnnnnnnnnnnnnnnnnnnnnnnnnnnnnnnnnnnnnnnnnnnnnnnnnnnnnnnnnnnnnnnnnnnnnnnnnnnnnnnnnnnnnnnnnnnnnnnnnnnnnnnnnnnnnnnnnnnnnnnnnnnnnnnnnnnnnnnnnnnnnnnnnnnnnnnnnnnnnnnnnnnnnnnnnnnnnnnnnnnnnnnnnnnnnnnnnnnnnnnnnnnnnnnnnnnnnnnnnnnnnnnnnnnnnnnnnnnnnnnnnnnnnnnnnnnnnnnnnnnnnnnnnnnnnnnnnnnnnnnnnnnnnnnnnnnnnnnnnnnnnnnnnnnnnnnnnnnnnnnnnnnnnnnnnnnnnnnnnnnnnnnnnnnnnnnnnnnnnnnnnnnnnnnnnnnnnnnnnnnnnnnnnnnnnnnnnnnnnnnnnnnnnnnnnnnnnnnnnnnnnnnnnnnnnnnnnnnnnnnnnnnnnnnnnnnnnnnnnnnnnnnnnnnnnnnnnnnnnnnnnnnnnnnnnnnnnnnnnnnnnnnnnnnnnnnnnnnnnnnnnnnnnnnnnnnnnnnnnnnnnnnnnnnnnnnnnnnnnnnnnnnnnnnnnnnnnnnnnnnnnnnnnnnnnnnnnnnnnnnnnnnnnnnnnnnnnnnnnnnnnnnnnnnnnnnnnnnnnnnnnnnnnnnnnnnnnnnnnnnnnnnnnnnnnnnnnnnnnnnnnnnnnnnnnnnnnnnnnnnnnnnnnnnnnnnnnnnnnnnnnnnnnnnnnnnnnnnnnnnnnnnnnnnnnnnnnnnnnnnnnnnnnnnnnnnnnnnnnnnnnnnnnnnnnnnnnnnnnnnnnnnnnnnnnnnnnnnnnnnnnnnnnnnnnnnnnnnnnnnnnnnnnnnnnnnnnnnnnnnnnnnnnnnnnnnnnnnnnnnnnnnnnnnnnnnnnnnnnnnnnnnnnnnnnnnnnnnnnnnnnnnnnnnnnnnnnnnnnnnnnnnnnnnnnnnnnnnnnnnnnnnnnnnnnnnnnnnnnnnnnnnnnnnnnnnnnnnnnnnnnnnnnnnnnnnnnnnnnnnnnnnnnnnnnnnnnnnnnnnnnnnnnnnnnnnnnnnnnnnnnnnnnnnnnnnnnnnnnnnnnnnnnnnnnnnnnnnnnnnnnnnnnnnnnnnnnnnnnnnnnnnnnnnnnnnnnnnnnnnnnnnnnnnnnnnnnnnnnnnnnnnnnnnnnnnnnnnnnnnnnnnnnnnnnnnnnnnnnnnnnnnnnnnnnnnnnnnnnnnnnnnnnnnnnnnnnnnnnnnnnnnnnnnnnnnnnnnnnnnnnnnnnnnnnnnnnnnnnnnnnnnnnnnnnnnnnnnnnnnnnnnnnnnnnnnnnnnnnnnnnnnnnnnnnnnnnnnnnnnnnnnnnnnnnnnnnnnnnnnnnnnnnnnnnnnnnnnnnnnnnnnnnnnnnnnnnnnnnnnnnnnnnnnnnnnnnnnnnnnnnnnnnnnnnnnnnnnnnnnnnnnnnnnnnnnnnnnnnnnnnnnnnnnnnnnnnnnnnnnnnnnnnnnnnnnnnnnnnnnnnnnnnnnnnnnnnnnnnnnnnnnnnnnnnnnnnnnnnnnnnnnnnnnnnnnnnnnnnnnnnnnnnnnnnnnnnnnnnnnnnnnnnnnnnnnnnnnnnnnnnnnnnnnnnnnnnnnnnnnnnnnnnnnnnnnnnnnnnnnnnnnnnnnnnnnnnnnnnnnnnnnnnnnnnnnnnnnnnnnnnnnnnnnnnnnnnnnnnnnnnnnnnnnnnnnnnnnnnnnnnnnnnnnnnnnnnnnnnnnnnnnnnnnnnnnnnnnnnnnnnnnnnnnnnnnnnnnnnnnnnnnnnnnnnnnnnnnnnnnnnnnnnnnnnnnnnnnnnnnnnnnnnnnnnnnnnnnnnnnnnnnnnnnnnnnnnnnnnnnnnnnnnnnnnnnnnnnnnnnnnnnnnnnnnnnnnnnnnnnnnnnnnnnnnnnnnnnnnnnnnnnnnnnnnnnnnnnnnnnnnnnnnnnnnnnnnnnnnnnnnnnnnnnnnnnnnnnnnnnnnnnnnnnnnnnnnnnnnnnnnnnnnnnnnnnnnnnnnnnnnnnnnnnnnnnnnnnnnnnnnnnnnnnnnnnnnnnnnnnnnnnnnnnnnnnnnnnnnnnnnnnnnnnnnnnnnnnnnnnnnnnnnnnnnnnnnnnnnnnnnnnnnnnnnnnnnnnnnnnnnnnnnnnnnnnnnnnnnnnnnnnnnnnnnnnnnnnnnnnnnnnnnnnnnnnnnnnnnnnnnnnnnnnnnnnnnnnnnnnnnnnnnnnnnnnnnnnnnnnnnnnnnnnnnnnnnnnnnnnnnnnnnnnnnnnnnnnnnnnnnnnnnnnnnnnnnnnnnnnnnnnnnnnnnnnnnnnnnnnnnnnnnnnnnnnnnnnnnnnnnnnnnnnnnnnnnnnnnnnnnnnnnnnnnnnnnnnnnnnnnnnnnnnnnnnnnnnnnnnnnnnnnnnnnnnnnnnnnnnnnnnnnnnnnnnnnnnnnnnnnnnnnnnnnnnnnnnnnnnnnnnnnnnnnnnnnnnnnnnnnnnnnnnnnnnnnnnnnnnnnnnnnnnnnnnnnnnnnnnnnnnnnnnnnnnnnnnnnnnnnnnnnnnnnnnnnnnnnnnnnnnnnnnnnnnnnnnnnnnnnnnnnnnnnnnnnnnnnnnnnnnnnnnnnnnnnnnnnnnnnnnnnnnnnnnnnnnnnnnnnnnnnnnnnnnnnnnnnnnnnnnnnnnnnnnnnnnnnnnnnnnnnnnnnnnnnnnnnnnnnnnnnnnnnnnnnnnnnnnnnnnnnnnnnnnnnnnnnnnnnnnnnnnnnnnnnnnnnnnnnnnnnnnnnnnnnnnnnnnnnnnnnnnnnnnnnnnnnnnnnnnnnnnnnnnnnnnnnnnnnnnnnnnnnnnnnnnnnnnnnnnnnnnnnnnnnnnnnnnnnnnnnnnnnnnnnnnnnnnnnnnnnnnnnnnnnnnnnnnnnnnnnnnnnnnnnnnnnnnnnnnnnnnnnnnnnnnnnnnnnnnnnnnnnnnnnnnnnnnnnnnnnnnnnnnnnnnnnnnnnnnnnnnnnnnnnnnnnnnnnnnnnnnnnnnnnnnnnnnnnnnnnnnnnnnnnnnnnnnnnnnnnnnnnnnnnnnnnnnnnnnnnnnnnnnnnnnnnnnnnnnnnnnnnnnnnnnnnnnnnnnnnnnnnnnnnnnnnnnnnnnnnnnnnnnnnnnnnnnnnnnnnnnnnnnnnnnnnnnnnnnnnnnnnnnnnnnnnnnnnnnnnnnnnnnnnnnnnnnnnnnnnnnnnnnnnnnnnnnnnnnnnnnnnnnnnnnnnnnnnnnnnnnnnnnnnnnnnnnnnnnnnnnnnnnnnnnnnnnnnnnnnnnnnnnnnnnnnnnnnnnnnnnnnnnnnnnnnnnnnnnnnnnnnnnnnnnnnnnnnnnnnnnnnnnnnnnnnnnnnnnnnnnnnnnnnnnnnnnnnnnnnnnnnnnnnnnnnnnnnnnnnnnnnnnnnnnnnnnnnnnnnnnnnnnnnnnnnnnnnnnnnnnnnnnnnnnnnnnnnnnnnnnnnnnnnnnnnnnnnnnnnnnnnnnnnnnnnnnnnnnnnnnnnnnnnnnnnnnnnnnnnnnnnnnnnnnnnnnnnnnnnnnnnnnnnnnnnnnnnnnnnnnnnnnnnnnnnnnnnnnnnnnnnnnnnnnnnnnnnnnnnnnnnnnnnnnnnnnnnnnnnnnnnnnnnnnnnnnnnnnnnnnnnnnnnnnnnnnnnnnnnnnnnnnnnnnnnnnnnnnnnnnnnnnnnnnnnnnnnnnnnnnnnnnnnnnnnnnnnnnnnnnnnnnnnnnnnnnnnnnnnnnnnnnnnnnnnnnnnnnnnnnnnnnnnnnnnnnnnnnnnnnnnnnnnnnnnnnnnnnnnnnnnnnnnnnnnnnnnnnnnnnnnnnnnnnnnnnnnnnnnnnnnnnnnnnnnnnnnnnnnnnnnnnnnnnnnnnnnnnnnnnnnnnnnnnnnnnnnnnnnnnnnnnnnnnnnnnnnnnnnnnnnnnnnnnnnnnnnnnnnnnnnnnnnnnnnnnnnnnnnnnnnnnnnnnnnnnnnnnnnnnnnnnnnnnnnnnnnnnnnnnnnnnnnnnnnnnnnnnnnnnnnnnnnnnnnnnnnnnnnnnnnnnnnnnnnnnnnnnnnnnnnnnnnnnnnnnnnnnnnnnnnnnnnnnnnnnnnnnnnnnnnnnnnnnnnnnnnnnnnnnnnnnnnnnnnnnnnnnnnnnnnnnnnnnnnnnnnnnnnnnnnnnnnnnnnnnnnnnnnnnnnnnnnnnnnnnnnnnnnnnnnnnnnnnnnnnnnnnnnnnnnnnnnnnnnnnnnnnnnnnnnnnnnnnnnnnnnnnnnnnnnnnnnnnnnnnnnnnnnnnnnnnnnnnnnnnnnnnnnnnnnnnnnnnnnnnnnnnnnnnnnnnnnnnnnnnnnnnnnnnnnnnnnnnnnnnnnnnnnnnnnnnnnnnnnnnnnnnnnnnnnnnnnnnnnnnnnnnnnnnnnnnnnnnnnnnnnnnnnnnnnnnnnnnnnnnnnnnnnnnnnnnnnnnnnnnnnnnnnnnnnnnnnnnnnnnnnnnnnnnnnnnnnnnnnnnnnnnnnnnnnnnnnnnnnnnnnnnnnnnnnnnnnnnnnnnnnnnnnnnnnnnnnnnnnnnnnnnnnnnnnnnnnnnnnnnnnnnnnnnnnnnnnnnnnnnnnnnnnnnnnnnnnnnnnnnnnnnnnnnnnnnnnnnnnnnnnnnnnnnnnnnnnnnnnnnnnnnnnnnnnnnnnnnnnnnnnnnnnnnnnnnnnnnnnnnnnnnnnnnnnnnnnnnnnnnnnnnnnnnnnnnnnnnnnnnnnnnnnnnnnnnnnnnnnnnnnnnnnnnnnnnnnnnnnnnnnnnnnnnnnnnnnnnnnnnnnnnnnnnnnnnnnnnnnnnnnnnnnnnnnnnnnnnnnnnnnnnnnnnnnnnnnnnnnnnnnnnnnnnnnnnnnnnnnnnnnnnnnnnnnnnnnnnnnnnnnnnnnnnnnnnnnnnnnnnnnnnnnnnnnnnnnnnnnnnnnnnnnnnnnnnnnnnnnnnnnnnnnnnnnnnnnnnnnnnnnnnnnnnnnnnnnnnnnnnnnnnnnnnnnnnnnnnnnnnnnnnnnnnnnnnnnnnnnnnnnnnnnnnnnnnnnnnnnnnnnnnnnnnnnnnnnnnnnnnnnnnnnnnnnnnnnnnnnnnnnnnnnnnnnnnnnnnnnnnnnnnnnnnnnnnnnnnnnnnnnnnnnnnnnnnnnnnnnnnnnnnnnnnnnnnnnnnnnnnnnnnnnnnnnnnnnnnnnnnnnnnnnnnnnnnnnnnnnnnnnnnnnnnnnnnnnnnnnnnnnnnnnnnnnnnnnnnnnnnnnnnnnnnnnnnnnnnnnnnnnnnnnnnnnnnnnnnnnnnnnnnnnnnnnnnnnnnnnnnnnnnnnnnnnnnnnnnnnnnnnnnnnnnnnnnnnnnnnnnnnnnnnnnnnnnnnnnnnnnnnnnnnnnnnnnnnnnnnnnnnnnnnnnnnnnnnnnnnnnnnnnnnnnnnnnnnnnnnnnnnnnnnnnnnnnnnnnnnnnnnnnnnnnnnnnnnnnnnnnnnnnnnnnnnnnnnnnnnnnnnnnnnnnnnnnnnnnnnnnnnnnnnnnnnnnnnnnnnnnnnnnnnnnnnnnnnnnnnnnnnnnnnnnnnnnnnnnnnnnnnnnnnnnnnnnnnnnnnnnnnnnnnnnnnnnnnnnnnnnnnnnnnnnnnnnnnnnnnnnnnnnnnnnnnnnnnnnnnnnnnnnnnnnnnnnnnnnnnnnnnnnnnnnnnnnnnnnnnnnnnnnnnnnnnnnnnnnnnnnnnnnnnnnnnnnnnnnnnnnnnnnnnnnnnnnnnnnnnnnnnnnnnnnnnnnnnnnnnnnnnnnnnnnnnnnnnnnnnnnnnnnnnnnnnnnnnnnnnnnnnnnnnnnnnnnnnnnnnnnnnnnnnnnnnnnnnnnnnnnnnnnnnnnnnnnnnnnnnnnnnnnnnnnnnnnnnnnnnnnnnnnnnnnnnnnnnnnnnnnnnnnnnnnnnnnnnnnnnnnnnnnnnnnnnnnnnnnnnnnnnnnnnnnnnnnnnnnnnnnnnnnnnnnnnnnnnnnnnnnnnnnnnnnnnnnnnnnnnnnnnnnnnnnnnnnnnnnnnnnnnnnnnnnnnnnnnnnnnnnnnnnnnnnnnnnnnnnnnnnnnnnnnnnnnnnnnnnnnnnnnnnnnnnnnnnnnnnnnnnnnnnnnnnnnnnnnnnnnnnnnnnnnnnnnnnnnnnnnnnnnnnnnnnnnnnnnnnnnnnnnnnnnnnnnnnnnnnnnnnnnnnnnnnnnnnnnnnnnnnnnnnnnnnnnnnnnnnnnnnnnnnnnnnnnnnnnnnnnnnnnnnnnnnnnnnnnnnnnnnnnnnnnnnnnnnnnnnnnnnnnnnnnnnnnnnnnnnnnnnnnnnnnnnnnnnnnnnnnnnnnnnnnnnnnnnnnnnnnnnnnnnnnnnnnnnnnnnnnnnnnnnnnnnnnnnnnnnnnnnnnnnnnnnnnnnnnnnnnnnnnnnnnnnnnnnnnnnnnnnnnnnnnnnnnnnnnnnnnnnnnnnnnnnnnnnnnnnnnnnnnnnnnnnnnnnnnnnnnnnnnnnnnnnnnnnnnnnnnnnnnnnnnnnnnnnnnnnnnnnnnnnnnnnnnnnnnnnnnnnnnnnnnnnnnnnnnnnnnnnnnnnnnnnnnnnnnnnnnnnnnnnnnnnnnnnnnnnnnnnnnnnnnnnnnnnnnnnnnnnnnnnnnnnnnnnnnnnnnnnnnnnnnnnnnnnnnnnnnnnnnnnnnnnnnnnnnnnnnnnnnnnnnnnnnnnnnnnnnnnnnnnnnnnnnnnnnnnnnnnnnnnnnnnnnnnnnnnnnnnnnnnnnnnnnnnnnnnnnnnnnnnnnnnnnnnnnnnnnnnnnnnnnnnnnnnnnnnnnnnnnnnnnnnnnnnnnnnnnnnnnnnnnnnnnnnnnnnnnnnnnnnnnnnnnnnnnnnnnnnnnnnnnnnnnnnnnnnnnnnnnnnnnnnnnnnnnnnnnnnnnnnnnnnnnnnnnnnnnnnnnnnnnnnnnnnnnnnnnnnnnnnnnnnnnnnnnnnnnnnnnnnnnnnnnnnnnnnnnnnnnnnnnnnnnnnnnnnnnnnnnnnnnnnnnnnnnnnnnnnnnnnnnnnnnnnnnnnnnnnnnnnnnnnnnnnnnnnnnnnnnnnnnnnnnnnnnnnnnnnnnnnnnnnnnnnnnnnnnnnnnnnnnnnnnnnnnnnnnnnnnnnnnnnnnnnnnnnnnnnnnnnnnnnnnnnnnnnnnnnnnnnnnnnnnnnnnnnnnnnnnnnnnnnnnnnnnnnnnnnnnnnnnnnnnnnnnnnnnnnnnnnnnnnnnnnnnnnnnnnnnnnnnnnnnnnnnnnnnnnnnnnnnnnnnnnnnnnnnnnnnnnnnnnnnnnnnnnnnnnnnnnnnnnnnnnnnnnnnnnnnnnnnnnnnnnnnnnnnnnnnnnnnnnnnnnnnnnnnnnnnnnnnnnnnnnnnnnnnnnnnnnnnnnnnnnnnnnnnnnnnnnnnnnnnnnnnnnnnnnnnnnnnnnnnnnnnnnnnnnnnnnnnnnnnnnnnnnnnnnnnnnnnnnnnnnnnnnnnnnnnnnnnnnnnnnnnnnnnnnnnnnnnnnnnnnnnnnnnnnnnnnnnnnnnnnnnnnnnnnnnnnnnnnnnnnnnnnnnnnnnnnnnnnnnnnnnnnnnnnnnnnnnnnnnnnnnnnnnnnnnnnnnnnnnnnnnnnnnnnnnnnnnnnnnnnnnnnnnnnnnnnnnnnnnnnnnnnnnnnnnnnnnnnnnnnnnnnnnnnnnnnnnnnnnnnnnnnnnnnnnnnnnnnnnnnnnnnnnnnnnnnnnnnnnnnnnnnnnnnnnnnnnnnnnnnnnnnnnnnnnnnnnnnnnnnnnnnnnnnnnnnnnnnnnnnnnnnnnnnnnnnnnnnnnnnnnnnnnnnnnnnnnnnnnnnnnnnnnnnnnnnnnnnnnnnnnnnnnnnnnnnnnnnnnnnnnnnnnnnnnnnnnnnnnnnnnnnnnnnnnnnnnnnnnnnnnnnnnnnnnnnnnnnnnnnnnnnnnnnnnnnnnnnnnnnnnnnnnnnnnnnnnnnnnnnnnnnnnnnnnnnnnnnnnnnnnnnnnnnnnnnnnnnnnnnnnnnnnnnnnnnnnnnnnnnnnnnnnnnnnnnnnnnnnnnnnnnnnnnnnnnnnnnnnnnnnnnnnnnnnnnnnnnnnnnnnnnnnnnnnnnnnnnnnnnnnnnnnnnnnnnnnnnnnnnnnnnnnnnnnnnnnnnnnnnnnnnnnnnnnnnnnnnnnnnnnnnnnnnnnnnnnnnnnnnnnnnnnnnnnnnnnnnnnnnnnnnnnnnnnnnnnnnnnnnnnnnnnnnnnnnnnnnnnnnnnnnnnnnnnnnnnnnnnnnnnnnnnnnnnnnnnnnnnnnnnnnnnnnnnnnnnnnnnnnnnnnnnnnnnnnnnnnnnnnnnnnnnnnnnnnnnnnnnnnnnnnnnnnnnnnnnnnnnnnnnnnnnnnnnnnnnnnnnnnnnnnnnnnnnnnnnnnnnnnnnnnnnnnnnnnnnnnnnnnnnnnnnnnnnnnnnnnnnnnnnnnnnnnnnnnnnnnnnnnnnnnnnnnnnnnnnnnnnnnnnnnnnnnnnnnnnnnnnnnnnnnnnnnnnnnnnnnnnnnnnnnnnnnnnnnnnnnnnnnnnnnnnnnnnnnnnnnnnnnnnnnnnnnnnnnnnnnnnnnnnnnnnnnnnnnnnnnnnnnnnnnnnnnnnnnnnnnnnnnnnnnnnnnnnnnnnnnnnnnnnnnnnnnnnnnnnnnnnnnnnnnnnnnnnnnnnnnnnnnnnnnnnnnnnnnnnnnnnnnnnnnnnnnnnnnnnnnnnnnnnnnnnnnnnnnnnnnnnnnnnnnnnnnnnnnnnnnnnnnnnnnnnnnnnnnnnnnnnnnnnnnnnnnnnnnnnnnnnnnnnnnnnnnnnnnnnnnnnnnnnnnnnnnnnnnnnnnnnnnnnnnnnnnnnnnnnnnnnnnnnnnnnnnnnnnnnnnnnnnnnnnnnnnnnnnnnnnnnnnnnnnnnnnnnnnnnnnnnnnnnnnnnnnnnnnnnnnnnnnnnnnnnnnnnnnnnnnnnnnnnnnnnnnnnnnnnnnnnnnnnnnnnnnnnnnnnnnnnnnnnnnnnnnnnnnnnnnnnnnnnnnnnnnnnnnnnnnnnnnnnnnnnnnnnnnnnnnnnnnnnnnnnnnnnnnnnnnnnnnnnnnnnnnnnnnnnnnnnnnnnnnnnnnnnnnnnnnnnnnnnnnnnnnnnnnnnnnnnnnnnnnnnnnnnnnnnnnnnnnnnnnnnnnnnnnnnnnnnnnnnnnnnnnnnnnnnnnnnnnnnnnnnnnnnnnnnnnnnnnnnnnnnnnnnnnnnnnnnnnnnnnnnnnnnnnnnnnnnnnnnnnnnnnnnnnnnnnnnnnnnnnnnnnnnnnnnnnnnnnnnnnnnnnnnnnnnnnnnnnnnnnnnnnnnnnnnnnnnnnnnnnnnnnnnnnnnnnnnnnnnnnnnnnnnnnnnnnnnnnnnnnnnnnnnnnnnnnnnnnnnnnnnnnnnnnnnnnnnnnnnnnnnnnnnnnnnnnnnnnnnnnnnnnnnnnnnnnnnnnnnnnnnnnnnnnnnnnnnnnnnnnnnnnnnnnnnnnnnnnnnnnnnnnnnnnnnnnnnnnnnnnnnnnnnnnnnnnnnnnnnnnnnnnnnnnnnnnnnnnnnnnnnnnnnnnnnnnnnnnnnnnnnnnnnnnnnnnnnnnnnnnnnnnnnnnnnnnnnnnnnnnnnnnnnnnnnnnnnnnnnnnnnnnnnnnnnnnnnnnnnnnnnnnnnnnnnnnnnnnnnnnnnnnnnnnnnnnnnnnnnnnnnnnnnnnnnnnnnnnnnnnnnnnnnnnnnnnnnnnnnnnnnnnnnnnnnnnnnnnnnnnnnnnnnnnnnnnnnnnnnnnnnnnnnnnnnnnnnnnnnnnnnnnnnnnnnnnnnnnnnnnnnnnnnnnnnnnnnnnnnnnnnnnnnnnnnnnnnnnnnnnnnnnnnnnnnnnnnnnnnnnnnnnnnnnnnnnnnnnnnnnnnnnnnnnnnnnnnnnnnnnnnnnnnnnnnnnnnnnnnnnnnnnnnnnnnnnnnnnnnnnnnnnnnnnnnnnnnnnnnnnnnnnnnnnnnnnnnnnnnnnnnnnnnnnnnnnnnnnnnnnnnnnnnnnnnnnnnnnnnnnnnnnnnnnnnnnnnnnnnnnnnnnnnnnnnnnnnnnnnnnnnnnnnnnnnnnnnnnnnnnnnnnnnnnnnnnnnnnnnnnnnnnnnnnnnnnnnnnnnnnnnnnnnnnnnnnnnnnnnnnnnnnnnnnnnnnnnnnnnnnnnnnnnnnnnnnnnnnnnnnnnnnnnnnnnnnnnnnnnnnnnnnnnnnnnnnnnnnnnnnnnnnnnnnnnnnnnnnnnnnnnnnnnnnnnnnnnnnnnnnnnnnnnnnnnnnnnnnnnnnnnnnnnnnnnnnnnnnnnnnnnnnnnnnnnnnnnnnnnnnnnnnnnnnnnnnnnnnnnnnnnnnnnnnnnnnnnnnnnnnnnnnnnnnnnnnnnnnnnnnnnnnnnnnnnnnnnnnnnnnnnnnnnnnnnnnnnnnnnnnnnnnnnnnnnnnnnnnnnnnnnnnnnnnnnnnnnnnnnnnnnnnnnnnnnnnnnnnnnnnnnnnnnnnnnnnnnnnnnnnnnnnnnnnnnnnnnnnnnnnnnnnnnnnnnnnnnnnnnnnnnnnnnnnnnnnnnnnnnnnnnnnnnnnnnnnnnnnnnnnnnnnnnnnnnnnnnnnnnnnnnnnnnnnnnnnnnnnnnnnnnnnnnnnnnnnnnnnnnnnnnnnnnnnnnnnnnnnnnnnnnnnnnnnnnnnnnnnnnnnnnnnnnnnnnnnnnnnnnnnnnnnnnnnnnnnnnnnnnnnnnnnnnnnnnnnnnnnnnnnnnnnnnnnnnnnnnnnnnnnnnnnnnnnnnnnnnnnnnnnnnnnnnnnnnnnnnnnnnnnnnnnnnnnnnnnnnnnnnnnnnnnnnnnnnnnnnnnnnnnnnnnnnnnnnnnnnnnnnnnnnnnnnnnnnnnnnnnnnnnnnnnnnnnnnnnnnnnnnnnnnnnnnnnnnnnnnnnnnnnnnnnnnnnnnnnnnnnnnnnnnnnnnnnnnnnnnnnnnnnnnnnnnnnnnnnnnnnnnnnnnnnnnnnnnnnnnnnnnnnnnnnnnnnnnnnnnnnnnnnnnnnnnnnnnnnnnnnnnnnnnnnnnnnnnnnnnnnnnnnnnnnnnnnnnnnnnnnnnnnnnnnnnnnnnnnnnnnnnnnnnnnnnnnnnnnnnnnnnnnnnnnnnnnnnnnnnnnnnnnnnnnnnnnnnnnnnnnnnnnnnnnnnnnnnnnnnnnnnnnnnnnnnnnnnnnnnnnnnnnnnnnnnnnnnnnnnnnnnnnnnnnnnnnnnnnnnnnnnnnnnnnnnnnnnnnnnnnnnnnnnnnnnnnnnnnnnnnnnnnnnnnnnnnnnnnnnnnnnnnnnnnnnnnnnnnnnnnnnnnnnnnnnnnnnnnnnnnnnnnnnnnnnnnnnnnnnnnnnnnnnnnnnnnnnnnnnnnnnnnnnnnnnnnnnnnnnnnnnnnnnnnnnnnnnnnnnnnnnnnnnnnnnnnnnnnnnnnnnnnnnnnnnnnnnnnnnnnnnnnnnnnnnnnnnnnnnnnnnnnnnnnnnnnnnnnnnnnnnnnnnnnnnnnnnnnnnnnnnnnnnnnnnnnnnnnnnnnnnnnnnnnnnnnnnnnnnnnnnnnnnnnnnnnnnnnnnnnnnnnnnnnnnnnnnnnnnnnnnnnnnnnnnnnnnnnnnnnnnnnnnnnnnnnnnnnnnnnnnnnnnnnnnnnnnnnnnnnnnnnnnnnnnnnnnnnnnnnnnnnnnnnnnnnnnnnnnnnnnnnnnnnnnnnnnnnnnnnnnnnnnnnnnnnnnnnnnnnnnnnnnnnnnnnnnnnnnnnnnnnnnnnnnnnnnnnnnnnnnnnnnnnnnnnnnnnnnnnnnnnnnnnnnnnnnnnnnnnnnnnnnnnnnnnnnnnnnnnnnnnnnnnnnnnnnnnnnnnnnnnnnnnnnnnnnnnnnnnnnnnnnnnnnnnnnnnnnnnnnnnnnnnnnnnnnnnnnnnnnnnnnnnnnnnnnnnnnnnnnnnnnnnnnnnnnnnnnnnnnnnnnnnnnnnnnnnnnnnnnnnnnnnnnnnnnnnnnnnnnnnnnnnnnnnnnnnnnnnnnnnnnnnnnnnnnnnnnnnnnnnnnnnnnnnnnnnnnnnnnnnnnnnnnnnnnnnnnnnnnnnnnnnnnnnnnnnnnnnnnnnnnnnnnnnnnnnnnnnnnnnnnnnnnnnnnnnnnnnnnnnnnnnnnnnnnnnnnnnnnnnnnnnnnnnnnnnnnnnnnnnnnnnnnnnnnnnnnnnnnnnnnnnnnnnnnnnnnnnnnnnnnnnnnnnnnnnnnnnnnnnnnnnnnnnnnnnnnnnnnnnnnnnnnnnnnnnnnnnnnnnnnnnnnnnnnnnnnnnnnnnnnnnnnnnnnnnnnnnnnnnnnnnnnnnnnnnnnnnnnnnnnnnnnnnnnnnnnnnnnnnnnnnnnnnnnnnnnnnnnnnnnnnnnnnnnnnnnnnnnnnnnnnnnnnnnnnnnnnnnnnnnnnnnnnnnnnnnnnnnnnnnnnnnnnnnnnnnnnnnnnnnnnnnnnnnnnnnnnnnnnnnnnnnnnnnnnnnnnnnnnnnnnnnnnnnnnnnnnnnnnnnnnnnnnnnnnnnnnnnnnnnnnnnnnnnnnnnnnnnnnnnnnnnnnnnnnnnnnnnnnnnnnnnnnnnnnnnnnnnnnnnnnnnnnnnnnnnnnnnnnnnnnnnnnnnnnnnnnnnnnnnnnnnnnnnnnnnnnnnnnnnnnnnnnnnnnnnnnnnnnnnnnnnnnnnnnnnnnnnnnnnnnnnnnnnnnnnnnnnnnnnnnnnnnnnnnnnnnnnnnnnnnnnnnnnnnnnnnnnnnnnnnnnnnnnnnnnnnnnnnnnnnnnnnnnnnnnnnnnnnnnnnnnnnnnnnnnnnnnnnnnnnnnnnnnnnnnnnnnnnnnnnnnnnnnnnnnnnnnnnnnnnnnnnnnnnnnnnnnnnnnnnnnnnnnnnnnnnnnnnnnnnnnnnnnnnnnnnnnnnnnnnnnnnnnnnnnnnnnnnnnnnnnnnnnnnnnnnnnnnnnnnnnnnnnnnnnnnnnnnnnnnnnnnnnnnnnnnnnnnnnnnnnnnnnnnnnnnnnnnnnnnnnnnnnnnnnnnnnnnnnnnnnnnnnnnnnnnnnnnnnnnnnnnnnnnnnnnnnnnnnnnnnnnnnnnnnnnnnnnnnnnnnnnnnnnnnnnnnnnnnnnnnnnnnnnnnnnnnnnnnnnnnnnnnnnnnnnnnnnnnnnnnnnnnnnnnnnnnnnnnnnnnnnnnnnnnnnnnnnnnnnnnnnnnnnnnnnnnnnnnnnnnnnnnnnnnnnnnnnnnnnnnnnnnnnnnnnnnnnnnnnnnnnnnnnnnnnnnnnnnnnnnnnnnnnnnnnnnnnnnnnnnnnnnnnnnnnnnnnnnnnnnnnnnnnnnnnnnnnnnnnnnnnnnnnnnnnnnnnnnnnnnnnnnnnnnnnnnnnnnnnnnnnnnnnnnnnnnnnnnnnnnnnnnnnnnnnnnnnnnnnnnnnnnnnnnnnnnnnnnnnnnnnnnnnnnnnnnnnnnnnnnnnnnnnnnnnnnnnnnnnnnnnnnnnnnnnnnnnnnnnnnnnnnnnnnnnnnnnnnnnnnnnnnnnnnnnnnnnnnnnnnnnnnnnnnnnnnnnnnnnnnnnnnnnnnnnnnnnnnnnnnnnnnnnnnnnnnnnnnnnnnnnnnnnnnnnnnnnnnnnnnnnnnnnnnnnnnnnnnnnnnnnnnnnnnnnnnnnnnnnnnnnnnnnnnnnnnnnnnnnnnnnnnnnnnnnnnnnnnnnnnnnnnnnnnnnnnnnnnnnnnnnnnnnnnnnnnnnnnnnnnnnnnnnnnnnnnnnnnnnnnnnnnnnnnnnnnnnnnnnnnnnnnnnnnnnnnnnnnnnnnnnnnnnnnnnnnnnnnnnnnnnnnnnnnnnnnnnnnnnnnnnnnnnnnnnnnnnnnnnnnnnnnnnnnnnnnnnnnnnnnnnnnnnnnnnnnnnnnnnnnnnnnnnnnnnnnnnnnnnnnnnnnnnnnnnnnnnnnnnnnnnnnnnnnnnnnnnnnnnnnnnnnnnnnnnnnnnnnnnnnnnnnnnnnnnnnnnnnnnnnnnnnnnnnnnnnnnnnnnnnnnnnnnnnnnnnnnnnnnnnnnnnnnnnnnnnnnnnnnnnnnnnnnnnnnnnnnnnnnnnnnnnnnnnnnnnnnnnnnnnnnnnnnnnnnnnnnnnnnnnnnnnnnnnnnnnnnnnnnnnnnnnnnnnnnnnnnnnnnnnnnnnnnnnnnnnnnnnnnnnnnnnnnnnnnnnnnnnnnnnnnnnnnnnnnnnnnnnnnnnnnnnnnnnnnnnnnnnnnnnnnnnnnnnnnnnnnnnnnnnnnnnnnnnnnnnnnnnnnnnnnnnnnnnnnnnnnnnnnnnnnnnnnnnnnnnnnnnnnnnnnnnnnnnnnnnnnnnnnnnnnnnnnnnnnnnnnnnnnnnnnnnnnnnnnnnnnnnnnnnnnnnnnnnnnnnnnnnnnnnnnnnnnnnnnnnnnnnnnnnnnnnnnnnnnnnnnnnnnnnnnnnnnnnnnnnnnnnnnnnnnnnnnnnnnnnnnnnnnnnnnnnnnnnnnnnnnnnnnnnnnnnnnnnnnnnnnnnnnnnnnnnnnnnnnnnnnnnnnnnnnnnnnnnnnnnnnnnnnnnnnnnnnnnnnnnnnnnnnnnnnnnnnnnnnnnnnnnnnnnnnnnnnnnnnnnnnnnnnnnnnnnnnnnnnnnnnnnnnnnnnnnnnnnnnnnnnnnnnnnnnnnnnnnnnnnnnnnnnnnnnnnnnnnnnnnnnnnnnnnnnnnnnnnnnnnnnnnnnnnnnnnnnnnnnnnnnnnnnnnnnnnnnnnnnnnnnnnnnnnnnnnnnnnnnnnnnnnnnnnnnnnnnnnnnnnnnnnnnnnnnnnnnnnnnnnnnnnnnnnnnnnnnnnnnnnnnnnnnnnnnnnnnnnnnnnnnnnnnnnnnnnnnnnnnnnnnnnnnnnnnnnnnnnnnnnnnnnnnnnnnnnnnnnnnnnnnnnnnnnnnnnnnnnnnnnnnnnnnnnnnnnnnnnnnnnnnnnnnnnnnnnnnnnnnnnnnnnnnnnnnnnnnnnnnnnnnnnnnnnnnnnnnnnnnnnnnnnnnnnnnnnnnnnnnnnnnnnnnnnnnnnnnnnnnnnnnnnnnnnnnnnnnnnnnnnnnnnnnnnnnnnnnnnnnnnnnnnnnnnnnnnnnnnnnnnnnnnnnnnnnnnnnnnnnnnnnnnnnnnnnnnnnnnnnnnnnnnnnnnnnnnnnnnnnnnnnnnnnnnnnnnnnnnnnnnnnnnnnnnnnnnnnnnnnnnnnnnnnnnnnnnnnnnnnnnnnnnnnnnnnnnnnnnnnnnnnnnnnnnnnnnnnnnnnnnnnnnnnnnnnnnnnnnnnnnnnnnnnnnnnnnnnnnnnnnnnnnnnnnnnnnnnnnnnnnnnnnnnnnnnnnnnnnnnnnnnnnnnnnnnnnnnnnnnnnnnnnnnnnnnnnnnnnnnnnnnnnnnnnnnnnnnnnnnnnnnnnnnnnnnnnnnnnnnnnnnnnnnnnnnnnnnnnnnnnnnnnnnnnnnnnnnnnnnnnnnnnnnnnnnnnnnnnnnnnnnnnnnnnnnnnnnnnnnnnnnnnnnnnnnnnnnnnnnnnnnnnnnnnnnnnnnnnnnnnnnnnnnnnnnnnnnnnnnnnnnnnnnnnnnnnnnnnnnnnnnnnnnnnnnnnnnnnnnnnnnnnnnnnnnnnnnnnnnnnnnnnnnnnnnnnnnnnnnnnnnnnnnnnnnnnnnnnnnnnnnnnnnnnnnnnnnnnnnnnnnnnnnnnnnnnnnnnnnnnnnnnnnnnnnnnnnnnnnnnnnnnnnnnnnnnnnnnnnnnnnnnnnnnnnnnnnnnnnnnnnnnnnnnnnnnnnnnnnnnnnnnnnnnnnnnnnnnnnnnnnnnnnnnnnnnnnnnnnnnnnnnnnnnnnnnnnnnnnnnnnnnnnnnnnnnnnnnnnnnnnnnnnnnnnnnnnnnnnnnnnnnnnnnnnnnnnnnnnnnnnnnnnnnnnnnnnnnnnnnnnnnnnnnnnnnnnnnnnnnnnnnnnnnnnnnnnnnnnnnnnnnnnnnnnnnnnnnnnnnnnnnnnnnnnnnnnnnnnnnnnnnnnnnnnnnnnnnnnnnnnnnnnnnnnnnnnnnnnnnnnnnnnnnnnnnnnnnnnnnnnnnnnnnnnnnnnnnnnnnnnnnnnnnnnnnnnnnnnnnnnnnnnnnnnnnnnnnnnnnnnnnnnnnnnnnnnnnnnnnnnnnnnnnnnnnnnnnnnnnnnnnnnnnnnnnnnnnnnnnnnnnnnnnnnnnnnnnnnnnnnnnnnnnnnnnnnnnnnnnnnnnnnnnnnnnnnnnnnnnnnnnnnnnnnnnnnnnnnnnnnnnnnnnnnnnnnnnnnnnnnnnnnnnnnnnnnnnnnnnnnnnnnnnnnnnnnnnnnnnnnnnnnnnnnnnnnnnnnnnnnnnnnnnnnnnnnnnnnnnnnnnnnnnnnnnnnnnnnnnnnnnnnnnnnnnnnnnnnnnnnnnnnnnnnnnnnnnnnnnnnnnnnnnnnnnnnnnnnnnnnnnnnnnnnnnnnnnnnnnnnnnnnnnnnnnnnnnnnnnnnnnnnnnnnnnnnnnnnnnnnnnnnnnnnnnnnnnnnnnnnnnnnnnnnnnnnnnnnnnnnnnnnnnnnnnnnnnnnnnnnnnnnnnnnnnnnnnnnnnnnnnnnnnnnnnnnnnnnnnnnnnnnnnnnnnnnnnnnnnnnnnnnnnnnnnnnnnnnnnnnnnnnnnnnnnnnnnnnnnnnnnnnnnnnnnnnnnnnnnnnnnnnnnnnnnnnnnnnnnnnnnnnnnnnnnnnnnnnnnnnnnnnnnnnnnnnnnnnnnnnnnnnnnnnnnnnnnnnnnnnnnnnnnnnnnnnnnnnnnnnnnnnnnnnnnnnnnnnnnnnnnnnnnnnnnnnnnnnnnnnnnnnnnnnnnnnnnnnnnnnnnnnnnnnnnnnnnnnnnnnnnnnnnnnnnnnnnnnnnnnnnnnnnnnnnnnnnnnnnnnnnnnnnnnnnnnnnnnnnnnnnnnnnnnnnnnnnnnnnnnnnnnnnnnnnnnnnnnnnnnnnnnnnnnnnnnnnnnnnnnnnnnnnnnnnnnnnnnnnnnnnnnnnnnnnnnnnnnnnnnnnnnnnnnnnnnnnnnnnnnnnnnnnnnnnnnnnnnnnnnnnnnnnnnnnnnnnnnnnnnnnnnnnnnnnnnnnnnnnnnnnnnnnnnnnnnnnnnnnnnnnnnnnnnnnnnnnnnnnnnnnnnnnnnnnnnnnnnnnnnnnnnnnnnnnnnnnnnnnnnnnnnnnnnnnnnnnnnnnnnnnnnnnnnnnnnnnnnnnnnnnnnnnnnnnnnnnnnnnnnnnnnnnnnnnnnnnnnnnnnnnnnnnnnnnnnnnnnnnnnnnnnnnnnnnnnnnnnnnnnnnnnnnnnnnnnnnnnnnnnnnnnnnnnnnnnnnnnnnnnnnnnnnnnnnnnnnnnnnnnnnnnnnnnnnnnnnnnnnnnnnnnnnnnnnnnnnnnnnnnnnnnnnnnnnnnnnnnnnnnnnnnnnnnnnnnnnnnnnnnnnnnnnnnnnnnnnnnnnnnnnnnnnnnnnnnnnnnnnnnnnnnnnnnnnnnnnnnnnnnnnnnnnnnnnnnnnnnnnnnnnnnnnnnnnnnnnnnnnnnnnnnnnnnnnnnnnnnnnnnnnnnnnnnnnnnnnnnnnnnnnnnnnnnnnnnnnnnnnnnnnnnnnnnnnnnnnnnnnnnnnnnnnnnnnnnnnnnnnnnnnnnnnnnnnnnnnnnnnnnnnnnnnnnnnnnnnnnnnnnnnnnnnnnnnnnnnnnnnnnnnnnnnnnnnnnnnnnnnnnnnnnnnnnnnnnnnnnnnnnnnnnnnnnnnnnnnnnnnnnnnnnnnnnnnnnnnnnnnnnnnnnnnnnnnnnnnnnnnnnnnnnnnnnnnnnnnnnnnnnnnnnnnnnnnnnnnnnnnnnnnnnnnnnnnnnnnnnnnnnnnnnnnnnnnnnnnnnnnnnnnnnnnnnnnnnnnnnnnnnnnnnnnnnnnnnnnnnnnnnnnnnnnnnnnnnnnnnnnnnnnnnnnnnnnnnnnnnnnnnnnnnnnnnnnnnnnnnnnnnnnnnnnnnnnnnnnnnnnnnnnnnnnnnnnnnnnnnnnnnnnnnnnnnnnnnnnnnnnnnnnnnnnnnnnnnnnnnnnnnnnnnnnnnnnnnnnnnnnnnnnnnnnnnnnnnnnnnnnnnnnnnnnnnnnnnnnnnnnnnnnnnnnnnnnnnnnnnnnnnnnnnnnnnnnnnnnnnnnnnnnnnnnnnnnnnnnnnnnnnnnnnnnnnnnnnnnnnnnnnnnnnnnnnnnnnnnnnnnnnnnnnnnnnnnnnnnnnnnnnnnnnnnnnnnnnnnnnnnnnnnnnnnnnnnnnnnnnnnnnnnnnnnnnnnnnnnnnnnnnnnnnnnnnnnnnnnnnnnnnnnnnnnnnnnnnnnnnnnnnnnnnnnnnnnnnnnnnnnnnnnnnnnnnnnnnnnnnnnnnnnnnnnnnnnnnnnnnnnnnnnnnnnnnnnnnnnnnnnnnnnnnnnnnnnnnnnnnnnnnnnnnnnnnnnnnnnnnnnnnnnnnnnnnnnnnnnnnnnnnnnnnnnnnnnnnnnnnnnnnnnnnnnnnnnnnnnnnnnnnnnnnnnnnnnnnnnnnnnnnnnnnnnnnnnnnnnnnnnnnnnnnnnnnnnnnnnnnnnnnnnnnnnnnnnnnnnnnnnnnnnnnnnnnnnnnnnnnnnnnnnnnnnnnnnnnnnnnnnnnnnnnnnnnnnnnnnnnnnnnnnnnnnnnnnnnnnnnnnnnnnnnnnnnnnnnnnnnnnnnnnnnnnnnnnnnnnnnnnnnnnnnnnnnnnnnnnnnnnnnnnnnnnnnnnnnnnnnnnnnnnnnnnnnnnnnnnnnnnnnnnnnnnnnnnnnnnnnnnnnnnnnnnnnnnnnnnnnnnnnnnnnnnnnnnnnnnnnnnnnnnnnnnnnnnnnnnnnnnnnnnnnnnnnnnnnnnnnnnnnnnnnnnnnnnnnnnnnnnnnnnnnnnnnnnnnnnnnnnnnnnnnnnnnnnnnnnnnnnnnnnnnnnnnnnnnnnnnnnnnnnnnnnnnnnnnnnnnnnnnnnnnnnnnnnnnnnnnnnnnnnnnnnnnnnnnnnnnnnnnnnnnnnnnnnnnnnnnnnnnnnnnnnnnnnnnnnnnnnnnnnnnnnnnnnnnnnnnnnnnnnnnnnnnnnnnnnnnnnnnnnnnnnnnnnnnnnnnnnnnnnnnnnnnnnnnnnnnnnnnnnnnnnnnnnnnnnnnnnnnnnnnnnnnnnnnnnnnnnnnnnnnnnnnnnnnnnnnnnnnnnnnnnnnnnnnnnnnnnnnnnnnnnnnnnnnnnnnnnnnnnnnnnnnnnnnnnnnnnnnnnnnnnnnnnnnnnnnnnnnnnnnnnnnnnnnnnnnnnnnnnnnnnnnnnnnnnnnnnnnnnnnnnnnnnnnnnnnnnnnnnnnnnnnnnnnnnnnnnnnnnnnnnnnnnnnnnnnnnnnnnnnnnnnnnnnnnnnnnnnnnnnnnnnnnnnnnnnnnnnnnnnnnnnnnnnnnnnnnnnnnnnnnnnnnnnnnnnnnnnnnnnnnnnnnnnnnnnnnnnnnnnnnnnnnnnnnnnnnnnnnnnnnnnnnnnnnnnnnnnnnnnnnnnnnnnnnnnnnnnnnnnnnnnnnnnnnnnnnnnnnnnnnnnnnnnnnnnnnnnnnnnnnnnnnnnnnnnnnnnnnnnnnnnnnnnnnnnnnnnnnnnnnnnnnnnnnnnnnnnnnnnnnnnnnnnnnnnnnnnnnnnnnnnnnnnnnnnnnnnnnnnnnnnnnnnnnnnnnnnnnnnnnnnnnnnnnnnnnnnnnnnnnnnnnnnnnnnnnnnnnnnnnnnnnnnnnnnnnnnnnnnnnnnnnnnnnnnnnnnnnnnnnnnnnnnnnnnnnnnnnnnnnnnnnnnnnnnnnnnnnnnnnnnnnnnnnnnnnnnnnnnnnnnnnnnnnnnnnnnnnnnnnnnnnnnnnnnnnnnnnnnnnnnnnnnnnnnnnnnnnnnnnnnnnnnnnnnnnnnnnnnnnnnnnnnnnnnnnnnnnnnnnnnnnnnnnnnnnnnnnnnnnnnnnnnnnnnnnnnnnnnnnnnnnnnnnnnnnnnnnnnnnnnnnnnnnnnnnnnnnnnnnnnnnnnnnnnnnnnnnnnnnnnnnnnnnnnnnnnnnnnnnnnnnnnnnnnnnnnnnnnnnnnnnnnnnnnnnnnnnnnnnnnnnnnnnnnnnnnnnnnnnnnnnnnnnnnnnnnnnnnnnnnnnnnnnnnnnnnnnnnnnnnnnnnnnnnnnnnnnnnnnnnnnnnnnnnnnnnnnnnnnnnnnnnnnnnnnnnnnnnnnnnnnnnnnnnnnnnnnnnnnnnnnnnnnnnnnnnnnnnnnnnnnnnnnnnnnnnnnnnnnnnnnnnnnnnnnnnnnnnnnnnnnnnnnnnnnnnnnnnnnnnnnnnnnnnnnnnnnnnnnnnnnnnnnnnnnnnnnnnnnnnnnnnnnnnnnnnnnnnnnnnnnnnnnnnnnnnnnnnnnnnnnnnnnnnnnnnnnnnnnnnnnnnnnnnnnnnnnnnnnnnnnnnnnnnnnnnnnnnnnnnnnnnnnnnnnnnnnnnnnnnnnnnnnnnnnnnnnnnnnnnnnnnnnnnnnnnnnnnnnnnnnnnnnnnnnnnnnnnnnnnnnnnnnnnnnnnnnnnnnnnnnnnnnnnnnnnnnnnnnnnnnnnnnnnnnnnnnnnnnnnnnnnnnnnnnnnnnnnnnnnnnnnnnnnnnnnnnnnnnnnnnnnnnnnnnnnnnnnnnnnnnnnnnnnnnnnnnnnnnnnnnnnnnnnnnnnnnnnnnnnnnnnnnnnnnnnnnnnnnnnnnnnnnnnnnnnnnnnnnnnnnnnnnnnnnnnnnnnnnnnnnnnnnnnnnnnnnnnnnnnnnnnnnnnnnnnnnnnnnnnnnnnnnnnnnnnnnnnnnnnnnnnnnnnnnnnnnnnnnnnnnnnnnnnnnnnnnnnnnnnnnnnnnnnnnnnnnnnnnnnnnnnnnnnnnnnnnnnnnnnnnnnnnnnnnnnnnnnnnnnnnnnnnnnnnnnnnnnnnnnnnnnnnnnnnnnnnnnnnnnnnnnnnnnnnnnnnnnnnnnnnnnnnnnnnnnnnnnnnnnnnnnnnnnnnnnnnnnnnnnnnnnnnnnnnnnnnnnnnnnnnnnnnnnnnnnnnnnnnnnnnnnnnnnnnnnnnnnnnnnnnnnnnnnnnnnnnnnnnnnnnnnnnnnnnnnnnnnnnnnnnnnnnnnnnnnnnnnnnnnnnnnnnnnnnnnnnnnnnnnnnnnnnnnnnnnnnnnnnnnnnnnnnnnnnnnnnnnnnnnnnnnnnnnnnnnnnnnnnnnnnnnnnnnnnnnnnnnnnnnnnnnnnnnnnnnnnnnnnnnnnnnnnnnnnnnnnnnnnnnnnnnnnnnnnnnnnnnnnnnnnnnnnnnnnnnnnnnnnnnnnnnnnnnnnnnnnnnnnnnnnnnnnnnnnnnnnnnnnnnnnnnnnnnnnnnnnnnnnnnnnnnnnnnnnnnnnnnnnnnnnnnnnnnnnnnnnnnnnnnnnnnnnnnnnnnnnnnnnnnnnnnnnnnnnnnnnnnnnnnnnnnnnnnnnnnnnnnnnnnnnnnnnnnnnnnnnnnnnnnnnnnnnnnnnnnnnnnnnnnnnnnnnnnnnnnnnnnnnnnnnnnnnnnnnnnnnnnnnnnnnnnnnnnnnnnnnnnnnnnnnnnnnnnnnnnnnnnnnnnnnnnnnnnnnnnnnnnnnnnnnnnnnnnnnnnnnnnnnnnnnnnnnnnnnnnnnnnnnnnnnnnnnnnnnnnnnnnnnnnnnnnnnnnnnnnnnnnnnnnnnnnnnnnnnnnnnnnnnnnnnnnnnnnnnnnnnnnnnnnnnnnnnnnnnnnnnnnnnnnnnnnnnnnnnnnnnnnnnnnnnnnnnnnnnnnnnnnnnnnnnnnnnnnnnnnnnnnnnnnnnnnnnnnnnnnnnnnnnnnnnnnnnnnnnnnnnnnnnnnnnnnnnnnnnnnnnnnnnnnnnnnnnnnnnnnnnnnnnnnnnnnnnnnnnnnnnnnnnnnnnnnnnnnnnnnnnnnnnnnnnnnnnnnnnnnnnnnnnnnnnnnnnnnnnnnnnnnnnnnnnnnnnnnnnnnnnnnnnnnnnnnnnnnnnnnnnnnnnnnnnnnnnnnnnnnnnnnnnnnnnnnnnnnnnnnnnnnnnnnnnnnnnnnnnnnnnnnnnnnnnnnnnnnnnnnnnnnnnnnnnnnnnnnnnnnnnnnnnnnnnnnnnnnnnnnnnnnnnnnnnnnnnnnnnnnnnnnnnnnnnnnnnnnnnnnnnnnnnnnnnnnnnnnnnnnnnnnnnnnnnnnnnnnnnnnnnnnnnnnnnnnnnnnnnnnnnnnnnnnnnnnnnnnnnnnnnnnnnnnnnnnnnnnnnnnnnnnnnnnnnnnnnnnnnnnnnnnnnnnnnnnnnnnnnnnnnnnnnnnnnnnnnnnnnnnnnnnnnnnnnnnnnnnnnnnnnnnnnnnnnnnnnnnnnnnnnnnnnnnnnnnnnnnnnnnnnnnnnnnnnnnnnnnnnnnnnnnnnnnnnnnnnnnnnnnnnnnnnnnnnnnnnnnnnnnnnnnnnnnnnnnnnnnnnnnnnnnnnnnnnnnnnnnnnnnnnnnnnnnnnnnnnnnnnnnnnnnnnnnnnnnnnnnnnnnnnnnnnnnnnnnnnnnnnnnnnnnnnnnnnnnnnnnnnnnnnnnnnnnnnnnnnnnnnnnnnnnnnnnnnnnnnnnnnnnnnnnnnnnnnnnnnnnnnnnnnnnnnnnnnnnnnnnnnnnnnnnnnnnnnnnnnnnnnnnnnnnnnnnnnnnnnnnnnnnnnnnnnnnnnnnnnnnnnnnnnnnnnnnnnnnnnnnnnnnnnnnnnnnnnnnnnnnnnnnnnnnnnnnnnnnnnnnnnnnnnnnnnnnnnnnnnnnnnnnnnnnnnnnnnnnnnnnnnnnnnnnnnnnnnnnnnnnnnnnnnnnnnnnnnnnnnnnnnnnnnnnnnnnnnnnnnnnnnnnnnnnnnnnnnnnnnnnnnnnnnnnnnnnnnnnnnnnnnnnnnnnnnnnnnnnnnnnnnnnnnnnnnnnnnnnnnnnnnnnnnnnnnnnnnnnnnnnnnnnnnnnnnnnnnnnnnnnnnnnnnnnnnnnnnnnnnnnnnnnnnnnnnnnnnnnnnnnnnnnnnnnnnnnnnnnnnnnnnnnnnnnnnnnnnnnnnnnnnnnnnnnnnnnnnnnnnnnnnnnnnnnnnnnnnnnnnnnnnnnnnnnnnnnnnnnnnnnnnnnnnnnnnnnnnnnnnnnnnnnnnnnnnnnnnnnnnnnnnnnnnnnnnnnnnnnnnnnnnnnnnnnnnnnnnnnnnnnnnnnnnnnnnnnnnnnnnnnnnnnnnnnnnnnnnnnnnnnnnnnnnnnnnnnnnnnnnnnnnnnnnnnnnnnnnnnnnnnnnnnnnnnnnnnnnnnnnnnnnnnnnnnnnnnnnnnnnnnnnnnnnnnnnnnnnnnnnnnnnnnnnnnnnnnnnnnnnnnnnnnnnnnnnnnnnnnnnnnnnnnnnnnnnnnnnnnnnnnnnnnnnnnnnnnnnnnnnnnnnnnnnnnnnnnnnnnnnnnnnnnnnnnnnnnnnnnnnnnnnnnnnnnnnnnnnnnnnnnnnnnnnnnnnnnnnnnnnnnnnnnnnnnnnnnnnnnnnnnnnnnnnnnnnnnnnnnnnnnnnnnnnnnnnnnnnnnnnnnnnnnnnnnnnnnnnnnnnnnnnnnnnnnnnnnnnnnnnnnnnnnnnnnnnnnnnnnnnnnnnnnnnnnnnnnnnnnnnnnnnnnnnnnnnnnnnnnnnnnnnnnnnnnnnnnnnnnnnnnnnnnnnnnnnnnnnnnnnnnnnnnnnnnnnnnnnnnnnnnnnnnnnnnnnnnnnnnnnnnnnnnnnnnnnnnnnnnnnnnnnnnnnnnnnnnnnnnnnnnnnnnnnnnnnnnnnnnnnnnnnnnnnnnnnnnnnnnnnnnnnnnnnnnnnnnnnnnnnnnnnnnnnnnnnnnnnnnnnnnnnnnnnnnnnnnnnnnnnnnnnnnnnnnnnnnnnnnnnnnnnnnnnnnnnnnnnnnnnnnnnnnnnnnnnnnnnnnnnnnnnnnnnnnnnnnnnnnnnnnnnnnnnnnnnnnnnnnnnnnnnnnnnnnnnnnnnnnnnnnnnnnnnnnnnnnnnnnnnnnnnnnnnnnnnnnnnnnnnnnnnnnnnnnnnnnnnnnnnnnnnnnnnnnnnnnnnnnnnnnnnnnnnnnnnnnnnnnnnnnnnnnnnnnnnnnnnnnnnnnnnnnnnnnnnnnnnnnnnnnnnnnnnnnnnnnnnnnnnnnnnnnnnnnnnnnnnnnnnnnnnnnnnnnnnnnnnnnnnnnnnnnnnnnnnnnnnnnnnnnnnnnnnnnnnnnnnnnnnnnnnnnnnnnnnnnnnnnnnnnnnnnnnnnnnnnnnnnnnnnnnnnnnnnnnnnnnnnnnnnnnnnnnnnnnnnnnnnnnnnnnnnnnnnnnnnnnnnnnnnnnnnnnnnnnnnnnnnnnnnnnnnnnnnnnnnnnnnnnnnnnnnnnnnnnnnnnnnnnnnnnnnnnnnnnnnnnnnnnnnnnnnnnnnnnnnnnnnnnnnnnnnnnnnnnnnnnnnnnnnnnnnnnnnnnnnnnnnnnnnnnnnnnnnnnnnnnnnnnnnnnnnnnnnnnnnnnnnnnnnnnnnnnnnnnnnnnnnnnnnnnnnnnnnnnnnnnnnnnnnnnnnnnnnnnnnnnnnnnnnnnnnnnnnnnnnnnnnnnnnnnnnnnnnnnnnnnnnnnnnnnnnnnnnnnnnnnnnnnnnnnnnnnnnnnnnnnnnnnnnnnnnnnnnnnnnnnnnnnnnnnnnnnnnnnnnnnnnnnnnnnnnnnnnnnnnnnnnnnnnnnnnnnnnnnnnnnnnnnnnnnnnnnnnnnnnnnnnnnnnnnnnnnnnnnnnnnnnnnnnnnnnnnnnnnnnnnnnnnnnnnnnnnnnnnnnnnnnnnnnnnnnnnnnnnnnnnnnnnnnnnnnnnnnnnnnnnnnnnnnnnnnnnnnnnnnnnnnnnnnnnnnnnnnnnnnnnnnnnnnnnnnnnnnnnnnnnnnnnnnnnnnnnnnnnnnnnnnnnnnnnnnnnnnnnnnnnnnnnnnnnnnnnnnnnnnnnnnnnnnnnnnnnnnnnnnnnnnnnnnnnnnnnnnnnnnnnnnnnnnnnnnnnnnnnnnnnnnnnnnnnnnnnnnnnnnnnnnnnnnnnnnnnnnnnnnnnnnnnnnnnnnnnnnnnnnnnnnnnnnnnnnnnnnnnnnnnnnnnnnnnnnnnnnnnnnnnnnnnnnnnnnnnnnnnnnnnnnnnnnnnnnnnnnnnnnnnnnnnnnnnnnnnnnnnnnnnnnnnnnnnnnnnnnnnnnnnnnnnnnnnnnnnnnnnnnnnnnnnnnnnnnnnnnnnnnnnnnnnnnnnnnnnnnnnnnnnnnnnnnnnnnnnnnnnnnnnnnnnnnnnnnnnnnnnnnnnnnnnnnnnnnnnnnnnnnnnnnnnnnnnnnnnnnnnnnnnnnnnnnnnnnnnnnnnnnnnnnnnnnnnnnnnnnnnnnnnnnnnnnnnnnnnnnnnnnnnnnnnnnnnnnnnnnnnnnnnnnnnnnnnnnnnnnnnnnnnnnnnnnnnnnnnnnnnnnnnnnnnnnnnnnnnnnnnnnnnnnnnnnnnnnnnnnnnnnnnnnnnnnnnnnnnnnnnnnnnnnnnnnnnnnnnnnnnnnnnnnnnnnnnnnnnnnnnnnnnnnnnnnnnnnnnnnnnnnnnnnnnnnnnnnnnnnnnnnnnnnnnnnnnnnnnnnnnnnnnnnnnnnnnnnnnnnnnnnnnnnnnnnnnnnnnnnnnnnnnnnnnnnnnnnnnnnnnnnnnnnnnnnnnnnnnnnnnnnnnnnnnnnnnnnnnnnnnnnnnnnnnnnnnnnnnnnnnnnnnnnnnnnnnnnnnnnnnnnnnnnnnnnnnnnnnnnnnnnnnnnnnnnnnnnnnnnnnnnnnnnnnnnnnnnnnnnnnnnnnnnnnnnnnnnnnnnnnnnnnnnnnnnnnnnnnnnnnnnnnnnnnnnnnnnnnnnnnnnnnnnnnnnnnnnnnnnnnnnnnnnnnnnnnnnnnnnnnnnnnnnnnnnnnnnnnnnnnnnnnnnnnnnnnnnnnnnnnnnnnnnnnnnnnnnnnnnnnnnnnnnnnnnnnnnnnnnnnnnnnnnnnnnnnnnnnnnnnnnnnnnnnnnnnnnnnnnnnnnnnnnnnnnnnnnnnnnnnnnnnnnnnnnnnnnnnnnnnnnnnnnnnnnnnnnnnnnnnnnnnnnnnnnnnnnnnnnnnnnnnnnnnnnnnnnnnnnnnnnnnnnnnnnnnnnnnnnnnnnnnnnnnnnnnnnnnnnnnnnnnnnnnnnnnnnnnnnnnnnnnnnnnnnnnnnnnnnnnnnnnnnnnnnnnnnnnnnnnnnnnnnnnnnnnnnnnnnnnnnnnnnnnnnnnnnnnnnnnnnnnnnnnnnnnnnnnnnnnnnnnnnnnnnnnnnnnnnnnnnnnnnnnnnnnnnnnnnnnnnnnnnnnnnnnnnnnnnnnnnnnnnnnnnnnnnnnnnnnnnnnnnnnnnnnnnnnnnnnnnnnnnnnnnnnnnnnnnnnnnnnnnnnnnnnnnnnnnnnnnnnnnnnnnnnnnnnnnnnnnnnnnnnnnnnnnnnnnnnnnnnnnnnnnnnnnnnnnnnnnnnnnnnnnnnnnnnnnnnnnnnnnnnnnnnnnnnnnnnnnnnnnnnnnnnnnnnnnnnnnnnnnnnnnnnnnnnnnnnnnnnnnnnnnnnnnnnnnnnnnnnnnnnnnnnnnnnnnnnnnnnnnnnnnnnnnnnnnnnnnnnnnnnnnnnnnnnnnnnnnnnnnnnnnnnnnnnnnnnnnnnnnnnnnnnnnnnnnnnnnnnnnnnnnnnnnnnnnnnnnnnnnnnnnnnnnnnnnnnnnnnnnnnnnnnnnnnnnnnnnnnnnnnnnnnnnnnnnnnnnnnnnnnnnnnnnnnnnnnnnnnnnnnnnnnnnnnnnnnnnnnnnnnnnnnnnnnnnnnnnnnnnnnnnnnnnnnnnnnnnnnnnnnnnnnnnnnnnnnnnnnnnnnnnnnnnnnnnnnnnnnnnnnnnnnnnnnnnnnnnnnnnnnnnnnnnnnnnnnnnnnnnnnnnnnnnnnnnnnnnnnnnnnnnnnnnnnnnnnnnnnnnnnnnnnnnnnnnnnnnnnnnnnnnnnnnnnnnnnnnnnnnnnnnnnnnnnnnnnnnnnnnnnnnnnnnnnnnnnnnnnnnnnnnnnnnnnnnnnnnnnnnnnnnnnnnnnnnnnnnnnnnnnnnnnnnnnnnnnnnnnnnnnnnnnnnnnnnnnnnnnnnnnnnnnnnnnnnnnnnnnnnnnnnnnnnnnnnnnnnnnnnnnnnnnnnnnnnnnnnnnnnnnnnnnnnnnnnnnnnnnnnnnnnnnnnnnnnnnnnnnnnnnnnnnnnnnnnnnnnnnnnnnnnnnnnnnnnnnnnnnnnnnnnnnnnnnnnnnnnnnnnnnnnnnnnnnnnnnnnnnnnnnnnnnnnnnnnnnnnnnnnnnnnnnnnnnnnnnnnnnnnnnnnnnnnnnnnnnnnnnnnnnnnnnnnnnnnnnnnnnnnnnnnnnnnnnnnnnnnnnnnnnnnnnnnnnnnnnnnnnnnnnnnnnnnnnnnnnnnnnnnnnnnnnnnnnnnnnnnnnnnnnnnnnnnnnnnnnnnnnnnnnnnnnnnnnnnnnnnnnnnnnnnnnnnnnnnnnnnnnnnnnnnnnnnnnnnnnnnnnnnnnnnnnnnnnnnnnnnnnnnnnnnnnnnnnnnnnnnnnnnnnnnnnnnnnnnnnnnnnnnnnnnnnnnnnnnnnnnnnnnnnnnnnnnnnnnnnnnnnnnnnnnnnnnnnnnnnnnnnnnnnnnnnnnnnnnnnnnnnnnnnnnnnnnnnnnnnnnnnnnnnnnnnnnnnnnnnnnnnnnnnnnnnnnnnnnnnnnnnnnnnnnnnnnnnnnnnnnnnnnnnnnnnnnnnnnnnnnnnnnnnnnnnnnnnnnnnnnnnnnnnnnnnnnnnnnnnnnnnnnnnnnnnnnnnnnnnnnnnnnnnnnnnnnnnnnnnnnnnnnnnnnnnnnnnnnnnnnnnnnnnnnnnnnnnnnnnnnnnnnnnnnnnnnnnnnnnnnnnnnnnnnnnnnnnnnnnnnnnnnnnnnnnnnnnnnnnnnnnnnnnnnnnnnnnnnnnnnnnnnnnnnnnnnnnnnnnnnnnnnnnnnnnnnnnnnnnnnnnnnnnnnnnnnnnnnnnnnnnnnnnnnnnnnnnnnnnnnnnnnnnnnnnnnnnnnnnnnnnnnnnnnnnnnnnnnnnnnnnnnnnnnnnnnnnnnnnnnnnnnnnnnnnnnnnnnnnnnnnnnnnnnnnnnnnnnnnnnnnnnnnnnnnnnnnnnnnnnnnnnnnnnnnnnnnnnnnnnnnnnnnnnnnnnnnnnnnnnnnnnnnnnnnnnnnnnnnnnnnnnnnnnnnnnnnnnnnnnnnnnnnnnnnnnnnnnnnnnnnnnnnnnnnnnnnnnnnnnnnnnnnnnnnnnnnnnnnnnnnnnnnnnnnnnnnnnnnnnnnnnnnnnnnnnnnnnnnnnnnnnnnnnnnnnnnnnnnnnnnnnnnnnnnnnnnnnnnnnnnnnnnnnnnnnnnnnnnnnnnnnnnnnnnnnnnnnnnnnnnnnnnnnnnnnnnnnnnnnnnnnnnnnnnnnnnnnnnnnnnnnnnnnnnnnnnnnnnnnnnnnnnnnnnnnnnnnnnnnnnnnnnnnnnnnnnnnnnnnnnnnnnnnnnnnnnnnnnnnnnnnnnnnnnnnnnnnnnnnnnnnnnnnnnnnnnnnnnnnnnnnnnnnnnnnnnnnnnnnnnnnnnnnnnnnnnnnnnnnnnnnnnnnnnnnnnnnnnnnnnnnnnnnnnnnnnnnnnnnnnnnnnnnnnnnnnnnnnnnnnnnnnnnnnnnnnnnnnnnnnnnnnnnnnnnnnnnnnnnnnnnnnnnnnnnnnnnnnnnnnnnnnnnnnnnnnnnnnnnnnnnnnnnnnnnnnnnnnnnnnnnnnnnnnnnnnnnnnnnnnnnnnnnnnnnnnnnnnnnnnnnnnnnnnnnnnnnnnnnnnnnnnnnnnnnnnnnnnnnnnnnnnnnnnnnnnnnnnnnnnnnnnnnnnnnnnnnnnnnnnnnnnnnnnnnnnnnnnnnnnnnnnnnnnnnnnnnnnnnnnnnnnnnnnnnnnnnnnnnnnnnnnnnnnnnnnnnnnnnnnnnnnnnnnnnnnnnnnnnnnnnnnnnnnnnnnnnnnnnnnnnnnnnnnnnnnnnnnnnnnnnnnnnnnnnnnnnnnnnnnnnnnnnnnnnnnnnnnnnnnnnnnnnnnnnnnnnnnnnnnnnnnnnnnnnnnnnnnnnnnnnnnnnnnnnnnnnnnnnnnnnnnnnnnnnnnnnnnnnnnnnnnnnnnnnnnnnnnnnnnnnnnnnnnnnnnnnnnnnnnnnnnnnnnnnnnnnnnnnnnnnnnnnnnnnnnnnnnnnnnnnnnnnnnnnnnnnnnnnnnnnnnnnnnnnnnnnnnnnnnnnnnnnnnnnnnnnnnnnnnnnnnnnnnnnnnnnnnnnnnnnnnnnnnnnnnnnnnnnnnnnnnnnnnnnnnnnnnnnnnnnnnnnnnnnnnnnnnnnnnnnnnnnnnnnnnnnnnnnnnnnnnnnnnnnnnnnnnnnnnnnnnnnnnnnnnnnnnnnnnnnnnnnnnnnnnnnnnnnnnnnnnnnnnnnnnnnnnnnnnnnnnnnnnnnnnnnnnnnnnnnnnnnnnnnnnnnnnnnnnnnnnnnnnnnnnnnnnnnnnnnnnnnnnnnnnnnnnnnnnnnnnnnnnnnnnnnnnnnnnnnnnnnnnnnnnnnnnnnnnnnnnnnnnnnnnnnnnnnnnnnnnnnnnnnnnnnnnnnnnnnnnnnnnnnnnnnnnnnnnnnnnnnnnnnnnnnnnnnnnnnnnnnnnnnnnnnnnnnnnnnnnnnnnnnnnnnnnnnnnnnnnnnnnnnnnnnnnnnnnnnnnnnnnnnnnnnnnnnnnnnnnnnnnnnnnnnnnnnnnnnnnnnnnnnnnnnnnnnnnnnnnnnnnnnnnnnnnnnnnnnnnnnnnnnnnnnnnnnnnnnnnnnnnnnnnnnnnnnnnnnnnnnnnnnnnnnnnnnnnnnnnnnnnnnnnnnnnnnnnnnnnnnnnnnnnnnnnnnnnnnnnnnnnnnnnnnnnnnnnnnnnnnnnnnnnnnnnnnnnnnnnnnnnnnnnnnnnnnnnnnnnnnnnnnnnnnnnnnnnnnnnnnnnnnnnnnnnnnnnnnnnnnnnnnnnnnnnnnnnnnnnnnnnnnnnnnnnnnnnnnnnnnnnnnnnnnnnnnnnnnnnnnnnnnnnnnnnnnnnnnnnnnnnnnnnnnnnnnnnnnnnnnnnnnnnnnnnnnnnnnnnnnnnnnnnnnnnnnnnnnnnnnnnnnnnnnnnnnnnnnnnnnnnnnnnnnnnnnnnnnnnnnnnnnnnnnnnnnnnnnnnnnnnnnnnnnnnnnnnnnnnnnnnnnnnnnnnnnnnnnnnnnnnnnnnnnnnnnnnnnnnnnnnnnnnnnnnnnnnnnnnnnnnnnnnnnnnnnnnnnnnnnnnnnnnnnnnnnnnnnnnnnnnnnnnnnnnnnnnnnnnnnnnnnnnnnnnnnnnnnnnnnnnnnnnnnnnnnnnnnnnnnnnnnnnnnnnnnnnnnnnnnnnnnnnnnnnnnnnnnnnnnnnnnnnnnnnnnnnnnnnnnnnnnnnnnnnnnnnnnnnnnnnnnnnnnnnnnnnnnnnnnnnnnnnnnnnnnnnnnnnnnnnnnnnnnnnnnnnnnnnnnnnnnnnnnnnnnnnnnnnnnnnnnnnnnnnnnnnnnnnnnnnnnnnnnnnnnnnnnnnnnnnnnnnnnnnnnnnnnnnnnnnnnnnnnnnnnnnnnnnnnnnnnnnnnnnnnnnnnnnnnnnnnnnnnnnnnnnnnnnnnnnnnnnnnnnnnnnnnnnnnnnnnnnnnnnnnnnnnnnnnnnnnnnnnnnnnnnnnnnnnnnnnnnnnnnnnnnnnnnnnnnnnnnnnnnnnnnnnnnnnnnnnnnnnnnnnnnnnnnnnnnnnnnnnnnnnnnnnnnnnnnnnnnnnnnnnnnnnnnnnnnnnnnnnnnnnnnnnnnnnnnnnnnnnnnnnnnnnnnnnnnnnnnnnnnnnnnnnnnnnnnnnnnnnnnnnnnnnnnnnnnnnnnnnnnnnnnnnnnnnnnnnnnnnnnnnnnnnnnnnnnnnnnnnnnnnnnnnnnnnnnnnnnnnnnnnnnnnnnnnnnnnnnnnnnnnnnnnnnnnnnnnnnnnnnnnnnnnnnnnnnnnnnnnnnnnnnnnnnnnnnnnnnnnnnnnnnnnnnnnnnnnnnnnnnnnnnnnnnnnnnnnnnnnnnnnnnnnnnnnnnnnnnnnnnnnnnnnnnnnnnnnnnnnnnnnnnnnnnnnnnnnnnnnnnnnnnnnnnnnnnnnnnnnnnnnnnnnnnnnnnnnnnnnnnnnnnnnnnnnnnnnnnnnnnnnnnnnnnnnnnnnnnnnnnnnnnnnnnnnnnnnnnnnnnnnnnnnnnnnnnnnnnnnnnnnnnnnnnnnnnnnnnnnnnnnnnnnnnnnnnnnnnnnnnnnnnnnnnnnnnnnnnnnnnnnnnnnnnnnnnnnnnnnnnnnnnnnnnnnnnnnnnnnnnnnnnnnnnnnnnnnnnnnnnnnnnnnnnnnnnnnnnnnnnnnnnnnnnnnnnnnnnnnnnnnnnnnnnnnnnnnnnnnnnnnnnnnnnnnnnnnnnnnnnnnnnnnnnnnnnnnnnnnnnnnnnnnnnnnnnnnnnnnnnnnnnnnnnnnnnnnnnnnnnnnnnnnnnnnnnnnnnnnnnnnnnnnnnnnnnnnnnnnnnnnnnnnnnnnnnnnnnnnnnnnnnnnnnnnnnnnnnnnnnnnnnnnnnnnnnnnnnnnnnnnnnnnnnnnnnnnnnnnnnnnnnnnnnnnnnnnnnnnnnnnnnnnnnnnnnnnnnnnnnnnnnnnnnnnnnnnnnnnnnnnnnnnnnnnnnnnnnnnnnnnnnnnnnnnnnnnnnnnnnnnnnnnnnnnnnnnnnnnnnnnnnnnnnnnnnnnnnnnnnnnnnnnnnnnnnnnnnnnnnnnnnnnnnnnnnnnnnnnnnnnnnnnnnnnnnnnnnnnnnnnnnnnnnnnnnnnnnnnnnnnnnnnnnnnnnnnnnnnnnnnnnnnnnnnnnnnnnnnnnnnnnnnnnnnnnnnnnnnnnnnnnnnnnnnnnnnnnnnnnnnnnnnnnnnnnnnnnnnnnnnnnnnnnnnnnnnnnnnnnnnnnnnnnnnnnnnnnnnnnnnnnnnnnnnnnnnnnnnnnnnnnnnnnnnnnnnnnnnnnnnnnnnnnnnnnnnnnnnnnnnnnnnnnnnnnnnnnnnnnnnnnnnnnnnnnnnnnnnnnnnnnnnnnnnnnnnnnnnnnnnnnnnnnnnnnnnnnnnnnnnnnnnnnnnnnnnnnnnnnnnnnnnnnnnnnnnnnnnnnnnnnnnnnnnnnnnnnnnnnnnnnnnnnnnnnnnnnnnnnnnnnnnnnnnnnnnnnnnnnnnnnnnnnnnnnnnnnnnnnnnnnnnnnnnnnnnnnnnnnnnnnnnnnnnnnnnnnnnnnnnnnnnnnnnnnnnnnnnnnnnnnnnnnnnnnnnnnnnnnnnnnnnnnnnnnnnnnnnnnnnnnnnnnnnnnnnnnnnnnnnnnnnnnnnnnnnnnnnnnnnnnnnnnnnnnnnnnnnnnnnnnnnnnnnnnnnnnnnnnnnnnnnnnnnnnnnnnnnnnnnnnnnnnnnnnnnnnnnnnnnnnnnnnnnnnnnnnnnnnnnnnnnnnnnnnnnnnnnnnnnnnnnnnnnnnnnnnnnnnnnnnnnnnnnnnnnnnnnnnnnnnnnnnnnnnnnnnnnnnnnnnnnnnnnnnnnnnnnnnnnnnnnnnnnnnnnnnnnnnnnnnnnnnnnnnnnnnnnnnnnnnnnnnnnnnnnnnnnnnnnnnnnnnnnnnnnnnnnnnnnnnnnnnnnnnnnnnnnnnnnnnnnnnnnnnnnnnnnnnnnnnnnnnnnnnnnnnnnnnnnnnnnnnnnnnnnnnnnnnnnnnnnnnnnnnnnnnnnnnnnnnnnnnnnnnnnnnnnnnnnnnnnnnnnnnnnnnnnnnnnnnnnnnnnnnnnnnnnnnnnnnnnnnnnnnnnnnnnnnnnnnnnnnnnnnnnnnnnnnnnnnnnnnnnnnnnnnnnnnnnnnnnnnnnnnnnnnnnnnnnnnnnnnnnnnnnnnnnnnnnnnnnnnnnnnnnnnnnnnnnnnnnnnnnnnnnnnnnnnnnnnnnnnnnnnnnnnnnnnnnnnnnnnnnnnnnnnnnnnnnnnnnnnnnnnnnnnnnnnnnnnnnnnnnnnnnnnnnnnnnnnnnnnnnnnnnnnnnnnnnnnnnnnnnnnnnnnnnnnnnnnnnnnnnnnnnnnnnnnnnnnnnnnnnnnnnnnnnnnnnnnnnnnnnnnnnnnnnnnnnnnnnnnnnnnnnnnnnnnnnnnnnnnnnnnnnnnnnnnnnnnnnnnnnnnnnnnnnnnnnnnnnnnnnnnnnnnnnnnnnnnnnnnnnnnnnnnnnnnnnnnnnnnnnnnnnnnnnnnnnnnnnnnnnnnnnnnnnnnnnnnnnnnnnnnnnnnnnnnnnnnnnnnnnnnnnnnnnnnnnnnnnnnnnnnnnnnnnnnnnnnnnnnnnnnnnnnnnnnnnnnnnnnnnnnnnnnnnnnnnnnnnnnnnnnnnnnnnnnnnnnnnnnnnnnnnnnnnnnnnnnnnnnnnnnnnnnnnnnnnnnnnnnnnnnnnnnnnnnnnnnnnnnnnnnnnnnnnnnnnnnnnnnnnnnnnnnnnnnnnnnnnnnnnnnnnnnnnnnnnnnnnnnnnnnnnnnnnnnnnnnnnnnnnnnnnnnnnnnnnnnnnnnnnnnnnnnnnnnnnnnnnnnnnnnnnnnnnnnnnnnnnnnnnnnnnnnnnnnnnnnnnnnnnnnnnnnnnnnnnnnnnnnnnnnnnnnnnnnnnnnnnnnnnnnnnnnnnnnnnnnnnnnnnnnnnnnnnnnnnnnnnnnnnnnnnnnnnnnnnnnnnnnnnnnnnnnnnnnnnnnnnnnnnnnnnnnnnnnnnnnnnnnnnnnnnnnnnnnnnnnnnnnnnnnnnnnnnnnnnnnnnnnnnnnnnnnnnnnnnnnnnnnnnnnnnnnnnnnnnnnnnnnnnnnnnnnnnnnnnnnnnnnnnnnnnnnnnnnnnnnnnnnnnnnnnnnnnnnnnnnnnnnnnnnnnnnnnnnnnnnnnnnnnnnnnnnnnnnnnnnnnnnnnnnnnnnnnnnnnnnnnnnnnnnnnnnnnnnnnnnnnnnnnnnnnnnnnnnnnnnnnnnnnnnnnnnnnnnnnnnnnnnnnnnnnnnnnnnnnnnnnnnnnnnnnnnnnnnnnnnnnnnnnnnnnnnnnnnnnnnnnnnnnnnnnnnnnnnnnnnnnnnnnnnnnnnnnnnnnnnnnnnnnnnnnnnnnnnnnnnnnnnnnnnnnnnnnnnnnnnnnnnnnnnnnnnnnnnnnnnnnnnnnnnnnnnnnnnnnnnnnnnnnnnnnnnnnnnnnnnnnnnnnnnnnnnnnnnnnnnnnnnnnnnnnnnnnnnnnnnnnnnnnnnnnnnnnnnnnnnnnnnnnnnnnnnnnnnnnnnnnnnnnnnnnnnnnnnnnnnnnnnnnnnnnnnnnnnnnnnnnnnnnnnnnnnnnnnnnnnnnnnnnnnnnnnnnnnnnnnnnnnnnnnnnnnnnnnnnnnnnnnnnnnnnnnnnnnnnnnnnnnnnnnnnnnnnnnnnnnnnnnnnnnnnnnnnnnnnnnnnnnnnnnnnnnnnnnnnnnnnnnnnnnnnnnnnnnnnnnnnnnnnnnnnnnnnnnnnnnnnnnnnnnnnnnnnnnnnnnnnnnnnnnnnnnnnnnnnnnnnnnnnnnnnnnnnnnnnnnnnnnnnnnnnnnnnnnnnnnnnnnnnnnnnnnnnnnnnnnnnnnnnnnnnnnnnnnnnnnnnnnnnnnnnnnnnnnnnnnnnnnnnnnnnnnnnnnnnnnnnnnnnnnnnnnnnnnnnnnnnnnnnnnnnnnnnnnnnnnnnnnnnnnnnnnnnnnnnnnnnnnnnnnnnnnnnnnnnnnnnnnnnnnnnnnnnnnnnnnnnnnnnnnnnnnnnnnnnnnnnnnnnnnnnnnnnnnnnnnnnnnnnnnnnnnnnnnnnnnnnnnnnnnnnnnnnnnnnnnnnnnnnnnnnnnnnnnnnnnnnnnnnnnnnnnnnnnnnnnnnnnnnnnnnnnnnnnnnnnnnnnnnnnnnnnnnnnnnnnnnnnnnnnnnnnnnnnnnnnnnnnnnnnnnnnnnnnnnnnnnnnnnnnnnnnnnnnnnnnnnnnnnnnnnnnnnnnnnnnnnnnnnnnnnnnnnnnnnnnnnnnnnnnnnnnnnnnnnnnnnnnnnnnnnnnnnnnnnnnnnnnnnnnnnnnnnnnnnnnnnnnnnnnnnnnnnnnnnnnnnnnnnnnnnnnnnnnnnnnnnnnnnnnnnnnnnnnnnnnnnnnnnnnnnnnnnnnnnnnnnnnnnnnnnnnnnnnnnnnnnnnnnnnnnnnnnnnnnnnnnnnnnnnnnnnnnnnnnnnnnnnnnnnnnnnnnnnnnnnnnnnnnnnnnnnnnnnnnnnnnnnnnnnnnnnnnnnnnnnnnnnnnnnnnnnnnnnnnnnnnnnnnnnnnnnnnnnnnnnnnnnnnnnnnnnnnnnnnnnnnnnnnnnnnnnnnnnnnnnnnnnnnnnnnnnnnnnnnnnnnnnnnnnnnnnnnnnnnnnnnnnnnnnnnnnnnnnnnnnnnnnnnnnnnnnnnnnnnnnnnnnnnnnnnnnnnnnnnnnnnnnnnnnnnnnnnnnnnnnnnnnnnnnnnnnnnnnnnnnnnnnnnnnnnnnnnnnnnnnnnnnnnnnnnnnnnnnnnnnnnnnnnnnnnnnnnnnnnnnnnnnnnnnnnnnnnnnnnnnnnnnnnnnnnnnnnnnnnnnnnnnnnnnnnnnnnnnnnnnnnnnnnnnnnnnnnnnnnnnnnnnnnnnnnnnnnnnnnnnnnnnnnnnnnnnnnnnnnnnnnnnnnnnnnnnnnnnnnnnnnnnnnnnnnnnnnnnnnnnnnnnnnnnnnnnnnnnnnnnnnnnnnnnnnnnnnnnnnnnnnnnnnnnnnnnnnnnnnnnnnnnnnnnnnnnnnnnnnnnnnnnnnnnnnnnnnnnnnnnnnnnnnnnnnnnnnnnnnnnnnnnnnnnnnnnnnnnnnnnnnnnnnnnnnnnnnnnnnnnnnnnnnnnnnnnnnnnnnnnnnnnnnnnnnnnnnnnnnnnnnnnnnnnnnnnnnnnnnnnnnnnnnnnnnnnnnnnnnnnnnnnnnnnnnnnnnnnnnnnnnnnnnnnnnnnnnnnnnnnnnnnnnnnnnnnnnnnnnnnnnnnnnnnnnnnnnnnnnnnnnnnnnnnnnnnnnnnnnnnnnnnnnnnnnnnnnnnnnnnnnnnnnnnnnnnnnnnnnnnnnnnnnnnnnnnnnnnnnnnnnnnnnnnnnnnnnnnnnnnnnnnnnnnnnnnnnnnnnnnnnnnnnnnnnnnnnnnnnnnnnnnnnnnnnnnnnnnnnnnnnnnnnnnnnnnnnnnnnnnnnnnnnnnnnnnnnnnnnnnnnnnnnnnnnnnnnnnnnnnnnnnnnnnnnnnnnnnnnnnnnnnnnnnnnnnnnnnnnnnnnnnnnnnnnnnnnnnnnnnnnnnnnnnnnnnnnnnnnnnnnnnnnnnnnnnnnnnnnnnnnnnnnnnnnnnnnnnnnnnnnnnnnnnnnnnnnnnnnnnnnnnnnnnnnnnnnnnnnnnnnnnnnnnnnnnnnnnnnnnnnnnnnnnnnnnnnnnnnnnnnnnnnnnnnnnnnnnnnnnnnnnnnnnnnnnnnnnnnnnnnnnnnnnnnnnnnnnnnnnnnnnnnnnnnnnnnnnnnnnnnnnnnnnnnnnnnnnnnnnnnnnnnnnnnnnnnnnnnnnnnnnnnnnnnnnnnnnnnnnnnnnnnnnnnnnnnnnnnnnnnnnnnnnnnnnnnnnnnnnnnnnnnnnnnnnnnnnnnnnnnnnnnnnnnnnnnnnnnnnnnnnnnnnnnnnnnnnnnnnnnnnnnnnnnnnnnnnnnnnnnnnnnnnnnnnnnnnnnnnnnnnnnnnnnnnnnnnnnnnnnnnnnnnnnnnnnnnnnnnnnnnnnnnnnnnnnnnnnnnnnnnnnnnnnnnnnnnnnnnnnnnnnnnnnnnnnnnnnnnnnnnnnnnnnnnnnnnnnnnnnnnnnnnnnnnnnnnnnnnnnnnnnnnnnnnnnnnnnnnnnnnnnnnnnnnnnnnnnnnnnnnnnnnnnnnnnnnnnnnnnnnnnnnnnnnnnnnnnnnnnnnnnnnnnnnnnnnnnnnnnnnnnnnnnnnnnnnnnnnnnnnnnnnnnnnnnnnnnnnnnnnnnnnnnnnnnnnnnnnnnnnnnnnnnnnnnnnnnnnnnnnnnnnnnnnnnnnnnnnnnnnnnnnnnnnnnnnnnnnnnnnnnnnnnnnnnnnnnnnnnnnnnnnnnnnnnnnnnnnnnnnnnnnnnnnnnnnnnnnnnnnnnnnnnnnnnnnnnnnnnnnnnnnnnnnnnnnnnnnnnnnnnnnnnnnnnnnnnnnnnnnnnnnnnnnnnnnnnnnnnnnnnnnnnnnnnnnnnnnnnnnnnnnnnnnnnnnnnnnnnnnnnnnnnnnnnnnnnnnnnnnnnnnnnnnnnnnnnnnnnnnnnnnnnnnnnnnnnnnnnnnnnnnnnnnnnnnnnnnnnnnnnnnnnnnnnnnnnnnnnnnnnnnnnnnnnnnnnnnnnnnnnnnnnnnnnnnnnnnnnnnnnnnnnnnnnnnnnnnnnnnnnnnnnnnnnnnnnnnnnnnnnnnnnnnnnnnnnnnnnnnnnnnnnnnnnnnnnnnnnnnnnnnnnnnnnnnnnnnnnnnnnnnnnnnnnnnnnnnnnnnnnnnnnnnnnnnnnnnnnnnnnnnnnnnnnnnnnnnnnnnnnnnnnnnnnnnnnnnnnnnnnnnnnnnnnnnnnnnnnnnnnnnnnnnnnnnnnnnnnnnnnnnnnnnnnnnnnnnnnnnnnnnnnnnnnnnnnnnnnnnnnnnnnnnnnnnnnnnnnnnnnnnnnnnnnnnnnnnnnnnnnnnnnnnnnnnnnnnnnnnnnnnnnnnnnnnnnnnnnnnnnnnnnnnnnnnnnnnnnnnnnnnnnnnnnnnnnnnnnnnnnnnnnnnnnnnnnnnnnnnnnnnnnnnnnnnnnnnnnnnnnnnnnnnnnnnnnnnnnnnnnnnnnnnnnnnnnnnnnnnnnnnnnnnnnnnnnnnnnnnnnnnnnnnnnnnnnnnnnnnnnnnnnnnnnnnnnnnnnnnnnnnnnnnnnnnnnnnnnnnnnnnnnnnnnnnnnnnnnnnnnnnnnnnnnnnnnnnnnnnnnnnnnnnnnnnnnnnnnnnnnnnnnnnnnnnnnnnnnnnnnnnnnnnnnnnnnnnnnnnnnnnnnnnnnnnnnnnnnnnnnnnnnnnnnnnnnnnnnnnnnnnnnnnnnnnnnnnnnnnnnnnnnnnnnnnnnnnnnnnnnnnnnnnnnnnnnnnnnnnnnnnnnnnnnnnnnnnnnnnnnnnnnnnnnnnnnnnnnnnnnnnnnnnnnnnnnnnnnnnnnnnnnnnnnnnnnnnnnnnnnnnnnnnnnnnnnnnnnnnnnnnnnnnnnnnnnnnnnnnnnnnnnnnnnnnnnnnnnnnnnnnnnnnnnnnnnnnnnnnnnnnnnnnnnnnnnnnnnnnnnnnnnnnnnnnnnnnnnnnnnnnnnnnnnnnnnnnnnnnnnnnnnnnnnnnnnnnnnnnnnnnnnnnnnnnnnnnnnnnnnnnnnnnnnnnnnnnnnnnnnnnnnnnnnnnnnnnnnnnnnnnnnnnnnnnnnnnnnnnnnnnnnnnnnnnnnnnnnnnnnnnnnnnnnnnnnnnnnnnnnnnnnnnnnnnnnnnnnnnnnnnnnnnnnnnnnnnnnnnnnnnnnnnnnnnnnnnnnnnnnnnnnnnnnnnnnnnnnnnnnnnnnnnnnnnnnnnnnnnnnnnnnnnnnnnnnnnnnnnnnnnnnnnnnnnnnnnnnnnnnnnnnnnnnnnnnnnnnnnnnnnnnnnnnnnnnnnnnnnnnnnnnnnnnnnnnnnnnnnnnnnnnnnnnnnnnnnnnnnnnnnnnnnnnnnnnnnnnnnnnnnnnnnnnnnnnnnnnnnnnnnnnnnnnnnnnnnnnnnnnnnnngccaccgcgcgcgccgcagtcgccctgccgggagccgctttcagcgcccccgcaatcagcgccgcgccgaataaaaccgcagccgcgccgccgccgagcgcccgcccgaccactatcttcccgaacgcccccatgtccgacgcgggtatgtgcaggtatgaccggaacatcgccgccctctcgaatgccccctcgaatattttccatccgaatatgtccagccccatcgggtagaacgggctgcctgtcaatgaaaggttgcgcgcgtaccagaatatgcctgcggctgctgcggcggcgaaaaatgcgtccgctctggacagaacttttttccatgactcgccgcgcgcgcgcgccgccaccagcggaaccagtagcgccagcatcaccgccccgaaatacttcgagccgacagccagccccgccgctagacctgccatcagcatgtcgcctttcgcgcgcccgccgtccgaccgcgggatcaaaaacgcgactgcggccaagaaaaatgccgtaaaataaaggtctattccgaattgaagggtttgcgcaagaacaattgggactgcggaacccgccgccgccgccgtcgccgcgctcttcggcggcatccccgcccgcagccctattacgtgcgccgcaagcgccgcagtcagcagtcccgccgactccatcagcccgcacagcaggtcgtcgttcagaggcagcatcagccacagatacatcagttcgccgttccccggatagtaggtcgtcgcctgttccgggcttagcgtctgaacgaaaactatctttcccgcgtgcagccactccgccggaaataccagatggtccagaaaagcgtccgtgggggcaggcggcatggtcagcgcaaacgagcacatcatcaagaaaaggacggcggatatgattttcactgcggccatcgccgcgcccgccatcgcgtccggctccgaatgcggcgcttcgccaaaagaaagaacgtcaggggagtaaaccgcccgcgaagatttcgccttgacgcgcgccgccgcgacaacaaccgccagaatcacgatctgcgccgcgaacgcgttcgggtacttaatcgcgcccgccatagacaacaggagcagggtaaaagcgaccgtggagacaaaaacgacgcaggcggcaagcaaccgctcaggcccgcgtcgattccccgtcagcaaccccgacgccacccacgccgccgccgctgctggcagattcagcgcgaacagcctcgcgatgtcgctcagattttccattgttgaattataccaattatttcatccgaacaaacggttttttatatgacattgaacataaactgcggaattccgctatatttcgcttgctggcaaatatgcgcctctgaatctcttcatatctccctttttctttgtttattattccggcggcgctgttaattatttcgcggtttcgtgtaaaccctgaggaatttcggtaatatagtaatgagggacaaaataccggataacatgcggcaagggagttttccctcggaacggaggcggaggctatgaaaaagattgtggcggcggcgatgatagcggcggcgatgatagcggcgtcaacggtcgcgacctttgcggctgaaacatacaacttcggcgtttacatggggccggacgagcgggaccagcagcttaaaaccgttctcggcgcggtggtcaaatacgtcgccgacatcgagaaggtcgatatgcaactcaaatggtacgacgacgaaaaggccttcaccgacgacgccgcgaaaggcgttctcgatttcgcgttcacaaaaaataccgatccgttttttcttctggccactaaactcggctatgagccgatacttggcgtgtcgcttttcgacaagaaaaccgcccggatgtgcctctactcaagctcggacacgaaaatcacgggcatcgacaaaatgaaagacctgcgtctagccacctacaaggaacacgacggctactatccgctccgcaagatgttcggagacaaaattctcgatgggcttttcaaggaagtgaaattgaacagcaacggcatggcctcgctcgacatgcttgcaaaaaaagaggttgacctcgcccttgtgcacgagatgaacgtcttttccctcaagctgttcaaccccgccatgataagcaaactgaacgagcttgtttgctcggaagcgacagttcagccggggataatgaaacacaagaacgcccctaccctgctagtcaacaggctgtccagcgtgatggaaagcgcccacaagtccgaaaccctgaaaccctacagaagccttatgaaaacaacaaaaatacgctttttccccgttaccataaaagacttcgacccgctcatcaagctatacaccgacgcggcaaaaagcggctgggataaagactacaataaatggctggccgccgctaaaaaatagttcgccgatataaacgacttattatttgaaattactcatgaattgttgctgttttcgctcacgcacaaaaaaaacattttgtgcatggcacacaaacgagtgggtaaaatcaattaagaactggcataaacgcgttaaatgaaactgccgtattcatgcttgaacccggctttatttatagacccctgagaaccgggccatttttatagcggcacactgcttctcacgcacaaacgagcttgtgagcgccgcccatgtttgtttttctgtaggggcgcggtttccgcgccctatcatggcgttgttccgggcggggcaaccccgcctctactttgaataacgcgccttgcggtccgcatttcttccgctttgaacattcgctcccgaatcctaatgatggatccgggtttaaatgaaaactccaaatctgcacatggtattatttgtagcgcacataaataatcaaggaaagaagcgggattttcaattagtattccgacacagtcgccgaatttgcctttcattcccagagcggcgaaaagcgggcacaggcatcgctggggcgcgcgctgccagtccccgattttagcgtgtaaatgtttgccgggcgggtggaacatagcctgctttcgctcgcaggacataacaattccaacaagaacaatcccaccccctgccgacattccttttttactgtccgattaaatatttttcaaagacggcaatttgacgcgcaataatgtcacaggcaacgagtagaatgcatgacaaggttgtcgcattctaattgattgacaaaaagggactatgtatctgatataataaggcggctatatcacataacaggaggcaacgctatgtttaatttagtagatgaggaatggattcccgttctatggaacaacggacaagtaagcgccatcggcattaaggaagcgttcacgcgagccggaagcatacgccagatagccgcgagcaaccctatggaccgtttcgccatcatgagatttctattggccgtgctttattggtgcaaaggcaacccgacagaaggtgaaacaaaattgaaaggagattcatttcctgccgaatggtttgaaaaacttgaagcggaaaaagactgtttcaatctgctgggagaaggaaaaagattttttcaaaatcaatcagcgaataggaagaaatcaacaacggaattgctccaagaaatacctaccggcaacaattttcgacatttccgccattcgacagataatatcaacggattgtgcaaggcatgttgcgcaatggggctattgaggctccctctgttttccgtgtccggtctgcccgacctaaaagcaggcattaacgggactccgccaatctatatatttgccatcgggcctaatcttaaggaaaccctcgtttcaaattggatgcatgttgatagtataggcaatccctcatgggtcgcgccgtcgattactaataattctagctcttgcgcgcctttgcttgacggattgacgaccttatcaagaaaggtctttctgcacaatcccgatgacgaaatgtcagactgtataggatgtggcaaacgggactttttgataacaacatgtgaattccagagcgccggagaacttcgaaacgaattatgggatgatcctcatgttttgtacacagacaaagaacctcgcaaatcattaaaagctccggatcccacatcgactgggagattcagaatggatagaccgtggccggaaacggcatctcgaatatcccaatcaaacagattcattggcgcaaatacggacaatatgattctcgtgataggtttctccacagacaaagcgaaaaatatagatgtctgggaacgaacgataagaataccgtcaaaacctgcaagcacagatacggcggccacgcttatcgaattatggaaaaaagaaagttggctgatagaaaaacagcggatcggttcgagatctgataaagaaaattcatcaatggccgcaacgatacgtcctcatgttgagcatgtggtttcgtcgcgacttgacgaattgctaaccggcgaccctgccgcatgggacgacgcctcgcgcgagtaccgaccattaatgagcgcggttgccggagctttatccccggggtttacttcttcggctctcgaaagacgcagacaaatatcccgcgtcatccccgatatgcgtgaaaaaaaatccgccggaaaatcccgcgtgaagaaaggaggaaaaaaagatgagtgaaacgcagcgctttatcgacacgctgacgaaccttaaatccggcgagttaagcctgttgcgcgctcactcaggacaaaaacttgacgagtccgtccccgcatttgatttgttcacaggaatatggtggccgttaagacaacggagtcaacgcgcgccgcgccgcgaagtggcgtggctgatagcgaaactctacgcttttcgtcccgccgtttccaacgaacaaggaaagactctcgcgtctcaacttgggagttctatgccgcgcaatcagacttccgacgagtcaaaccgccttaggcaggctttcgacaacctgcttcttgcatcccttagcgacattgagccgagtttacaatgggctttagacagaatcgagtcaaaaaaactcaatctcgattgggttaagctgaccgacgatctttccatctgggaacgcgagtcaacccgcctgagatgggcggaagaatttctaaaccgaaaaggagaataacatgctaatcgaaatccacatgatacagaaccacagtccggccaacttgaacagagacgaccttggcgcgccgaaaacctgctatttcggcggagtcatccgctcgcgcatttccagccaatgcgtcaaacgaagcataaggatgagcgaggagttcaaatctctatgcggcggcgtccgcacaagacagttggcaaaactgatttcagaaagaatccaaggcaaggcagacgccaaaaagagagctgtcgcaatactcaaaaagtgcggcatcgctcctaaagacgaagaaaaaagcgatatgttggtctacaccacaaaagaagcgatctcgaaaatggcagacctgctggaaaacagttccggcaagtccgacgatgagcttgcatcggaattcggggggcttatttctgaattgaccgctgttcccgacatggccttgaatggaagaatgcttgaaaccggtgttcttaaagacacaacagtcgaggccgcgcttcaagtcgctcacgccatatcaacgcacgaagcccgtccggaagttgattattacgttgccgcagacgacattccgggagccgacgcgggcgccgggtatgttgatgaagctttgttctcgtccgcatgcttttacaaatatttctcaattgattttgaggctttagttaaaaacttgaaaggcaacaaagaactcgccgcacacaccgtaggagctttcatccgcgccgcggcgacagtcaatcccacaggaaaacaaaacagcttcgccgcgcataatcctccagacggcattttgattgaactcaaaaaatcgcccgttagttatgccaatgcattcgcaaggccggtctctatcagcggagggcgcgacatcgtttctcagagcgtcgctcaactcggacaatacatcctcgatctggacgccggctacggtaaaccggaaaaccgattctggttctctccgaacctgcggttcccgttgcagacgatagaggagaataaagaaatcgatctctcagataacaacgtcaaatcacttgacgaactgatccccgccatcgtctccgctatcggatatgactggagcaaagtaaaagaggttgttcttaattcagaggtggcatgatgggcgaaaacacgatgtttctccgtctagaagggccattgcaagcgtggggcggacatgagtccaagtttgtcgtccgcagaacctgcgaagcccccacgaagtccggcgtttccgggattatttgcgccgcgcttggcgttccgcgagcagaagcatcctcattctggttgccgaagcttcgctctttgcttatgggcgtcagaattgacagggccggaatccgctggtgggactaccacactgtgggcgcagaaatgcagatgagcattgcggaagccgagggcaagacaaagaaaggcgcgctgctcacgcgtcgagaatatctttgcgacgcttcttttttagtcgctttgcagggagattcagcagtgatcgatcagatcgaaaccgccgtaataaatccgaaatggacgctctatctgggaaggaagaactgcgttccatcgcggccattgagcgagcgccctccggaatcgcatcctgatctgatctcggcgttgtcatctgttccttggcgcagaaggaacaaggaagatgaagcgccgcagtcaatcgactgcctgattgactggacgcccacgcaagaacagccggaagcgccggatgacgcgttagtgtggcacgatgtccccatactgttcgagccgccatcccatcagcctcggtttgtgatgctgaaaaacctctcagttggaacagaaggagatgtcaggatagcggaagacgcggcgcaaagcagagttcccgatccgccacgttcccgcgcggactattcaaactccgcatacaagaacgcgcgggccgagcggctgaactccgaccacggactttgcgttttctgcaaatctcccgcgacaacagttcagcatgtgacatatcgccgcgctggcggcaatgaatctcaagaagatttgcgctctctttgccgactctgtcacgacgcagtcaccatgatagagtacggacacggaatggggcttgaccggataaaccccgaacaccctcaatggcgcgatgaaattatcaagaaacgagaagaagtagtccgataccggtctctcgaaacccgacggagacgcctgagcgcagaggaggtggaataatcgtcatgtttctttcttgccttttaatcaacaccggcgacaaccccgaccgaccgcgtccgggaagaatatggttgcgcaatctttacagagtccatcagcgcttgtgcatggcgttcccttcgtcttccgcatcgttagccgacccggattttcttttgccattcaagcctgacggcttcgcaaaaggccatgtgcatgtccctcgcaaacctgataccggttttctgttccgcgtcgaccctcttgcgggaaacggagccgcaatcatcgttcagtccgcatcaatgcccgattggcaatatgcgttccacaacgccgggtttcttctctccgccgaaccgcaagtaaaagccttcgagcctgtcttttcccttgatatgcaataccggttcaggctccttgcaaacccgactcgaaaaatctgcaccaagaccggcgaagacggcaaaagacgcaacggaaagcgtgtcccggtggcctcagataaacttgaagaatggctacattcgcgagccgaacgcgcgggtttttccgtcgttaaaaactctctgtccttaactccgtcttatgtctatgtgagcgcgcggaacgaaaaccttaaagggcaaaagcttcgttccgtccggtacgacggcgttattacaataacggacgcggatctattcaaagaggcagtgacaaacggcatcggcggcggcaaaggcttcggtttcggccttgtcagcctcgcccggatatgaccgccatgagggacttgcgtgaactgccgaaattcgaaaatagatggagccatcttttcctcgaacacggaaggctggacgaaaaggccggagccttgctatttcacgggaccgacgggtctatcgagattccgattaaccagctaggactgcttttgctaggccccggcacgaccgtcactcaatcggcaatgcgttttcttgccgacaacaacacgcttgtgtgctggacaggcgaacaaggcgtccgtctttacgcgcacagcacgggaggctctcactcctcaagacgcttgcttcgacaagcggggctttacgtcaacatggattcgcgcatcgccgtcattcgccggatgtacaacatgcgctttccggaaaaacttcccgactccgtttctctcgacaccgtaagaggaatggaagggcacagagtcagggaggcataccgcaagctcgcggaagagaacggcgtgatgtggcgcggcagaatatacaatccgcagaactgggatcaggccgacccgctcaaccgggcgctctcatccgctttcgcctgcctttacggcttgtgccacgctgcaatactttcggcgggatattctcctgccatcggattcattcataccggcaagatgctttccttcgtctatgacgtcgccgacctgtacaagatggaaatagcagttccgctcgcgtttcaaacttgctctgaaagcgatgtcgatgtcgagcgcaatgtaagattggcttgtcgggacgtttttcataaaacaaagctgatgaaacgcgtcttgccggatatcgcggaggtattagatgctggtgatgatattggagaaatccccggcgagcttgaggggagacttgtcacgctggatgatagagccgcgaccgggactctaccttggcaatccgagcgcgaggattagagatattctgtggaacaaagccgtcaagaaaatacgcgacggcggcgtcactcagatatggagcgacacccgctctccgcaaggatatctttaccgctcctgtgggaaaccggcccggccaatgatcgatgtcgatggacttgcccttgttctttctccttacaaaactgaaaggactgacgagactttgatcaatcaaaataataaggagtcttcacaagatgattgatttgacaatactactaaaagtgttttaaaaaaaccggcatacaatatgctggtgtcttccccacgcgtgtgggggtgaaccgccgactgagaacgacggcgaccgaggcgcgccgtcttccccacgcgtgtgggggtgaaccgggggcgatatgaaatccactaaacaggccacagtcttccccacgcgtgtgggggtgaaccgtttgtcaactggaaccagatgtacagctataagtcttccccacgcgtgtgggggtgaaccgtcttcatgctttgatcctttcggtatgtttgtgtcttccccacgcgtgtgggggtgaaccgatactcgaatacccgaatcctgtatctgcgccggtcttccccacgcgtgtgggggtgaaccgtgtttcccatgttgtctataaaattgagagccgtcttccccacgcgtgtgggggtgaaccgggggtgaaatgatgagcgttttttcgcagaaagtcttccccacgcgtgtgggggtgaaccgacgaagctatgcagttgcctaaaatcctgaacgtcttccccacgcgtgtgggggtgaaccggtaaatgccccacgtgcggcgaaccgatgtacgtcttccccacgcgtgtgggggtgaaccgtaaactctaatccgtcgccgctatctgtggcagtcttccccacgcgtgtgggggtgaaccgccatcgttgtcttccaccaggccgcttacgtagtcttccccacgcgtgtgggggtgaaccgcgggtggcgacgcttacggcttcttctttagcgtcttccccacgcgtgtgggggtgaaccgcagcctttgacagatggaatgcccgccgttgggtcttccccacgcgtgtgggggtgaaccgagaagcccatgacacaaacccaactattgatagtcttccccacgcgtgtgggggtgaaccgatggaagaaacaacatctcaaaaacttgcaaagtcttccccacgcgtgtgggggtgaaccgcgggggtcggctgacggggtcggggatggcagtcttccccacgcgtgtgggggtgaaccgcggcgagcagtttgagttgcgaccgccgacgcgtcttccccacgcgtgtgggggtgaaccggagggcgattgaaatggcagaaagcaccgcaggtcttccccacgcgtgtgggggtgaaccgcccggaagctaacaaaggaaatcaacaaacaagtcttccccacgcgtgtgggggtgaaccgccgttgaagataaattgttcccatatgtctgcgtcttccccacgcgtgtgggggtgaaccgtggatcagcacttgattgaccgtgagcggatcgtcttccccacgcgtgtgggggtgaaccgaatcctagagatcatgccgtcgccgccaatatgtcttccccacgcgtgtgggggtgaaccggcttgagcgtggtcgagggcgcgattgccgctgtcttccccacgcgtgtgggggtgaaccggctaatagaattaatagaattaacgtccggaatttcggcgtccggaacaaaattgccgttattctgttttattattgattgtgaaacaaatccatcacggcgaggtttgagatattgtgaacgattccaaagacctgtttgaaaaagttaaacatctattgctcggccagtactttgctgttctttcatcggtacagagggacggcagtccgtattcaaacataatcggttttgcggctacggacgatctcaaacatcttgtttttgcgacgccccgaaacacgaggaaattcgacaatctgctcggagagccgcgcgtttcgcttctggttgacaacaggagcaacagcaaaggcgacgttcatgacgccgcagccgtaaccattctcggagcggtcagggaaatcgaccgcgtcaatgatagcatttactttgagctatacgcggaaaggcatcctcatttagtggatttcttaagggcggacgataccgccgtcatagcggtgagcgttaatgagtactgctatgttagcaagttccagagcgttatgacgttgagcatgaaataaggagacaggccgcaatgaaaatatggaagtttatgaaaagaatcgggacgaccgcggcgacgctggcggcgcttgactccgtctggctgggcgtcattatgagcgactattataaagaacatctcggagaactggccagaagaaacgacgccgggctgacccccgactggaccgccgtgatattggtttacgttgcgctgacggcaggcctgaacatattcgcggtggatacggagtccggcagcgggcgcataaagaattctctcgtcaggggcgcgttattcggattaatcagttatggcatttacgaccttacgaacatggccacgctcaaggggtggtcttgggaaatgacggtggcggacatgctttgggggacattcctgtgttccgtggcaagcgccgcgacggccgccgccgccgcaaagtgagcgtcaaatgaaactgaaccaaatcgttatcatcggagtcgttctcctgttgtcgttcgccggggggcagttcacgtcgtccggcatggactggtaccggactatacaactgccgacatggacaccgccgggttccgtcataggcatagtgtggacgacgatatacatactgacggcggtatcggcgattatagcttggagagttttcgctggggattcccgattctatcttgtggccggactgttcatgatgaacgcggcgttcaacctcgcatggagctacattttttttgcccggcgcatgataggcccggcggttatagattcgatggcgattgaaatcacgctgcttgcgctcattccggttctgtggaagaaatcgcgcgcggcgtcggttctactcctgccatacgcgctgtgggtcgggttcgcgacatatctcaattactgcatctacgcgttgaacaagacgtgaaacaggagacgcccgcaagatgaaaacgatgtttgcgcggataacttgtctgagcctgattatcgccgcttcctccgttatttcggttgcgctcgcttcggattcaggatatgtcgcaacgggcgcaaaggcgaagaatttcaaactgaacgaccagcacatgcagttggtggaactggacaagctgcgcggatcgacggttgtcataatctacaccggcagaaacggattcgacgacgcggctgaaatcatcaagaaactcgacaagaaacatagcgggcgggaagacgggaaaaaagccggcaaggatatccgcatagtcggcgcggcgaacttaaagggcgttcccgctttcgtgaagaagatggtgaaaaaccgcatgaaagagccgcgttatccttcgttcctcatggactggaaaggcgagatagcggcaacctacggttatgatgaaaaagggattgccgcgttcgtagtggatggaaaaggcatagtgcggttttcaggcaatatcaaaaacgccgacgatgacatctctaaagtatccgcagctatcgactcgatatagaatccacccctgagttcatagtagaaacaacggcggagcggcgaaaagcaggcacaggcatcgctgaggcgcgcgctgccagtcccctttttcgctcagagttcacagtagaaacatcgaatgtttattgaacacaaacagacattacgcaaacgataatcaatccccccgccggcattcctctttttgtgccttcattctttatcttttgtttcttaattcattctttcttgccgtcattccttttctcttgtgccgtcattcccgcgaaagcgggaatccattttcacccgcccggatgctatttcgcctatcagcgacattgtaaactgtcaaaagcctcggccttaccatagatgctcccgtttttaaaattgctaatttcaaacctgaccacttcttcttcgcttcttctcgcatttgctatttgtgttgagtcaggcagtcaacagctttgggattgtttgttctgcgcaatactttgattatgtattcctgtatttcttggttgtctgcttcgtcaagaagtttgcacaagagcataattgcagcgtcttttccatattcgccaaggtttcgtatacaagagttctgaaaatcgctgtggtctctgtgaatagattcattgctgggggggttcggcatttttcctctggacaaatctattctttctctgtcacgagtaatatcgttaaagtaactctgtttttcttctccactcgcgatcctttccatcacaaacaatgctttgtcctcataaccccatcttagaagacacccggcagctacgcctctaactctaatgtcattgtcatttatggcgtttgatatcacagcttgagatttgacatccaacctacataattcattggtagcattcattcgcaattctggacttatgtcagatttaattatgtcttcaagcaaggggacgatacgtgggtctcgagaatttgctatgtctactaaaacaagtcccttcgcaaactcggaagtaagatgatttttgtattgatatatttttagcggtagttcacagcaaaacgttcttctatcgtattcatatatcaaccgctgatgctttttttgctcttcttcatccatatcatcgaagtctttccggggatcaatatatgatggtttccgcgaagaccaaacagggcaccactcgtcagctctgaaagaatcagatggattatccagaaacttatttaaaacttcctctcccatctttatctcttcatccggacacgctttcaaacccgtgaaatcatctgcggatgcgctgacaaaagcaatcaatgtccacaccaagcagcacagtatcatcagcaaaaccgcatatggtggagtcaggcggagcctgtttacagaattagagttgatctggttggctgatcttgattttgtataagcacggctgttgtagggatagttgttcggtcgcggatgtgtggtctgtcgcagcttcatggcggttatgttgccattatgaacgaaggagaacgatttggcaacggggggtgggaggttgtgtgttgtggagggcggatggggtggcttaaggagtgggatgctaggaataaattcccggaaaggcaaagcggcaatgaattgccgcactccaaagttccacattaattttggctgatccttaggcataggcagaaacgagtttggggggcgcgcccggagggacaagagcgaagcaggtgtgggcgctaaagctcaaggatgtcggggcgggacaggcgggcgccttggaaatcaacttcgagttcgggccattcgcctgtgcgggtgatgaattcggcgcggtcggcaaacgcgattatggtgtcttctgatttcgtgcctgtaatggaggggttccatgcgaaagcgcaattgggtttgacctcgccgggggtgtcggggctggcgcagaagtatcttgacttgtagccgcacgggccgccctgatggtgaaggagccattcgtggtcgaagccttcgctggagtaaacggcggtggcgtcgcggaaaacggaggaaatcttcgcgccgggtcgggtgagcaagttgaaagccgcatcgacgcggcagcaggcggcgtgtctgcggcggaggtcgtccccggcggggccgaagctgaccatccgagtggcggaagccacaagcccgccccttctggcgcagaggacaagcattgcggctcgctcaaggggctgccgcgtcggcagaggatgcctgtatgccgggagcctgcctccggaagctacgaggacgacgatcggctgcgcgtcccgcgtccagcactcggaggcgagcgcggcggcggcggcgttctcggtcatgcccggacgcaaagccctcgcggcggactcgagcgcggccccggcgtccgctccgagcgccctgaacctgtccatctcgctttccgtcaactccatcatcaggtcggagaaatcctcgcccgccgggacgaagccggaggccggcatgtccgccgccgccacgcccgcccccgcgcacatccgcgctatcttcgcgttcctgtcgtcggcccatggaatctcgacaagctccacgtccagcccgacgagttcctcgtctctgattcttgcggactcgattcggttggtcacgaccgcgcatcggtctggaagcagaacaaaggaggcgacgcccgcttcggcggccatgttcacgtggcaactggctccgcaagcggcccacgcaaagttgtccgaccgcgatagcgccagcgcgccccagccccgctctttcattctctcccgcatcctgtctatctttatgccgaattcttccgctctggtcattgttccggccctcaggttattgtttgtcgcgacgccgccgcgattcggatattatatcagttcttaatcggttttgccgattgagagcgcccgcaacggagttgtggacgccacccgtgatgacagggttgcggatagcgagcgcgctgatagctaattttatttaatcgctgatataatgattcgaggcggttgcggtggggacgccgcgaaacttgcgcggattcgcgtattgaaccggagaatgcggggcgcgaacgccgaggagcgaagtatgttaataggaattatatccgacactcacgacaaccttgaccggttaagagcggcgatatcgacgctgaaatcccgcggcgccgcgcggcttatccactgcggcgacatcgtttccccgttcgttgtgaaagctatcgcggaagccgggttcgaggagtgtttcggagtgttcggaaacaacgacggagaattgatttatctttccgaaacatttaagaagatagggcggatagagaagccgccggctttcatagagatgggcggagcgcgttttgccgtgcttcacgagcctatgccggacgacgcgatggcggcgctgccggtggacgccgtgctgttcgggcacacgcatcagcctgttctcaaggacggcaaacccgtgatagtgaatcccggagagtgttgcggatggctgacaggcaaatcgactatcgccgtttttgacacggcggggatgaaggcagagctaatcgagctgtaggcgcgaaagccgcgaggaggccgcaagccttcggaggaaacagatgaaagttaaaatggcgataatagcggcggttctggcggcggcggtctgcgctccggcgtcggcggttcttccggacgcgcgcgggccaaacgcctctgtagcaggcgaaaactccgcgacgatgaaagaaattttcaggataaaggtggagaacgcggcgggcggagcggtggaagtgagcgaagacggaggcgcttcgtggacggccgccggaaaagtcctgctggccgccgggacgataaatccgcgagcgtacaccgccagcggctgggcgtcttcgggggctgtcgctgcgaccgccgtaaacgccattcacataaaagtgcggcagaacgaagacagaggcgcggtgttcagcatcctgcccaaagatttcttctctccgccggcggattataaatctttctattcccggaacagttcaataataacgaatatcccggctggagggagcattttcggaggagccgaatcgccgttcataggctcgcgggttctcgcggcccgcgccggttccgctcactccccaatcgccgaggattatacgccgtcagaaggcgattccctgctgataatcgtcgaacagccggagaaatatccatcggaaatcgtcttcgaaaacaggttcggagggttcatccttataaagtatcccggagaggaaccgaaactcatcgggcaggtgttgaaaccggtggcgggggttggaaggttcgaaggctcgctgtacacggacgtcgggagaatcagggcgaaccacacgggagtcatctgcgtctcgacgtcgccggtgggagagataggcggttttcagataatccctgaaaaccacgcgatgagcgcggagatggagaacgcgaggctgctgacgcagtggatggtggtcgggccgccgggggcggcggacccgtcgctcgaaggggtggctccgctgttcaggcatttcatcaggccggtacatttcaaaagcgggccgcagggaaaaacgcttgaacaggctttgggggcgttcatagttcaggcgcggatcggcggcggggagtggacgcggatgccgtcggtgtccgggcgggacgacaaagctctgaaagacgtcacgcacatacgcatgctgttcccggtcgaatggaaacattagccgggctatcgcctatgcggggcggccgggctttgcgggttgcgggcgcggggtatacaccggggcgcaaatgcgtataattgagactaggcaaggaaagcgggacgattaaggatgtcggaattaagacgcgaccccgtgttgggtcgatgggtgataatatcctccgagcgcggcgacaggccgagcgatttcatcgcagcgaaacctcttccgaaaacgggcttctgcccgttctgtccggggaacgaagacaagacgccgcctgagatagacgcggtgcgggactcgtgcacggagccgaacaagcccggctggcgcgtgcgcgtggtgtcgaacaagtatcccgcgctctcaatcgagggcgacctcaacaagcgggcgcgcggcatctacgacatcatgaacggcatcggcgcgcacgaggtcttcatcgagacgcccgaccacgacaaaaccatatccaccctagaaccgcaaaacatggaacagctaatgtggatgtacagggaaaggatgatagacctcgagaacgacgaacggttcaaatacatactgatattccggaacgcgggtcagtccgccggggcgtcgctggctcatcctcactcccagctcatcgccacgcctaccgtccccaagagaataaccgaggagcttaacggcgctcaggaatacttcgacttcaaagaccgctgcgtcttctgcgacatgatagacgaagagagggactaccagagaagggtcatcagcgagaacgaccgatttattagtttcgcgccgttcgcgtcccggttcccgttcgagatgtggcttgtgccgaaacatcacgaccccaatttcgcggacttggaagactccgacatcgcgtctctggcgcagtgttttcagaagtcgctcaaatatctggacaaggcgctggacttcccgccgtacaactacatcatccacaccatccccgtgaacaccagccgacagtacacgtaccactggcacatagagataatcccgcgcctgaccaacatagcgggattcgagtggggcaccgggttctacatcaatccggttccgcccgaacaggcggtggagattctgcgctcggcgaacggagacacgcaatgagcgggggcgaactgagccacatagacgaaaaaggccgagcgtcgatggtggacgtgtcggaaaaggaacgtaccgcgcggcgcgcaaccgtccggggcgaagtgcggctcaggcccgacgtgatagacaaaatactgtccggcggaatctccaagggagacgtgttccaagtcgcccgcgtcgccgccgtgtgcgccgcgaaaaaaacatccgaccttatccccctgtgccatcctctcagcctgacgaaagtttccgtcgagttcagcgccgacagagacgctggaataatcgttatcgacgcggaagccaaagcgatggacagaacgggggtggagatggaagcgctaaccgccgcgaccgtggccgccctcactatctacgacatgtgcaaagccgtccagaaagacatctccatcggccctttccgccttatggaaaaagaaggcggcaagagcggcccttataaaaacgaagcttgaacccgaacttgaagaaaaatatttgccggaagaaatcagattaaaaaactgtcgatggttgaccgcgtccggaggcgttcagaatgaaggcaaaaacaatcgcgttggctatagttgcggcggcgtttatggcgggcagtccccgcgcgctcgcggacggaggctccccctcccccgcttcgctgagggttctcaccgcaaacgtcggcaacgcggacatactgaactgcggcccgaaatatttttacaaactgtgtctcgtggaatgggagaagaaggtcgcggaagggatagccaagctgtcgcccgacatagtgtcgctgcaggaagttctggacgttcagtggtgcgaggcggcggccgtggagaaaaacaagaagaatgtgtgcttccggtttgaggacaggaaagagaggcatcaggttcgcaggctgttgggagatgattatacgatagtgtgcgacgggcgcgccaactacgagtgcataggagtgaaaaaaagcgtcgggacgattgaaggttgcgggcgcggagaactgtgccgcgctccgggctggccgctgacaatcgaaacgccggaaggatgctcgacaaagacggtcgtgttcggggcggacgcggagattaatgggaaacggctgaggatagtcaacgggcatccgtcggcggcggacgccggatgccgcgccgaagagttgagaaggttgttcgagggatacgaagggttcccggcgcttgcggccacggacagtcctgcgattatcatgggcgacatgaatatggacccgtttcaatgggacgccgcaaaagacgacgtggcggtttggctgaagcatgttggggatggcaagaaatattactatctgagcggtcctgcggaaaacgacccgccgttcaggacatgctccgggttcacgctggaccacgtgataacgaacgcggcgcgcggctcttgcgtcacgctggggcagtcgcccgggacggaacggctggacgggcatccgaagggggctccgattcaggaagcgcccgaccatttcgctattctttgcgaaatatccctgcctgacggggattgacggcgcggcggcaatcggtttggagcgggatagacgccgttctagggccgatttaaataaagttgcaaaaatatatctcaataacaataataatgcctgttggcggagtgtcgcggaacgaactgcgacgcgcccgtcaaaattcatcaggggagtgccgcgatggataaggaaaaagaaaaagaattagtaaagtcgtatctttaccttaacgccgtccttcctcagcttgaggagataatcgcgtatgacgcggaggcgcgcgagctgacgaaaggctggaactgcacgatccagatgcacgtgcccggcggggcgggagtcaggttcgtcttcaaagacggcaaatgcgaggcgaaactgggcgctgtgagcatgcccacaatctcgctgaggattccgacgccggaagccgccaacaaaatgatagagaacaccggcacggtcattcccatgatatggggcttctggaacatcgggaaactcggaaagttcatgaagctgacgaaactcatggagaagtatctgagaccgtcggaagaagatctcaaaaacaaggacttcttcgagttccatacgcgcgtgaaactcatgatggccgtctatggcatgaaggccgtcggagagcacgacacgtatgtaaaaggaatagtgtcgaaagtgccgaacgggccgatggagataaaggtgctgccggacgggccggtggcgcatatcgtgctggacaacggaaagttcgctgtggccaaagggccggcggcgaacccgatggtcgtcatggaaattaaagacatcaagctggcgtacgatatgctgaacgccaatgtagagttcatggaagagctgggcctgtgccgcataaggctgcgcgggcacgtcggaatggctgaaagcctcgcggtcgttatggagcgcatcggcctgtatatcagttgacgccggacgactatacccaactggagggcttgaaaatggaaacttacaaatttgataaatcatacgagtggttcgagcgggcatgcaaagtcattccgggcggagtgatagggcacaaacaccccgcgttcaccgtccccggctcgtatccgtatttcgcgactcgcggcgagggaagccactactgggacccggacggaaacgagtacatcgactggatgtgcggtttcgggccgatggtgctgggatacaacaacccggtggtggacgcggcggcgcaggaacaggcaaaactgggcgacggcatgagccatccggggccgatcagcatcgagtacgccgagatgatggttaaactcaccaagggcatggactggtgcgtgtacggaaagaacggcgcggacatcaccacatggtgcatgaggctggcgcgcgaatacacggggagaaagaaaatcctgatcgcgcgcggcgcgtatcacggcgctcaggcatggtccaccccaagctacggcggcatcatcgacgaggatcgcacgcacgttcacttcttcgaatggaacaacctagactccttcatggaactgatcaacacatacaaagggcaggtcgcgggcgtgatgatgacgccgtaccaccactgcatatacgcggaccagcagatgcccgctcccggctggtgggaagccatcggcaaagtctgcaaacaggaagaattgattctgatatcggacgacgtgcgcgccgggttcaggctcgacatggctggcagccacgcctacttcggatacgagccggatctggtctgctactccaaagccatagccaacacctacccgatctccgccggtctgggaacgaacaaactgaaagagaccgccgaacacgttctgttcacgggaacgttcttcagcagcatggttccgatggcggcgtccatcgccaccgtgaaagagatgcagaggctggacggagtaaactacatgatgaaaatcggcaaggcgctctgcgacggccttgtcagcgtaggcaaatcccacgggtttgagattatcatgtccggaccgtacgacataccgttcatgcggttcgcgcgcgagaagaacttcatgctcaaacagctcttcagcggcgaggccgccatccggggcgtcatcttccacccgcaccacaactggttcacctcctgcgcgcacacggaagaagacatcaagaaatcgctcgaagtggccgacatcgctttcaagaaagtcaaagacaaatacggaagcgactgaagcgcgacaaacggatagacgcagtaaatccgcctttaaaagcgcctccggcggccaaagagaaacttttgaaaaagtttctctttggaatctcttcaaaacttttcacatgagcgcggcggagcgatggcgcgaacgcgcccgctccgccgcgcgcatagaaatgttttgagggaaaacttttttaaaagttttcccttaaccgcattaaagcgcctccggcggttcaaggaaactttgaaaagtttccttgaaaatccttcaaacttttccttgcgcgtcggtacgggacgctgacgcgtcccgtaccgacgctcctgtggaaatgtttaagaagaagattcctcatgaaacccctttctcaatatcttttcgcatgatacgcgccgatgggaagagcgaagccttcccatcggcgctagcgcgaaaagttttgaaagggtttaagggaatactttttcaacgttccgtcattagtaatacgtatcatatacgaagaactaaatgaaagctcccatttactatttggtaaaaagcatcatgcgcaaaagaaatagttttgcgcatggcacaactcttagcgagtatattctgctataatattagaagtaaaacacgaaaagcttaactctgtttttcacattagaacaactgcgacaggagcgcggctgaaactttgtaagctcgccataatacgcttgttcatgtgttaacaacgattcgcgcgcgcaacgtttaatgatttggagcaaggcaatgaaagaatcaggaatactgcttgggttttatgtggaccgaaaagaagctaatgtggcgtttaggatgttgcgacgccgtcattttcgcagaaccgcgataatttcaaaaaccgcctccggcgtggttcgcaaaaacgccgcggaggatagatattggacatgcgtaggagcggtcgcaggcgtcgcgattggaataataattgcgcatctgtcttttggaacattcgaggcgatagtggcatggcgatgcgtagtcggactattgcttgcggctgccggcggggcgattgtcgcaaggctggcggtttatgtctttcagtcgagcgaggatcgcgattttacgaagaagcgatcccgatggcttgtgaatgaagaaacggccgtcatcgtgaaagctccgttggagtcgctggatcaagctttggcgcaaatgcgcgtcgccggagagacgcaaccctcgatttttgtttttcaccatgaccgggtcacagaggcggaatctggatctgacaagaatgaacacatgacagcctcgcagttggctgtgcacgcgagactgctagccggatatcatcgcgttcagtcatatatgggcgtcaagccccatcttcttgagcttgtggatgtttgtgttaaggagatagacctttgccgccgtgaactcgccggggcgtcgcgtctcgaacagcgcgtttccccttcagcggaatggattcttgacaactatcatctaatcaaagccaattacgacgatgtgcgacgcaacctgcccggaaatttttatcgagaactgcctatgctggccgctgagcaggttcagaacatgccgaggatttactgcatagcgtcggaccttgtatcgcatactgacggccaactggatcgtcacaccatattgaaccatcttaacgaatatcaagcggtcagtcctttgaagatgggcgagttgtgggcgatgccgcttatgcttcgcatcgcgcttatctcattcataagaaacctaaccaatcagatgacagtgtggctgagagagcgcgagaacgccgacttctgggccaatcgacttctggtcgccgcgcggctcgcccccgacagtcttttttttcttctgtccgaactggagcgagaacagcctgagcctagcgaccacttcgcgtttcacctcaccggacatctcttcggggagagcgaggttctcgcgcacgttaagagttggtttgagcgcaagagcggcggcgtcttggccgacagcgcgattcgcgagcaggcgcgacaggccgcgcataacgcttccatcggcagcgcgatagccagtttgcgccaactgtctcttattgattggcgggatgttttcgaagacttgtgcgtggttgagaaaaaactttgcgaggacccgtctggggtgtactgcagcatggattttgccacaaaggacagatatcgccatgcggtcgaggaactggctcgcggcggcggcgtttccgagcaagaggcggcggaggcggcggttctgatggccgacgcggaagacaagccgcttgatccccgaaaaaaccatgtcggatactatctgatcgacgagggccgtccgcgtctggcctcccaactggcaagccgggaaaccctgcggcggcgaattcttcattgggtctatcgcaaccacacggtcatatatatttcatccattctgcttccgacggtcgcggcggtcgccgccgttgcggcggtcagctctttcgcgggagggagcgcggcgctaaccgcgcttgcgtcggctctctcatctctgcctgccagccagatagccgttcaggcgatcaactaccttgtgacgcgttttttgccgcctcgccttctgccgaagatgtcgttcgaaaaggagggcatccccgacgaattccgcacgcttgtcgttgtgcctatgatgctctcaaacatcggcacggcgcgcagggagatcgaaaagctagagatacgctatctagccaatccggaaccaaatctcctgttcagcctgttcagcgacttcaccggctccgacaccgagcgcgacagcggagacgccgaactccttgcggccgccgtcgatggaatcaacgcgttgaacgaacgccacggcgcggggcgttttcttttgtttcaccgcgaacgcgtgtggacggagtcggagcagtcctttatcggatgggaacgcaagcggggaaagcttgagattctaaacaggttgctgaacggcgaagcgcttcccgacggacagcagatcgtccgcgcgggcgaccctgacttgctgaagaacgcgcgcttcgtcatcacgctcgacagcgacactcaactgctaagagacacggcgcgacgaatggtggagacaatcgcccacccgttgaaccgcccgccgttcaaccccgcggacgccgtcggctccagcccgtacactatcattcagcctcgcgtcagctcaagtcttcccagcgcgacggcgaccgccttcagccgcttgttcacagaccccatcggaaccgacccgtacacgaaagcggtttctgacgtttaccaagacctctccggcgaagggtcgtatatcggcaagggcatctacgatccgcgagcgtttcaccatgtcttgaagaaccgttttccgttgcagaggattctcagccacgacctgatagaaggggcgcatcttcgcgtcggctttgtcagcgatatagaactgctcgacgaatttcccggcgactatttttcctatgtcaaaagagagcatcgctggactagaggcgattggcagattgcggactggtgcatgccgaaagcgccctcccctgacggcaaacgcgttgcaaatccgctcagcgctctgaatcgatggaagatttttgacaaccttcgccgaagcgttgcgccggcggcgtccgtgttgtttctcgcttcgtcatggctgatatcttcgggaatgggcgctgcggcaagcttaatagttgggttatcggccttcttcccggtgttttcggagcttgtcacgcgagcgaccggcaagcgcggggcggaccccctgtcatggcgacaactagcgcacaacgcgaaacgttgctgcgcggaactgcttttcctgccgcacagggcagctatgtccatagacgcgataattcgcgtgttctaccgtcgtttcgtaagccatcgcggactgcttgaatgggcgaccgcgcaggcggttcaacagaaagcgtccgaacggcttcgcccgcttctggctcaactgtgcgccgtcagcctgttctctgttgtcttaggaatcgcgatatttctgtcgcgcccggataatctctcgatctctttgccttttcttttgctgtgggcggcttgtcctatagcagggatgcgtctgagcgcgccgcgccgcatcgcgcgcgcgcgccctatcgcccgcgaagatgaaatcatgctcagagtcacagctcggcgctcgtggcgctatttcgaagacttcgtaggcccggaaacatcttggttgcctcctgacaactttcaggtttacgccggaaacaatcttgccatgcgcacaagccccaccaacatcgggttgggcctgctcggcaatctgggcgctctcgatttcggctacctgacctgcgacgaggcgttcgagcggacggcgaagtgcatgaaaaccatagcccgactcgaaaaatacaacggacaccttctcaactggcacgacatcaagacgctcgaccctctcgaacccagatatgtgtcgactgttgacagcggaaatctgcttggcagcctgtggacgctcagcgcgggctttcaggaaatcatcgacgaacccgtcatcgggccgcaggcgttccacggccttctcgacacgctccgcgcgctgcgcgaggcgcttgagaaaagcgacagagcgagagttcataacgaggcgttgaaatttctcgaacaacaactggccgagcctccgaaacgactgtgcgaactcgcgactcggcttttatccttgacaggcgctgtcgcagagttgcgccgggccgtgtgcgaaaacgccgcgccacgcgatgaggccgcgcactgggcgaaccggactgaaacaatgcttgcgtcatggcgcacgctgatagaccgctatctcccgtggatggaagcgattgcggaagagacgaaaaccgccggcgacgagacaagaaacggcgcgattgcggactgtcttgaggctctggaaaaagcgccctccatgcgacagctctccgagggaaattttttactgtcgaagacggcggcaaatgatgaaaacaatttgaacgaaccgcgacgattggaatgcggacagcgagtcgaagacgcttttgcccgcgccaaatggatggccgccgaaatgctcgaccgggtcggcagcctgttgaactccgtcaacgagttgtcagaaagcatgaacatgcgcttcctgtacgataacgagcgacggctcttctctataggatttaatgtgagcgagcaacggcttgactcgtcgcgctacgatttattggcgagcgaggcgcggataggaagccttgtggcgatcgcgcgcggagatgtgccgggcaagcactggctggcaatggcccgtccgtacggctccgcgggggggccgccagttttgctaagttggacaggcacgatgtttgaatacctgatgcctcttctcttccagaagtcttttgaaaattcgctcttggaccacgcatgtcgggaagcggtgcgcctgcaaatcgcttatgcccgccggagaggcgctccgtggggcgtttcggaatcggcgcacagcgccgtggacgcgaatagaacatatcagtatcaggcgttcggcattccggcgctgggactgaagcgcaacttgggagaaaattttgtagtggccccttacgcatccatgctcgcgctggccgtctcgcctcttgaagccatccgcaacctcaagcgtcttgcgcgcatgggaatgtcaggcgactacgggttctatgagtctattgatttcacccgcgaacgaagccgcgaaggcgagcgcggcgtaattgtcgaagtttatatggcgcaccatcaagcgatgagttttctggctatcgacaacctcgtcaacaacagcgcgattcgacggaggtttcaccgcgacccgagagtgcgggcgagcgagccgcttttctatgagcgctctccggcggctccgcctatctaccaaggctcagaccgggagcagacttctttccatgccgcgccggacgaaatcgctccgtcaacaagcgttttcaacacgcctcattccccacaccctaaaacgcagatgctttcgaatggcaactactctctaatggtcacaagcgccggaggcggctatagccgatggcgagacttcgacatcactcgctggcgggccgacacaactagcgacaattggggtttcttctgctatatccgcgaccttaagagcaagcgggtttggagttcagctttccatccggcgggcggcgacattgagaactattcagttagcttcaagcttgatcaggcggagattcgccgctcggacgatggaattgaaacggaaactctcataatcgcggcgcctgaagacgacgtggaaattcgccgcataacactcattaacaggtcaggccgcaagagagagcttgaggcgaccacctacattgagcttgccctcgctccgcacgactctgacaggcagcacccggcgttcagcaagcttttcgcgcagactgaaacggagcctcggttcggcgctctcatagccacgcgccgcgtaaaaaatcccgacgagccgaggatatgggccgcgcatttgatttgtatgccggagcaggacgagcccgccgacgagctggagttcgaaatggatcgcaatcgcttcataggtcgcggtcgctccttgtcggaccctgcggctctcggcaataaattgtccagcgtcgcggactcgtccatggacccgattttcagcttgcggcgaaagataacgctcgaaccgggagcgcgccgcgatttctccctcattctctgcgccgctgaaactcgcgaacaggtcgttttgctcgctgaaaaatacttcgaccccaattcggcgtcccgcgaactagacatctcatggagccattcccagcttgagcttcgccacctgcgcattaacccagacgacgcgcgtcgattccagaaactcgccggctcgatgatatatcccaactcccggctccgtccatggagcgacctgctgaaacagaacaaacttgggcagtctcgcctatggccttatggaatatccggcgaccttccaatcgccgttgtagttattaaacaggacgcggacatcgacttggcgcgccaagcgctgcaggcccacagctattggcggctgcgcggcctcaaggcggacctccttatcataaacgaggaatccgcgggatatgaacagcctctgaacgaacaactgaagcggcttgtcttcagccattcgatgaacacgggcgtggacgtgcggggcggcgttttcctaaggacagcaagtcagattcccccggaagacatcaaccttatgttggcggcgtctcatgtgtcgctcgtcgccgcgcgcgggcctctggcccaacaactcagcattcccgccgagaccctcagaacgctccccccgctcgccgttaaagccatcaaggaagagccctccgcgcaactcccgttcatcgaactgccgtacttcaacggactgggcggcttcacttcagacggcagggaatacgccatcttcctcggccccgaacaacagacgcccgccccatgggtgaacgtaatcgccaacccctctttcggaactcttgtcagcgagtccggctcaggcttcacatggcgcggaaacagccagcagaacaggcttaccggatggtctaacgacccggtttgcgaccctccttcggaagtcgtttacattcgagacgaagacacgggcgcagtctggacgccgactcctctgccgattcgcgaacgcgacgcttaccgctcaagacacggcgcgggctacagcgtctttgagcacaacagccacgcgatagaacaggagcttacgatgtttgtgccggtcaacgacgacggcggggaccccgtctgcgcgcgcaggcttaagctccgcaacgactcgtcccgcgcaaggcggctgtccgtgactttctacgtggaatggacgttgggcgagcatcgagagaatatgcaggcgcatgtcgtcgccgagtatgaccgcggctcaaaaatgatattggcgcgcaatcgctaccgcgcggattacagcgaaggagtcgccttcgccgcgacaatccctgcggcgagcgcgcacacaggcgaccgcgcggaattcataggacggaacggaagcctgtccgcgcccgcggcgctcaagcgagccggattgtccggaagagctggcgccggatttgatccttgcgccgcgcttcaggtgaaaattgagcttgcgcccggcgaaagaggcgaaatcatctgtctgctcggcgaagccgacaacgcgaccgaggcggccgctctggttaataaatatcgcgacggcggctccgtcgcgaaagcgcttgagcaaaccgccgcgtggtgggacaaaacgcttggcgccgtcagcgtcaacacgccatctcattcggtaaacctgttgctcaaccgctggctcctctatcaaaccataagctgccggctgtggggcagatcgggtttctatcagtcgggaggagccttcggattcagagatcagcttcaggatgtcatgtccctgctgtacgccgctcccaagcttgctagggaacatctgcttcgcgccgcaggccggcagttcagagagggagacgttcaacactggtggcacccgcagagcggggcgggcgtcaggacgcgatgctccgacgacctgctgtggctgccgcacgcgacggcgcagtatgtgcgcatcacaggggacgcggaaatactcaaagaaaacatcagattcattgatggccggacgcttgacgaggaagaatacgaagcctttgggaatccggttgagtcgatcgagagcgccacgctgtatgaacattgccgtttggcgattgagcgcggctcgacatccggcccgcgagggcttcctctcatcgggactggagattggaacgacggcatgaatcgcgtcggaataaatggcaaaggcgaaagcgtgtggctcgcatggttccttgtggacgcgctcaaacagttcgccgcgctcacggagatggttaaagacgcgccggttgcggcggagcgataccttgagagagcgaagcgtcttgcgaaggccgtcgagaaacatgcctgggacggcgactggtataagcgcgcgtggttcgacgacggctctcccatcggctcatcgaagaatgaggaagcgatgattgattcgctgccgcagtcgtgggccgcgctgagcggcgcggctgaccctgcgcgcgccctgcgcgcgctcgaatccgccgcagagcgcctcgcgctcaaagacgagaatatggttctgctgtttacccctcctttcgacgccgggccgaaggaccccggatatatcaaggcgtatccgccgggagtcagggaaaacggcgggcaatacactcacgcggcggtgtggctcgccatggcgtttgccagaatcggcgacggaaaccgcgccgcctctatcctcaaaatgttgaacccgatagaacacgctcgcgaaccggaagcggtcgcccgttatgctgtcgaaccttatgttgtcgcggctgatgtctaccgacttcccggtagaacaggacgaggcggttggacgtggtacactggcgccgccggctggatgtaccgggcatggatagaggatgtgctgggaataaaaatcgccgccggcaaactgctctttgatccggttcttccatcagaatgggacagagcaagcgtcataatccggcatgaagaagccgtttatgaaattgaaatcgagaaccccgacggagttaaccgaggcgtcgcatgggtggagatggacggccaacgtctgaagaacacagagattcatctcgatggagaattggtcaaacaccgggtgcgcgttcggatgggggtttcaactcagtgaaaccagcgcgctttgaacatggctttgaagtgattgctaaaagaatcaaatgacgaatttgggagcgatgcgctgagcggatagttcgcgaggcgcgagcctcatttttgaaatagggacgcggtttcctcgccctgtaaaggcgatatttcggcgcccctgcttcaattattcagagagaccgaggcagagcgccgctgtgataattgcccgcgtttcgccttctctatctgcgaatccgagttcatttggccagcgtctcggagattgttttcaacaaaacttcgccgatgaatggtttctgaacaaacgcgcgcgctccgtcgttcattaatcgcatggctttccctgcgacgctgaatcctgaacacaggatgactttgacgtcattccgtatttgccgcaaagccgcaaacgtttcggctccgtccattctcggcatcatcatgtcgagaatcaccagtctgacatcggcttgattcttcttgaacaaatcgagagcctctttgcctccgttggcggcgattgaactgtatccttgctcaataagaaaatccgacatcatatctgtgaagtctttttcatcgtccacgataagtattgtttcttttttgcccttccgcaatgtttcgtccgcttccggcttgtaggccgttggcgcttccttcgcgcatggcagatacaccttcactttcgttccttcgcccggtttgctttccacctctatcagtccgttgtgcgtctcaactatgctcttggtcaccgacagccccagccccgtgcccgcgcccttgtcttttgtggtgaaaaacggctcgaatatttgttcgagcatatccgccggaatcccgccgccttcgtctcgtatgtcgataagacaatattctccgggtttaatccctctgcgagaactgcaaaattcattgtccagataaacaggagccgccccaatctctagtttgccaccctccttcatcgcgtcgcacgcgtttgcgcaaatgttgagaaaagcctgtccgagttgatttgcgtccccgcgaatcaggatatcgcattccggcgtcgttatttcgatattgttgaggacgctgacacgcaatatgtccactgtgtcaatcaggatatcgcgagccgaagcgtcgcttatttccagtttttcctttcttgcgaacgtaaggagtcggcttgttatgtttttcgcccgcattgcggacttaattatgcgtcgcatgcgagcttggttcgggtcttccggcgacatcgagcctaaaacgacttccgatgttccgataataacagcgaggatgttgttaaagtcatgagatatgccccctgcaagccggcctaccgcgtccatcttttgagactgtatcagttgttcttgcgcgcgcaaaagctcttcggtccgttcctctatgacttcttcgaggcattcccggtattgtttaagctcatgctccacgcgcttgcgctcagagatgtcgcggatgttgcactggatcgcataggcttcgctctcaagatatacgttgctgacgaactcaacgtctactgtttcgtatgtgaccgagttcgagtcgatgattcaacgccgtagatcgccctttattcgttttttcggatttttttaatgaaaaatccgggatagatggaagtcgcaagcctagttcaaagcgttctcagaataacgctcttcacgcatttgttccgacaggcgctcttttgctctgtgaattcttgatttgactgtgccggtcggaatcttcatggctgatgatatttctgaatatgtgtatccgttgaaatgaaacattgaaaacaccagcctgtacatctcaggcaacgaataataacgcctcattatctcttcatttatatggttgtgaaaaaacaccgtgtcaggcgagtccatgtgcgatattcgtcgcgcaactttcaatgccaatttgcttttgtcgtgttttctatcgtcaaaagagatttcttgctctttccttctttttactttgttgatatgcgtgttaatcatgattctgctggtccatgcccggaaattcgtgtcaggcgcaaaaccgccgtaaccttcgcaagctttgagaagcgtttcctgcagcaggtcttccgcgtcttccgcattgcttgctatctgcaaggcgcgagaccacagatatgtcttttctttatcaataagtttttccacgtcttcgcggaatgcttccgtcatagtcgctctcctgttcatgccggaaacgctttttaggcgcgggcctcgacatcgttttcatgcgcaaagactcagaatgtattctgcccgtcgcgttgcgcgccattgctcaacattaggctgagatcgcttttattttgcggcggcgacattgcgctgagccagttgcagataaaagaaagcgtgttcgttgtcgggacgtattcgaagagcttcgcgccattcaggaatcgagtccgcgaagcgcccctgttcgaacagtatgcgagccgtccatagatgcgcggccgcaaaatcctcgcttgcggtcatcgcctctctgaacatgtcaagagctccggatatgtcgccaccctgatatcgggcaatgccgctccggtgcgccacatacgcgttgcctccgttctctctatagttcgcggcgtctttccgcatcatcagaagaacttcgtcttccggagcctctttgatccctttatccagaatagccagcgcctcgtcgtacatgccttcattctggtaaatagtggcgagccagacgtacgcgtccgccagtttcggatcaagcaataatgatttctcgagttcttcaaccgccatccagtaatacccgcctgttatatatgtgtttgctccaagccagcggcggcaatctgcggcgcgcttttttacatcttctatcctccagccttcggggtacatcgttatgtaataatcccaccactgagccgctttgccccaccatttcgcgccctcgtacgcccgggccgcttttgttataacgttcccgtctctcggattgctttgcaaatgcgtttcatagtgcgcgatggcggcgcggtaattttcgctcgccatcgccctgtctcctttttccaccgatgcctcagcaaccgcgcttgccagcaatgaaaacgcaagaatcgtcgcggcaacgatgttgcgtcccgccgcgcctcggcttgaaccctttgcgcaacacaagcatctcagaatgttcattgcttctatcttcttgtaatgtttcattatattcctccgcgcttttctgtaataacagcgctatttgcacaaatgcgctttttaacaagtcgtctcttgttcgagcaaaacgcattagctcagcctctttctaattccttgcgtctagcgatgtcggttaagcttcagtctcttgctttttcgtgtgaatcaggtccgccaccgcatcgccggattcatccatcgcctttttcatgctcttggtaatatcgcgcgccgtgtcggcgacatcctcttttcgagcagcgatcttgtctatggctttttcaacgttgtccgacattttatccatagccttgtcaacgcgctcgcctagcgttcccttgtcgctcttgcttttatcgacaacgttgtcgatgtgttcgccgatcgttttcttttcattcatgttttgtttctcctttgtatttgtttgctgcgtcaatgatacgtcgctcgcttaacaatcgctatcggctaaaaagcatatgtttgtaaccatcgcggtttatatatttagccacatcgactaacggatgaacacgaagctgacttgatgacggattgcgccggacactaatgctcgctctgccgtcaagaggcgacaaccgccgccgcaaggctgtctcaggcaacaagattgaacaggaaaacattatttattttagtttgaagcgcaggcttcgcggagacgaggcgtttcgggcgcgttcgcgttcagataatccgttagagacaacaatttaagcattcgcatcacattcgcctgcaagcattgcaattcgaatgagccgctccatctgtcagtaagcgttcttaattgcgccaaaagccccgcgccggcgcagtcaagaaaagtcactcccgccatgtcaaacgaaagggacactccctgacgcatatactcgaacacaaggtctttaagtctttggcatacatcgtaagccagttcaccctcggctaatatcaatgtggtttcattctcattaactatatcgcaactaaacattgtttcgcatgtcctttcaaaacacagtagcctccagttaaacgattcttcgccccttaatgactctcaccaatacaactacgactgcgatgacaagcagaatgtgaatgaagcttcccatcgtatatccgctaactatccccagcaaccacaaaattgcgagtattaatgcaatcgactccagcatgagcaatcccccggtatcaatcgtttctgacgccgcgcgcgccgcgcttagtcaaagcgtcatccggttgaaaacatcattctgtgacagattatgatcgtaacaataaggcgttataacgccttgcaaacagtcataaacaacgtcgaattcgcatggcttttctatatacctgtttgcgcccgctaaaaatgccctcaacctctcatgcatccctgtctttgccgtatgaatgattatcggcatgtatttcgattggtcgttcatttttatcttgcgacagacttcgattccgttcatgtcaggcagcataatatcgagcaaaaccacgttaggttttttttcggtcgcgaaggttacggctgtttcgccgcttcccacatcgaaaaccgcgaaatcatctttcgctaaaaataactctcgcagtttctgtcgataaagcttatcggcgtccgctatcaatattattcttgatgccacggcaaagcctccttttcgcgcttgttttgtttgcgctcaacattaaagggacactgtccgcgcgctttaatgaattaaacagttgagaccttgccgcaatccaagaagttcaaagcgaggccgagcgtcgctttccatgtttcagcgtgagtaacgccgccggcctgctcgtgacatgcccttggagatgacattagattatgcgcgcgtgagccgcttaatcagagcgcgcgcatagccgcgcggaacaacgcgccgtcatttcttcgatttaactaggtctgaaatagcgtcgccggtgtcttccacggctcttttaacgcttttggaaatttctcttccaactttagagacgtctttttttgccgattcaagtttatctttcgtcttgtcgactttgtctgaagccttatccaccgccttgtcaacgcgttccccgattgtctttttgtcgctcataatcttttctccttttgtttttgaatattattctcaggctcaagttaattgcgcctgattgcattcatctatgtcgcagactgaatgagagccgcacattcgtctgttatcctcaatccatcgagggtctggcgaacaacttccaagagcggttctatgtccgacgatttggtcacccatgctttcgcaagatacgccctgaaatctttgcgaaacagcggatatgcggtgttcactatcaccgtcctgccgcctgcgcacaaatcggagagcgcctcaagcccgctcatctccggcatcccgatgtctagaaccactatgtccggctgccattcgcgcgctcgctctatcgccgacgctccgttatccaccacctccactgcgtatccctctgtttcgaattcctcgcggtagagttcggccacgcttgtgttgtcttccgctatcaacaaccttgtcataggcttccccctcagccgcgcaatttcaacttgcgccgcttgtcatcctttgtcattcatgtacttcttggtttttcgttctttcttattgaaatactgtttgaacttgttgatttgtttctttactcccgtcaattcctttggtttctgttctgactgctttttcttggcggccgccgctgaggcgtccttcttctttttatcagaagcggatttggctttagctttgttggcgtctctctgcttctcgatgtccgcccctatcgctttgaagcctttattctgcttgcgcatttccattattttctctgccgggtagttataatgtcctgacataaaccttaaatttactagatttacgatgtcgtcatcggcgagttttatcttgttccaatctttttgcggcttgtttttataatacccgtaggcctttccataaggaggccctgccgccgcgccctctctgagcggcacatgatacgattccgccccgaacccgtatcggtttgatatttgttgccacgtttggccttttagccgatagtctgagacgatcttaggagccacattggctttccgcgaaataaaaaacacaaccggaatatcttcttccgcgatgtttcgttgcctgacattcgcaacttccgtcttcggaacggcaaaatactcgcttatcgaattcataaaactgtcggaggcggcgtccgcggctctgttgaccgcgctccccgctaacgattcgcacatggtctcttttgtcgcgacagtcatcgcgaacaaaaccaatatcagcgccaaaattaatatccttctcatctttacacccctcgttttagaaatattccgttgcatacatcatattgctctcaagcgggttgcgctatcggcaaaaaagcaatctttattagctcatgcggcatatatttgtaactgttttagctaaactcagatgaagctgcgccgcgcaataaatagcgtttgtggctgcgccggaacttatatgctcgccacatttagcgcttcattaagagacagcttatcaaagggagccttaacgcgtttggacatgtttcttatttcaaaggagccattccaagactcagccaacttcttcatgcttaacaaaagcccaacgccggcgctgtcgaggaatgacacttttctcatgttgaacaacaagcgcatgcccggactcatacagcttgtgacaatctctccgaattcatcgcacacatcgtatcccagttctccttcagggcaaaccatgatgtattcatattcattgaatattcgatacgtaaacattgtctcccccttttcttcgcccgcgcgatgcttttctctgactaatgcgcacattcgcttttttcttagaacctatcagagttgaccgcatgttatgagtcgagtcattattgaaggcttttgcgttgcgcggcgcatataaaactccgcgcttttcttatttcggcaatattggcgcattgtttaagctgttggatatctttctttttgcgaaatgcttctttattaatggagcttgcgagccttttgcgtccttgctcataatttgtcgaatttcattgtcaggcatagcaggcaatctatttccagagtctgccttaatttcgaaatacggttgcgcatgttgtcggaatatagatactttcacatcggcgtctgatttgccagcttctaggttatgtgtgttatcgttattcttgctggttttctcgccgctttttgacactttatcaatttcttgttcgacaagctttatgttatctactttttctgtcatgacaatcgtctcctttgagatgcttcgtttatatgctatttgccgataaaaacacgatattcgcgactttgacgtctttattaatcataaacagcaatactttaggcgctatcggcgcgagagcatttactattaactattaagtcttttatttatagctttttcgtctattgcgacatgaataaacatgcaaaacaactttcgcgtcaattcttacgacacaaacgcaatccttcttgttgcggagattgcagatcgcagttgtaagacgacaaataaaaaagccctctataaaagagggttatttgcacatggtcccaaggaggacctattcgccgttttaatttgagcgcctcgtgccgataaagcggatatatgactacagattctttctataactgatgcccacgcttatatcttccacgctcagaatgccgaaatgcaatttggcggattcggacagatcgtatctcatgccgaaattgaagtggtctccgtcatactcttccatgaaagtggtttttttcagggccttcatgaacggcgatttctttgatataaggaatcttgcttcgagtccgtagaacagggagtcgtcgatgtcggaggttctgtatcctacttgatatctcagcgcaattttgtcgatccgatgttttgaacggagctttttaccggaagtaaagttcttgctgaccaccgcgtatttagttctgtttgtggaggcgaggtctaacaatcccgcgcttacagcaggatgctcttgcgcttcaggaacaaaattccatttaaggttcaaagagccttcctgttgaactttttcaacgaatgtcacgcctgcttcaaagcgacgaggtagcccgacgttggctttcacataatccttccatccaaccacgtcaacgctgacgtcgtaatcccacggggcgagcacatacgcgctgggattctttacaagccctgtcggccctgcgatagacggaccgttcggtatcatctcgccgtcaatatatggatcggccatcgtatattcatgcgtttttgaaccgtcttccgcatagcacaatgcggacgccgccagcgttaatgtcgcacaacagaccgcgagaaacatgtaatcttttatcagtcgcatcaactatcccccatgttcgccaatgtttttcatccttaataaatatatagttggggaaatatacgcgctatcggcaaaaaggcattatttcataaccaatgtggcattattttgtagccttttaggctaacgagcggaatgagcaaaattgcgctcaaacaacactttaatatttgctcacatgaaagatagttcggcgtcgcttttttggtgttgcgcgtcgctgctttcgaaaagtatcttcatctcgccgtcggcgctaatcattatcgggatgccgccgtagcggcgcgcggattgggcggctatggtgcgcgctccgagatagcttccgagatcgggatgctgttttatcatagcgcctacggctatcaactcatcgccgtcaaatatcacagccccgtcaagaccggcgatttcaagaaacagatttttcctgctcgtcaaccgcgcgttcatgccgaggcggatatctcgtattaccggggagagcatagcgcgcgccgtgtcgggcgtgggcgcgattcctcctattatcgactgtttattaaccacgtgttcgataactttatggtcaggatcgtacactagcaaagctccgtgacgcatgtaactgaggtcaaacatcagctcgaaaagatttcttccgacgttgatgtcgcccataatgtcgcacacgctgtttttgaacgtttgggcgtcatacacgcgccatcgtcccttcctattcgcggcaagaagtccgcgcgagtccattatgaagatgtctccacgctgtcgcagatgaactgagaattctccgcttttcaggattgaggcgaatggctcaagaaactcgggaataaacttcggctcaaaagactcgctgacatccttccacaagatttcctgatagtctaaaaacctcagttctctgtccacgcgaaaatagacttgcatgctcgacgcaagaggatctacaatcttttgaatcgaagcgtcagacagcgacaacgcgccctctccctccccgatcacgatgttagtcatcacccgattgttctcgtaggttctgaacctgacatcctcgatgtatgcgataaacttgttccagttaacgcccgcgtcgaatatctcaagccatcgcaccgcgatatcctcttcgacctgttgcagtgagcgtggggtcggcacgactggcatccttgctctccagatatcgagattgttctgaatatatgatattagcgatctcaaattcggggttaacggattgtgagagcaaaatacgactgtgtgagcgcccattgtcaattcgaacgcatgattcgcatgctcgcttgaataccagtgcgggaccgtcgagacagcggccttcattatgatgcgttcataagatagcatttttcaatatccaatgttaaatgaatctctgaagaatgcgacctgccggagtttgcgcgataatgtgatgtctaatcattcaagactttgtatatgattgttatatcgcggataaccggcacagcttttttcatgaaaaattccttcaatgtggcttttcgcttaggaacgttgatgacatcgccgggacgcagcgacgggatgtcccccgtcgtccggttcagattccccgcctcgattatctcaggtcgttcagggtagtttcgcgttatcgtcaccccgctgtcggcggcgttcgccgcaaacccgcctgagcgcgttatgatgtctagaatcgtctgcccctcgacataaggataaattccgggagtgttgatatatcccgtcacagttatggactctttcttcgcgggctttacaagcacgacatcgttaggaagaagctcgaatccgtccggaggatttctgactgaaaccgaactcatctcgccttgtcgtatcaatgtcacttccgatgagaatatctgcgcgtcaagggccttcgccgcggctagaagtccgattaagttggctgcgttttccggaatcgggtagaaacccggctccggaacatctcccagcacctacactgaagtcgttccatgatatgaaacataaatggcgtcgccgtctatgagttgaaaagtttccgcgctcggcggcgatatcgagcctcgtttcagcgccaccggcatggacacgccgcttctgacgacgaatactttgcgttcatccattctaggatgcgcgagccgcgcctgcgcgaggagtttgtacatcatatacgggtctgtgagttcgtaaggccccggcgctgtgatttcgccaaggatataaacttgcggcttgtgaaacctcgtcacaagcaacgaaaccttcgggtcttttatgcgcgcggcaatcgtctgttccagttccgcgcgtatttgctccgttgtctttccgagcgcgtacatgtcttctatcagcggaaacgatatcatgccgtcgggcctgccggtcactgtttttaaaaggtcttcattgccgtaaaccgatatctccatctcgtcattcatgtgtatccggtaaacatccatcaccggattctcgccgattgcgccggctcgcgcgagcgtatacgccgccagcacggctgttgccgttaggctagccaacaacataatgcgcgagcgattcattgtcataacctccagaatttctagttgcggactgcggcctgcgcgccgagcggcgccacagtcgcggcgaactatacttgtgatgacaaccctctaaggtctgcgacttgcttgcgaagactgcggttttccgcgcgggcgtccgctctcggtccgagaaatataaaatattcaaccgcgactccgagaataccactgccaataatcagcagaggcagtttcacgctcatagtcgccaccagaagatttatcgtggtgtcggtattgttgacaagcgcgagaatgacgctgattgtcaaaacaaccgtgccgagcatgaaccagatgttttcccagaaacgtctgcgttgcggcgtcgcctcaagcttagcctcggctatggcgttttccgcgtcttgcgcttgctttatgtcgttttttcctgtcatgcgttctccttttttgcggacgcggagcttatccctcaatgtccacaacgactccttcctccgccgcaagcgaattaatgattttattcaggtcttccccggtcacgtccagaaacggaatgtcttctgtttgcttgataacaatcccttttttctcgccgataagctgtatgcgaaatccgctgttctttgcccacactctgacagagaaaggctgtttgcgctcgatcatgctttcattgaacttcgacactgcgtccagcgccgtgttccagagcgctgattttggccgggctggcagcggcaagcctgtattgcgatacagaaaactgtcgccgtcggcggcgattccggttttgcgccccactttttttcccactacgcgcgagaccgggctgacggtcgaagtctgatcgattctatctacgctgtcgattgaatcagagccgagcgtgcgggtgaactgatctcccataggattctccttttttcgaacgtcaagcggccggtctcgatcaaggcccgcggctgctattgtttaagtagaagccccgcagttgtagcttccgtcttttcgccgactgtcacggcttcgttcttagcgcttgctttaggcggccgaaaaacgaaatcgtctctcgaacatgccgccatgtgcatcagggccgcgccttcgctcagtatgattccgccggatttcacggaagcgaagaaaccggctccttcgcctttgcccccggtcgatttaatcggattgattttaatcagttttatctttgcgaacgcgtcttgcgcaagcgtcagttcgggcggtcgccgtctatcctgttcctcgtctaggacgaccctcgtcaacaccgcttccatcgcgtaagatttaagcagattcggaaagatatccgcaaacacgccgtgattgtaaaataaatcaagataccaccatgtgcggtcgatgaaaacaacccagccgacctgcgcctccgtaaactctatgcgcgagacgtactcatcgtgaaggatatccctctccgcgtatagcgcgcagatatcgtagttttcggtctttatagacgaccgctcaaaaaggccttcgatatgcttccataccatattttgatccaccctcgacgcgccttctttgatcatcgtcggaaacgacttctcaaggcgctctcgccggaggctcgccggagcgaaatccgagcggtaaaaagcggggtcggtcgccgttattctcgaagctcccccagagagcgcctcgcattcccagcggctcgcctcgacgctgacagcgggtaaaacaacgctttcacccggtcgaataaccgcgctcgccgtcagcattctgttagccgctcctccgatcaggattgccccgtccagcgccagcgcgggcgtgtcgccgctgttctctatgcttaccgaattcattttgcctgtttccatcgcttttatgccgtcgccgagttctcccgcgcctatgacggtgaaaagctctttcgcctcgaaggcgggcgaaaccaacgtcagagggaatacggcaagtcctccgtattccctcatgtcttgcactttgaggtagtccatgaatattgaaggcgtcggcatgattttctccttcagcccgagtttcgcgttgccgttcagtctttttctgaagcgtctttttttgcggcaaaccgctctttagcattgccgacagcggcggctgttttatcgtgcgcatgcgagaccatgctttttgcttcgccgcaaacgtcgcagaccttgtcagacacatcgtcccattattccctgatggcggcagtagtttctttgccgcttgcaggcgctagaagaagcgccgctccggcccccgctatcgctcccgctccgaagcctatcaaagcgcgccacacattagtcctcttctgcgcgttaatatcgttctgtttggatgttcatttcttttctccctttttgatttctaaagcacatgcctataatgaatatttctatcattattctaaattgttcaaccatagcatcctcctgatatcccgccgcgcagagcatatttgttattgcgcaacaaataccttgccgaaagaaacacgacgacaattcgtcccatgaagatgtatgtcaacacattaatgatacgattgattggaatccgggagtatcggcaaaaaagcaatctttattaactattacggcattcatttatagccattccggctaataaacgccgcgcccctctgagccgtaaatgtggttcgaaaaaaggcgttgatattttcaaatgtcagatcgggcgccactcacaaccttgtgcttgagcatcgttaatattcagggattgttaaaaaacttgacactttattcccggaacggcgaaaagcggggacaggcagccgcaaaagacgcgttgcctgtccccgtttttcgctcgaatactcagccagtgaaaaggcacaatttggagtgcggcgatggttctgggtgccaccctgcatacttgagtgaatggcagcaagttggtatcagtcataagaaacgcgtgatttggaatgcgcgattcatcgcctgtttcctgatgaaagcgacatttcgagcggggcaaccccgcccatacataggaataaatgcggcgccaacgaagcagttcgcctatgtgataaagcgttccgactcgccagttcttcagcgaatccttttattgcaatcgagcgattaatacagacgcgcgcgcgcgcctgatattatgatttttcgattagtcctttattaatggcgaaaaacgtcatgtccgaatcttttttcatgtcaagcttccccatgatgcgatacttgaaggttttcaccgtgctgtaggacacgtcaagttcgtcggcgacttcgctcattgtcattccgcgcgccatcctgatgaatatctgatactctctctttgaaagctgggaaagcaggtcgccttctttgtcatggtcgttttgattcgttacggctccatttgaagccgagaaatagatgtctcccgccgcgatttttcttatggccgcgcatagttccatggctgagattttcttgcacaaatagccggccgctccgctcttaataaaacttattgcaaactcttttctgtcgtatatcgtaagaattagaatttttgtgttcagtttcaactcgacgatctgttttgtggcttccagtccgtcaacaaccggcatttcgtaatccagcacaaccacatcgggtttcagctcgccgcacttctgaacagcctcgcgcccgtccgaggcttctccgacaatctccatgtctttttctccgtcaatcagcctgcacaatccggcgcgcaccactccgtggtcgtccgcaaccaaaactcttatcatctttttagcccctccaacgggcttgtgaaccttaattgtttctaccgccgcgtttgcgggttttgatttcttttttgcttttttgccgggcatatcgcttcctccctctttttcctctcatatcggaccgccaatctctttcttcacattgaaaggaatagccacttttatgtgtgttcctcttccgggcgcggaacatatttcaaaccgcccccccatcatgttcgcccgctccctcattccaaggatgccgaaattgtatctgccctgctcgctgtcttcttcaattccgcaaccgctgtccttcacctgaagaacgatttcagaatcagtttccttcaaagatatcaacgcggttttggagcctgaatggcggacaatattcgccagagcctcttgaagtatcctgtacagattgatggcgttgtcaggactgacgcgagactcgtcgacgggcgttatcctagattctatgaagatatcgctggcgttttccaaatccgcaatcaatgttttcatagcggcgttaaaccccattctatccataatcaaagggcgaagaccgagacatatctgttgaagttcttccgacgcttctatcgtctgcttaatcaaattattgtaaacactcacatccgagcatgcgcattcgcggttcctcagccattcgatctcaagttgcatggagatgattttctgtccgatggagtcgtgaagttcgcgcgccacttgtttgcgctcttcttcctgcgattgaatcattctgcgggatagaaacatcaactcccttttcgcaaggctggcttgcgccttcttgcggtctgttatgtcgctcaaaacagcccgataaacaacgggcgtttgcgcgtcgcgcgtcacggaggtttctacttgcgcccacaacagggaaccgtccgcccgcttcgccattatctcgtacgcctgcggctcttttgtctccagtagtttcttgcggcgaaggtagtgcgcgtcctgatattctttagaaataaacgccgaaaacggttttcccaccagttcgcttctagcgacttgtagcagatttgaaacggcgaggttcgcctgaagaattattcccttttcgctgactgataaatatccgaccggggccatgtcgtaaaggtcgtaatattgcgcctgcgacatctctaattcatcctgcgcgcgacgcagttcctcgttctgcatctcgagttcaatctggtgaacgcgcaactcatggagcagttttcttatttcgtcggtggacattaattccagacgctcatgagcgcgctcagcgtttttatcggcttcgacctcggcttttttgcgaagaacagctaacttctcctcttcgcgtttgttatcgttcataatcatttctccttatgcaattcagccgccgctgcggctatcctccgcgcgcttgcgcaggtcatccgccggggcggccctcttgtcttctctgtcagacattattgtcgataccctgtttcaatcgcttacaattgaattgcatcgtttatgtcagccacttttgaatcatgcttatgtattccatattgctgaaaggtttggccaagtgatccattttcggatccctcgtctctaattccatcatggactgcaaatactcgaagttcccagacacgaaaattatcgggatttcggagtctgtttccctgattctttcgtacacctccattccgttcatatccggcaggacgaaatcaaggctgatggcgtcgaaagaattcatgccgtgtcgctccagagccgttttcgcgtcaacagctagggtcggataatgaccgagtttttcaagaagcaaacatagaattcttcccagttgcggttcgtcttcaacaacaagcacgtttttccctttcgcatctttattttcgctggcaaccgccttcctgtcgccgcgggcagcttctgtgattatcggcagcgttattctgaaaatcgcgcccttgtccgcttcgctttcgcactcgacggttcccccgtgcttgtccatgcaacgcttaacatttgaaaggccgtatccggtgccttttacgtccggcgggtaagctccggtcatatccccgctgcctttcaacgagaacaagggatcaaacatcttgtctttccattcacgaggaatgccgcagccattgtcggcaagttcgattcggatgatgttgttttccgcgcgcgtttttatgcgcaacaccggtttttcggttttgctcatagcttgtgtcgcattattgataaggttgatcaaggcgttttcgagaagcccggcgtccgcaatcacgccatccaaacccgctccgtaatcgacgaccacatcgatattcttcaaattgcctctcagcgtcttgataatcatgtctatcttgtcgttaaggctaaatcggcttagtttaagctgctgatccttggcaaagaacaataagttccttgccagcccgcctcctctgtttgcggtttccagaatggtttcgacatctgatttcacgtccggcggcaagtcttgggtcaggagcaattcgctcgttcccaagatgatggttagaacgttgttgaaatcgtgcgccatccgtcccgcaagctggccgatggccgccattttatcctgttcgagatactttctccttgcgtcttcgtgattcttttgttccgtgatgtcgctgagcgcggctcggcacacctgcgcgccatccgcttcgtgcgccacaatcgcatggattcgcgcccagaagaagtcgcggtttttccccgctattcttatttcgcatacctgcgggtcgcctgtttcaaacaattccttgcggtgtctgtagtaaatatcctgatcttcggagagaatgaatccagtcagcggctttttcaacagcgagcttcgagacatgcccagcagtccggcggcggtgagattcgcctccagaataagccccttctcgctgattgtaacgtagccgacaggagcaaggtcgtacaggtcgaaataccgcgcccgcgacgcttcaagttccgcctgcgcgcggcgcagctcttcgttctgcatctcaagctcaatttgatgcacgcgcagttcgtggagcaggcgttttgtttcaccgggggacaactcgtcaagattaacaggagcgccggatgcggcgttttcaagcgctttattctcggcccgcgcgcgaaggtctgcgtccgcttttccccggctattgtcatcgcacattgtcgcccccgttctttttcggcgatgttttttcttcgccggattcagaccggacacatttcccgcgcgcggttattctgacaaatgtgacaaccacgccctcgataacattttccatggttcggtacggcatgattcgcatggtgtacgaatcgcccttcagggtcttcacttcgcgctcttttgggatcagcgtgttcaacacatctcgcgcgtcggcgaccagcccgtcgtatccctcaaggttcgagacgatatgcccgacgggacgccccacatcgctgggtatcaggttgataatctgggtggcggtcggagtgaatcgcatgattcgcagttggtcgtcaacgaatactgtgccgattcccgtgcctgccagcaggttgttcatgtcgttgttggctctcgaaaggtcgatgactttctgctggagttcggcgttgactgtcgcaagttcctcgttcaccgattgcagttcttctttggacgtctcgagttcttcgtttgttgactgaagctcctcatttatcgactgcatttcttcgttcgaagaccttagctcttcgttggatgtctgaagttgctcggtggtggtctgaagatactcatccttggcgcgcaattctttcctcatcgcctccaagcgcgagccgatgtctgttgcgttgtcgaaagcgccgtctgtgtcggcggcgatttctcgcttttcactgtctgatatccgaggctcttcaatgatgacaatgaaaagctcttgcgctgtttccgcgccagtgggcgccggaatgggttttaccgtcagatttaccgtcgtgaagtcgccgtttgttttgacgcgcaggccgtcatggcgcacggcttcctttgagacggcggttttgtgcaaagccgttgttagttcgcggcccaatccctcgcgggccatcttcaacacattggcgacgcctgcgacgccgggcgaaggttccagaaaatggccggctcgtccatgtatgtacaagatgtcgccgccgctgttgactattatgccggtcattgccgcgtgttgaagcagcgccttctcagccaactctcgaagaggcattttatattcatccgttgtttttcttttttggcgggacgaggcttcttccgtcgccgaactcggaagaaagcggctgagggacgcgcgctgcgcgccttgaatgtcatctttgcgccgatatagttttgctttgtggtccacggaggcaaaaaggctcgcgaaatcgccgattgtctcggatgtgccgagaaaaagaaatccgttcggattcaacgcgtaatggaagaggggaatgagctttttctgaaggtctccgcccatatagattagcaggttgcggcaactgatgaggtcgatttttgaaaagggagggtctttgattacattctgttcggagaaaatcaaaatatcgcgaaggcttttgcgaatccgataggagccgccgccgggttcggcctcaaaaaaacgctccagcctctcaggcgagacgtcggcggcgatgctggccggatataggcctgttctggcagtgtcgatggcgtggccatcaatatctgtggcgaacacctgcaatttgaaattttgtttctgttcctcaagtcgctcctgcagcaacatggcgatggaataagcctcttcgccggttgagcatcccagcgaccagacgcgcagcgcggcgcctgcgggcttgcctgcgaagagaagcggcagagcctgtttctccagcgctttgaacgcctcttggtctcggaaaaaactggtaactccaatcagcaggtctcgaaacagggcgtccacctcgtcctttgaccgctgaagatattttatgtattcctctatcttgtctatctggttgacggccatccggcgctcgatccgccgatggatggtattgggcttatattgggaaaagtcatgtccggtctggttgcgcaacaggattaaaacctttttcagcatatcttccggtttagggagagagcctgcggccgggcgcgttgttttgccgaacgcatgggcggcgtaagcgattagttgcggcggcatttcggcgggcggcagaacataatccaccagaccggttgcgatggcgtttctaggcattccgtcgtattcagtggattccgggttctgcgccataaccatgccgccctcgcccttgatcgcccgcactcccagagcgccgtcgctgcccgtgccggagagcactatgcagatagctcgctcgcgctgatcctgcgcaagagagcggaaaaaaaaatcaatgggaagccgctggcctcgcggcgcggccggctccaacagttcaagcgtgccgccgataaaagccatgtcgcgaccgggagggatgatgtatgcgcagtttggctccaccaccatcccgtctttaacttctaataccttcattcgagtatagcgtttgaccaactcggtgaggatgctcttgtgatccggagcaagatgctgcacgaggacaaaagccatatccgggttggcgttcgcgggcatgcctgaaaaaaaagcctcgaacgccgcaagccctcctgccgacgcgccgattccgacgatggggaaatcctttgggaggtcttgttttccattgtctgcggaaacctcatccacaagcgtcttcttgggcgattcagcgggggccttaacatcggtttttatctttctaggcataaaacagtctcctgactagtcggattggccgatagagccggcaaatcttcggcaaatttcataacggcgagatgctttgttgacgtcgcattttttaagcgagaaccttagcctgatttttcctgtgaaaaatccgagttaagtctcttttgctgcaaattgcgcctcgagattcagccgtagaataaccgcgccttaatcccagaaaaggattcggtttgacagaagtgaatcctgtggcgctttccatgttgcgcaaagatgtggttctcagactcaacgaagaggctcttttctttaattgtaactcacttgaaactaactcgcgcgtgaattggaaaatatacttcgccggaatgtgaaagacgcccgtttaatctgcggaagagattgaaatatgccgctttatttcgtcgcgtaaagcggcgccataatttgccttttgcgagtgggctgggttcttgtcggtggaagcgattgccgggggcatagccgagcaggctagctgaaaaaccataaccagtagtcggaaataacacaaatttgtcgaagttacgcattagattcacggaatacatgcgcttgatgcaggccgagtctgtcgttgagcattttctgtatatgatcgtggagaccgtcaacgagggagcgtacgcgctccgtatcgggctcgacgtcgtggcaatcttcgtaataatgtattggcgtgtcgaagtgcaagtcgaactttgacggaaacggcaaaagtccgagcaagcccagccacggaaatatcggcgttatcggcagatgtttgaaccccatcactttcatgtcgagtttgccaattgtcatagcggattcctccgagccggtgacgcatgccgggatgattggagcgcggtactcaatcgcgtattccatgaatccgggggggaacgcgtccactttgtatttgttgaagatggtgtggaagtcgctctccgcgccggtgggaaacacaacaatgaggttttcgttctcgaagattttcattacgttttcgtcgcagccgactatctggccgcaccggttcaagaggatggagccgccggggatgcctgaaagcgccctgtggattattgttctgatgaatcgtggcttctcaagctccaccagcccggcggtccatatcatcacggcgtcgaatgggagtatcggcgcgtggttggacactatcaggccgactccttcggcggggatgttctgcgcgccgtgcgcgtccacgcgaaagtaattcatgtacatgaacagcgccgccgctcccgctttggatgtgacattcaggctggttccgaactcgtcgtatccgcttgggtcaaactgtatgtccgacatcagtatgcggtttctcatatattcggtcgctgtgccgtcgaagaaatgcttgaatttaagttttctgtagtcgtccattgtgttcacaagtcgatttcccctgattgcgatagtttaatcatcctcatcctagctctgggcgcggcgaagtctgattcgatgcgccgcagcgcctttctttttcctttccgcgcggattttctcaaatccggaggggtcgtatcccagttcctcgaacgcgcgcgcgccgtccactgtgaacggatactttatgtaattgagatcgaatttcagattgttcgaccacatgaacctgcctaaacggcgcgcgagaaattcaggaagcggcgccggcgtctttccgaacgagcggataacctcgcttaacggcaggtgtgcgcgccctctgatgttgtacgcgccgtgagcgttcgggctgcgcagaactcgaatgaaagcgtccagcatttcgtcctcgtaaataatctggaacatggggtcgaacccaagaagcgtgggaacaagtttgcctttcatataagcgcctagaatgctggctcctgaatctcgccagatgggaaccatccgcaggatgatcactctgaggctgtcggagctttccgcgtgcgtttggcaaatcatgtccgcctcgatgcggtctctgatgctgaggatgtctcggttgccaagcagaggacggctttcgagaataaccgccgggttgtcctgccttgcgccgtaaacgatggtggagcttggatatatgaactgcttgaccccgtatttgcgcgcaaggccgatcatgtggaacgtcccgtaaacgttcgtcatcatccgttcatcagtagtcaggctctcgccatggccgagggcgagatgcgccacggcgtctatggttccctcgtttttaaacacatcctcgatgcgcttttttcgcgcgtctccgtaaatgcgctttacacccagccacttctcctgtctgtcgtcgtccacgcagatgtcaacgttgacaatgttaatgtcttcgccccactcctcgcgcatcctcacggccagaagttttcctagatatcccgaaccgcctatcatgagcactttcatccgtcgctcccaatgttaacctgcgttggcgaaaaatgccggttaatagagttcttgtttccgaatatctcgttccgcctgtccccagtcctgaacagataggccctcttgtcggcctcgcagttcgtatagttcataggcgcgctttgcaatctgtgggctcaaatcgaccgcattctcgtctctttctgaaatgtcatgcaaaatcccagagagattctctttttctgtgtcgatcttacccttgcttcttgcaacctttttcgacacattacccgcgcgtttttcgatggttcttttgtcactcatgctttttcgtctcctttaatttcgaaatatcgcaatactccaacacgctcccaaaccaaacatattaaacaaactatgagggctgttgctcttttgagattattcgtattagcttaacaataccccaagccacaacagagtacacaataattgcgactaccgttgacggctcaaaaaccgaagtcgtttctatgccttctgaaagccccctgcggaatatgttttcaaaaggcacaatgaaaaatccggttaatccataaatgaatttcacaaagccgctagaaaggttggctcccatcaacttaagaacgaggcggaaaaccaaaagtatttccaaagcgccaaagaagtaatagactgaatatccgcccgtctgataaccggttgccttcttttcagttggagtcgtcacagcgcttgcgtcgccgatttgtgttgtttcagtctcttttacaacattttccatattcgtatcctccgattattattgatgcgtcggcccgcgttggcgaaaatgcggttagcaatccgattgaatactaaagcacaaagacagacgacgcatgcgtctgaaaaccgctgcatagacaacatgttgcatgcgccgtcgtttttgtgtggcccaaatctaaagcggcctcgccagaatcacttgacagctttcttcacgttctttttaatgtcgtgcgctgtgtcaactacggcttcctttactttatcagcctttttcgacactttattcacagctttgtcaacacgttccccgatgcttttcttgttgctcatagttttccgtctccttttattttggtttatcattatcggttcgtaatattctttccttatgcgctatgacttcctcgcccgggaattagctccatcagcctacgggagaggaacgatgatagtgtttgtgtccaaagtaaccgcgccggtgtcgctcgtcgctccggccaatactctgccgtctattctggagccggaaacacaagtgacgcttacgccggccagtatgtttccagtgaagttagcgccggctccaatagtcgcggatgcggaggcaacccaaaacacgttcccggcctgcgcgctgttggtcaccgaaacatttccagcgtttgcagtcagcgaggagccgatcaagaatacccagacggcattcgggtcgcccccgccgtcgagaacaaggtctgtgcttatgttcattgtgctggcggagctatagacgcccggtggaagtgtcagcgcgcccaaatccgcagttccaacgtctgcgtctggcgtcatacctatagcgaagttatacgcgtccaataagtcttgttttgctagaactgacaccgcatcgttaatgtgcgtcgtgccggtcactgtcggacttccggttattgatgcgcccggactcaatgaaacatttccatctatagtggttgcgccggtgttggtgatggtggcggctgccatgactccgaaagcgcaggtcgaaccaagcggaactgcgcccggagtgagttgcatggcaatcgtaaccgtgtcggtggcgctgtttattattccgtcattaactatcaggtcgaaagcgtatattccagtggaagtcggagtgaatgtaggcgtctgcactgtgccgctcgacaatgcaaccgccgggccgccggactgcgtccactcgtaagtgagggggttgccatccgcatccgcgctggcgcttccgtcgagagcgaccgcggcgggaacgcacggcagaatgagcgtttgatccgcccccgcatcggcgaccggcgctatgttgataagataattcacatgcgtattcgttgcgatgtcgtccgcgttgagcgatgtgtcgcggcaggcaatatagacagttacagcgcccgatgcgagacccgacgttgcgcagctctggctcattgtgccgtcgccgtcgcagtcgtcggccatgtctccgtatgcctgatcggcaagcgaccatttgcaatcagcgttctcattcgtgttgaacgtaatcgtcggcgagtgggttgcaagcgtcgaatctttcgcaggatcccaagcgctctgaacaggcggcgttatatccgcggttgtaaattcccacgtgtaatcagacgccgacgcaaccacggatgcgaactgagcgaccacggcaaacatcgctatgaaaatgagggctttgacggcgccgcagcgcccggccttgcggctgcccctgtgaacggaattgattattcttctaatagaatgtttcataatattcttccatgttttgtgtattgcaaacatttcactttatcaaagacacatagacgatgtttctaaacttctgactccctgttgcccgcatcgggcaatataagaaatcctttagttgccgaccaactcattgccggccacatccttggctccggcggggcctgttttgatcgtggcggtgtaagtggtcaattcatcgagagcgctgtcaggcgtaaaagtcgctgttacatcgacgtacgccacagaacccggaatttccgttactccctgcatcagggtaaatgttgccgtggtgattgtggcgggatccatcgcctcgctgaaggcggcggtgattactttcgtattgattgccacgccggaggcgttgtttaatggaacaacggcagtcacagcgggcgcggcggtgtctgttacaggcggcgggttccattttccggttcctccgcatcccgcaattactataccgatcagaattaaactaaacaaaagataagcacgtcgactcttaaagatattgatgataaacattttcatgaaatctttcataattgtcggcgatacatatcccttcgccttttgttattctctatgcataaattatctgaaatatcagaagccaatgatatcggcggaaaagcattcttgattaactcttatggcttgttgttgtaaccatattggctagcgagagtcgaatgttgtattgattagttgatcctactgtccgatatttgcaacctcaaatatttcaacaggaaacgactttcctttgagttgaaccggcgctaatgcgcgtaacgttatttttccttcaacccgcagcaaagcattctttgtgattaggatttgtccggcgcgcgctattgactctaccctctgtgcggtgttcacgacgtcgcctatgatcgtgtaatccattgtttcttcagttcctatgtttccgacaaccgcctcgccgtagtttatccctatgccgattcccagttttttcaactccggcggccagtcgcgttttaattcttcgaaagctctttgcatttccaaagcggcccgaattgcccatagcgtttcattttcgacaaaaaatgtattttttacgttcctctcgatgtctttggaggaccctatgcagcgggatgtttcaagtaaacgcggaaaagacttcagataatacggtccgaacggaaaaggcggtgcgaaaaaagcgcgataaacaaaaggttgttgacgggcgcggcagggcgtaactgcggataatacgcattatctgaagttcgaacgcaatcataaacatcattatataaaggcatatttgagcatttgcgcggcagcgcgggaggcgttctgcggtgtcgtttcattcaaattgacataaattaattcttgtcaaacgcgcttgaaacggggcgtttccggcatggttttcagtcgttttttaaccccgaaaagggccgcaaaaggggcgtttttcgtttgtttttacaaacgcggttttaacaggttttttaacgtgttttaacgggattcacactggtttcaatagcgtttacaccgttgtgactgtcacggtgtgaaaagactgattcaggcgacagcgatggccgctttggcgttttggagagcgatttgggacatgaattaatttatgtcatacgaaacgactcatgcggaaatgggtcggtcgcgcgctttatgctgacaaatgaggcgcgcaacccgacagttattaatgacccgccttctgacagtaatggtttctgtaaaaacaatcaagctgtctgtgaaataaataagctttataataaagcctataatcgttagcggcttcttctatgcatactcgtgacgaaacgtttcaaaagttttccctttttcttccccgcaagaatctttcgctcatgccgcttccgcgcgcgtgagcggcgcgcctgcgctataatattcaacgcgggcggcgggcagccgcgcctcgcggggagacgccgggattatgaccaaagacaaattgttgttgattgacacgttcggccttatatacaggttctatcacaccatgcccaagatgaagacggcggagggaattcccaccggggcggtgttcggcatggcgcgcgcgctgctgaagatttttaaagataataagcccgactatctggtggtggcgatggagtccgagacacccactttcaggcatgccgaatatgccgcctacaaagctcacagggacagaatgccggacgagttgcgggaacagattccggccatcaacgagcttatctccgctttcggtataactccggccaagctcgacgggtacgaggcggacgatgtgatcggcactctggcgcgggcgggcgcggaacacggccttgaggtcgatattcttacaggcgatagagatatgttccagttggtgaacgacagcgtatcagtgctgatgtcgctgaaaggctcctcagagcttgagaagttcgaccgcgaggcggttaaagaaaaaatgggcgtttatccggaacgcatacccgacctcaaagggcttgaaggcgacagttcggacaacatccccggagtgccgggcgtcggccccaaaacagcggtgtctctgctcgaacaattcggagatatggacgccgtgttcgactctcttgaacagattgacaagaaagggctgcgggaaaaactggcggctaacagggaacttgcggaactgagcagaaggctcggcacgatagagaaacacgcgccgctcccatttgaaatcggcgcgtacaaactcccggcggtcgacaacgaaaagcttgcggcgttcttcgagaaatatgaaatgagaagtttcatatcggagcttggaatgaaagaggaggcggccgccccgccccgccccgccgccgttcagttcgactcggtttataaggctgtcttcgacgaagccgaagtcatcgaagcgcttgagcgcgccgcctcgcgcggcaggctttgcgtagacctcgaaaccgacgggctggacaccttcgccgaccccatagtgggcatcgctctggcttccgaggccggcgacgccatctacatccccattcgacacggctccaccgtgaaacgcggcggcggcgaccttttcggcggcggcgacggctcggacgatgaagacgactccgacccggacgctgaaaaacagatagacccggaccgcgcaatcgctttgttgaaaccgtatctggaaaaccctgacatagaaaaaatcggccacaacctcaaattcgacgcgcagatgcttcgcgcggctggcgtgtctcttgccaacatcgcttacgactcattcatcgccgcttaccttatagacccggacggccgcagatacgggctgaaaacggtcgcggcgaacctgctgggagcgggcctgaaaacatacgaggatatggtcggcaagggaaaatctcagaagaaattctctgaggtcaagataagggacgcggtggattacgcctgcgctgacgtggacgccgcgttgaggatcgagccggagctttcgaggcggctggccgcagacggcctcgaccgcgtgttcaggaaaatcgagatgccccttatcccggtattggccgagatggagtggaacggagtggctctggacgcgtccgcgctcgcggggatgtccgaagacttcgccgcaagagagcgggcgctgagcgcggcggtggcggagcttgccggggcggatgtcaacctgaattccccgaaacaggtggccgagttgctgttcgtaaaactcggcctcagaaaagtcaagaaagaatccaccgacatagccgtcctcgaacagcttaaatgcgaccacccggcggtcccgctgataataaagttccggcaggcgagcaagcttcgcggcacatacatagacgctctgcccgcgctgataaacccgcgcacgggcagagtccacacgagcttcaaccagacgctggccgcgtcaggcagattgtcaagcagcaaccctaacatgcagaacatcccggtgcgctccgaggatgggcgcgagatcaggcgcgcgttcatccccggctccaaaggcctcgcccttgtctccgccgactactcccagatcgagatacggctcctcgccgagatgtccggcgacccttccctgctcgaagcgttccgcaaccgggaagacattcacgcgtccgtcgccgctcaggtgttcggagtccccgtctcggaagtgacgcaggaccagcgcagatacgcgaagacaatcaacttcggcctcatatacgggatgcgcgagttcaggctttcacaggagcttggcatctcccggcagcaggccgccgacttcatagaaacttatttctcgcggttccccggcgttcgcgacttcatagagaaaacaaacgaaaaactcctcgaagacggtttcgcagagacgctgttcggacgccgccgccgcgtgccggaactgaggtcttccaaccggcaggagcgcgaagcgggattgcgcgcggctttcaacacccgcattcaaggctctgcggcggacattatgaaactcgccatgatcgacgttcacaagatgatactcgcgggcgagatggacgctaaaatgctccttcaggttcatgacgaaatcgtgcttgaaacgcctgccgaaaaagtggcggacacggcggagaaaacccgcagagcaatggaagcagcgggccgcgattggggcgctctatccgtcgaacttccggcagacgtcaaagccgggccgaactggctcgacatggaaacggtttatacatgttattagatgattctacccactaccaagtgtgccatgcgcaaaactttttcttttgcgcatgatgcttttcaccaaatagtaaatggg

SEQ ID NO: 965 - DNA, 157141 bp, Artificial Sequence
  Synthetic Oligonucleotide
  misc_feature (1)..(93680): n is a, c, g, or t
nnnnnnnnnnnnnnnnnnnnnnnnnnnnnnnnnnnnnnnnnnnnnnnnnnnnnnnnnnnnnnnnnnnnnnnnnnnnnnnnnnnnnnnnnnnnnnnnnnnnnnnnnnnnnnnnnnnnnnnnnnnnnnnnnnnnnnnnnnnnnnnnnnnnnnnnnnnnnnnnnnnnnnnnnnnnnnnnnnnnnnnnnnnnnnnnnnnnnnnnnnnnnnnnnnnnnnnnnnnnnnnnnnnnnnnnnnnnnnnnnnnnnnnnnnnnnnnnnnnnnnnnnnnnnnnnnnnnnnnnnnnnnnnnnnnnnnnnnnnnnnnnnnnnnnnnnnnnnnnnnnnnnnnnnnnnnnnnnnnnnnnnnnnnnnnnnnnnnnnnnnnnnnnnnnnnnnnnnnnnnnnnnnnnnnnnnnnnnnnnnnnnnnnnnnnnnnnnnnnnnnnnnnnnnnnnnnnnnnnnnnnnnnnnnnnnnnnnnnnnnnnnnnnnnnnnnnnnnnnnnnnnnnnnnnnnnnnnnnnnnnnnnnnnnnnnnnnnnnnnnnnnnnnnnnnnnnnnnnnnnnnnnnnnnnnnnnnnnnnnnnnnnnnnnnnnnnnnnnnnnnnnnnnnnnnnnnnnnnnnnnnnnnnnnnnnnnnnnnnnnnnnnnnnnnnnnnnnnnnnnnnnnnnnnnnnnnnnnnnnnnnnnnnnnnnnnnnnnnnnnnnnnnnnnnnnnnnnnnnnnnnnnnnnnnnnnnnnnnnnnnnnnnnnnnnnnnnnnnnnnnnnnnnnnnnnnnnnnnnnnnnnnnnnnnnnnnnnnnnnnnnnnnnnnnnnnnnnnnnnnnnnnnnnnnnnnnnnnnnnnnnnnnnnnnnnnnnnnnnnnnnnnnnnnnnnnnnnnnnnnnnnnnnnnnnnnnnnnnnnnnnnnnnnnnnnnnnnnnnnnnnnnnnnnnnnnnnnnnnnnnnnnnnnnnnnnnnnnnnnnnnnnnnnnnnnnnnnnnnnnnnnnnnnnnnnnnnnnnnnnnnnnnnnnnnnnnnnnnnnnnnnnnnnnnnnnnnnnnnnnnnnnnnnnnnnnnnnnnnnnnnnnnnnnnnnnnnnnnnnnnnnnnnnnnnnnnnnnnnnnnnnnnnnnnnnnnnnnnnnnnnnnnnnnnnnnnnnnnnnnnnnnnnnnnnnnnnnnnnnnnnnnnnnnnnnnnnnnnnnnnnnnnnnnnnnnnnnnnnnnnnnnnnnnnnnnnnnnnnnnnnnnnnnnnnnnnnnnnnnnnnnnnnnnnnnnnnnnnnnnnnnnnnnnnnnnnnnnnnnnnnnnnnnnnnnnnnnnnnnnnnnnnnnnnnnnnnnnnnnnnnnnnnnnnnnnnnnnnnnnnnnnnnnnnnnnnnnnnnnnnnnnnnnnnnnnnnnnnnnnnnnnnnnnnnnnnnnnnnnnnnnnnnnnnnnnnnnnnnnnnnnnnnnnnnnnnnnnnnnnnnnnnnnnnnnnnnnnnnnnnnnnnnnnnnnnnnnnnnnnnnnnnnnnnnnnnnnnnnnnnnnnnnnnnnnnnnnnnnnnnnnnnnnnnnnnnnnnnnnnnnnnnnnnnnnnnnnnnnnnnnnnnnnnnnnnnnnnnnnnnnnnnnnnnnnnnnnnnnnnnnnnnnnnnnnnnnnnnnnnnnnnnnnnnnnnnnnnnnnnnnnnnnnnnnnnnnnnnnnnnnnnnnnnnnnnnnnnnnnnnnnnnnnnnnnnnnnnnnnnnnnnnnnnnnnnnnnnnnnnnnnnnnnnnnnnnnnnnnnnnnnnnnnnnnnnnnnnnnnnnnnnnnnnnnnnnnnnnnnnnnnnnnnnnnnnnnnnnnnnnnnnnnnnnnnnnnnnnnnnnnnnnnnnnnnnnnnnnnnnnnnnnnnnnnnnnnnnnnnnnnnnnnnnnnnnnnnnnnnnnnnnnnnnnnnnnnnnnnnnnnnnnnnnnnnnnnnnnnnnnnnnnnnnnnnnnnnnnnnnnnnnnnnnnnnnnnnnnnnnnnnnnnnnnnnnnnnnnnnnnnnnnnnnnnnnnnnnnnnnnnnnnnnnnnnnnnnnnnnnnnnnnnnnnnnnnnnnnnnnnnnnnnnnnnnnnnnnnnnnnnnnnnnnnnnnnnnnnnnnnnnnnnnnnnnnnnnnnnnnnnnnnnnnnnnnnnnnnnnnnnnnnnnnnnnnnnnnnnnnnnnnnnnnnnnnnnnnnnnnnnnnnnnnnnnnnnnnnnnnnnnnnnnnnnnnnnnnnnnnnnnnnnnnnnnnnnnnnnnnnnnnnnnnnnnnnnnnnnnnnnnnnnnnnnnnnnnnnnnnnnnnnnnnnnnnnnnnnnnnnnnnnnnnnnnnnnnnnnnnnnnnnnnnnnnnnnnnnnnnnnnnnnnnnnnnnnnnnnnnnnnnnnnnnnnnnnnnnnnnnnnnnnnnnnnnnnnnnnnnnnnnnnnnnnnnnnnnnnnnnnnnnnnnnnnnnnnnnnnnnnnnnnnnnnnnnnnnnnnnnnnnnnnnnnnnnnnnnnnnnnnnnnnnnnnnnnnnnnnnnnnnnnnnnnnnnnnnnnnnnnnnnnnnnnnnnnnnnnnnnnnnnnnnnnnnnnnnnnnnnnnnnnnnnnnnnnnnnnnnnnnnnnnnnnnnnnnnnnnnnnnnnnnnnnnnnnnnnnnnnnnnnnnnnnnnnnnnnnnnnnnnnnnnnnnnnnnnnnnnnnnnnnnnnnnnnnnnnnnnnnnnnnnnnnnnnnnnnnnnnnnnnnnnnnnnnnnnnnnnnnnnnnnnnnnnnnnnnnnnnnnnnnnnnnnnnnnnnnnnnnnnnnnnnnnnnnnnnnnnnnnnnnnnnnnnnnnnnnnnnnnnnnnnnnnnnnnnnnnnnnnnnnnnnnnnnnnnnnnnnnnnnnnnnnnnnnnnnnnnnnnnnnnnnnnnnnnnnnnnnnnnnnnnnnnnnnnnnnnnnnnnnnnnnnnnnnnnnnnnnnnnnnnnnnnnnnnnnnnnnnnnnnnnnnnnnnnnnnnnnnnnnnnnnnnnnnnnnnnnnnnnnnnnnnnnnnnnnnnnnnnnnnnnnnnnnnnnnnnnnnnnnnnnnnnnnnnnnnnnnnnnnnnnnnnnnnnnnnnnnnnnnnnnnnnnnnnnnnnnnnnnnnnnnnnnnnnnnnnnnnnnnnnnnnnnnnnnnnnnnnnnnnnnnnnnnnnnnnnnnnnnnnnnnnnnnnnnnnnnnnnnnnnnnnnnnnnnnnnnnnnnnnnnnnnnnnnnnnnnnnnnnnnnnnnnnnnnnnnnnnnnnnnnnnnnnnnnnnnnnnnnnnnnnnnnnnnnnnnnnnnnnnnnnnnnnnnnnnnnnnnnnnnnnnnnnnnnnnnnnnnnnnnnnnnnnnnnnnnnnnnnnnnnnnnnnnnnnnnnnnnnnnnnnnnnnnnnnnnnnnnnnnnnnnnnnnnnnnnnnnnnnnnnnnnnnnnnnnnnnnnnnnnnnnnnnnnnnnnnnnnnnnnnnnnnnnnnnnnnnnnnnnnnnnnnnnnnnnnnnnnnnnnnnnnnnnnnnnnnnnnnnnnnnnnnnnnnnnnnnnnnnnnnnnnnnnnnnnnnnnnnnnnnnnnnnnnnnnnnnnnnnnnnnnnnnnnnnnnnnnnnnnnnnnnnnnnnnnnnnnnnnnnnnnnnnnnnnnnnnnnnnnnnnnnnnnnnnnnnnnnnnnnnnnnnnnnnnnnnnnnnnnnnnnnnnnnnnnnnnnnnnnnnnnnnnnnnnnnnnnnnnnnnnnnnnnnnnnnnnnnnnnnnnnnnnnnnnnnnnnnnnnnnnnnnnnnnnnnnnnnnnnnnnnnnnnnnnnnnnnnnnnnnnnnnnnnnnnnnnnnnnnnnnnnnnnnnnnnnnnnnnnnnnnnnnnnnnnnnnnnnnnnnnnnnnnnnnnnnnnnnnnnnnnnnnnnnnnnnnnnnnnnnnnnnnnnnnnnnnnnnnnnnnnnnnnnnnnnnnnnnnnnnnnnnnnnnnnnnnnnnnnnnnnnnnnnnnnnnnnnnnnnnnnnnnnnnnnnnnnnnnnnnnnnnnnnnnnnnnnnnnnnnnnnnnnnnnnnnnnnnnnnnnnnnnnnnnnnnnnnnnnnnnnnnnnnnnnnnnnnnnnnnnnnnnnnnnnnnnnnnnnnnnnnnnnnnnnnnnnnnnnnnnnnnnnnnnnnnnnnnnnnnnnnnnnnnnnnnnnnnnnnnnnnnnnnnnnnnnnnnnnnnnnnnnnnnnnnnnnnnnnnnnnnnnnnnnnnnnnnnnnnnnnnnnnnnnnnnnnnnnnnnnnnnnnnnnnnnnnnnnnnnnnnnnnnnnnnnnnnnnnnnnnnnnnnnnnnnnnnnnnnnnnnnnnnnnnnnnnnnnnnnnnnnnnnnnnnnnnnnnnnnnnnnnnnnnnnnnnnnnnnnnnnnnnnnnnnnnnnnnnnnnnnnnnnnnnnnnnnnnnnnnnnnnnnnnnnnnnnnnnnnnnnnnnnnnnnnnnnnnnnnnnnnnnnnnnnnnnnnnnnnnnnnnnnnnnnnnnnnnnnnnnnnnnnnnnnnnnnnnnnnnnnnnnnnnnnnnnnnnnnnnnnnnnnnnnnnnnnnnnnnnnnnnnnnnnnnnnnnnnnnnnnnnnnnnnnnnnnnnnnnnnnnnnnnnnnnnnnnnnnnnnnnnnnnnnnnnnnnnnnnnnnnnnnnnnnnnnnnnnnnnnnnnnnnnnnnnnnnnnnnnnnnnnnnnnnnnnnnnnnnnnnnnnnnnnnnnnnnnnnnnnnnnnnnnnnnnnnnnnnnnnnnnnnnnnnnnnnnnnnnnnnnnnnnnnnnnnnnnnnnnnnnnnnnnnnnnnnnnnnnnnnnnnnnnnnnnnnnnnnnnnnnnnnnnnnnnnnnnnnnnnnnnnnnnnnnnnnnnnnnnnnnnnnnnnnnnnnnnnnnnnnnnnnnnnnnnnnnnnnnnnnnnnnnnnnnnnnnnnnnnnnnnnnnnnnnnnnnnnnnnnnnnnnnnnnnnnnnnnnnnnnnnnnnnnnnnnnnnnnnnnnnnnnnnnnnnnnnnnnnnnnnnnnnnnnnnnnnnnnnnnnnnnnnnnnnnnnnnnnnnnnnnnnnnnnnnnnnnnnnnnnnnnnnnnnnnnnnnnnnnnnnnnnnnnnnnnnnnnnnnnnnnnnnnnnnnnnnnnnnnnnnnnnnnnnnnnnnnnnnnnnnnnnnnnnnnnnnnnnnnnnnnnnnnnnnnnnnnnnnnnnnnnnnnnnnnnnnnnnnnnnnnnnnnnnnnnnnnnnnnnnnnnnnnnnnnnnnnnnnnnnnnnnnnnnnnnnnnnnnnnnnnnnnnnnnnnnnnnnnnnnnnnnnnnnnnnnnnnnnnnnnnnnnnnnnnnnnnnnnnnnnnnnnnnnnnnnnnnnnnnnnnnnnnnnnnnnnnnnnnnnnnnnnnnnnnnnnnnnnnnnnnnnnnnnnnnnnnnnnnnnnnnnnnnnnnnnnnnnnnnnnnnnnnnnnnnnnnnnnnnnnnnnnnnnnnnnnnnnnnnnnnnnnnnnnnnnnnnnnnnnnnnnnnnnnnnnnnnnnnnnnnnnnnnnnnnnnnnnnnnnnnnnnnnnnnnnnnnnnnnnnnnnnnnnnnnnnnnnnnnnnnnnnnnnnnnnnnnnnnnnnnnnnnnnnnnnnnnnnnnnnnnnnnnnnnnnnnnnnnnnnnnnnnnnnnnnnnnnnnnnnnnnnnnnnnnnnnnnnnnnnnnnnnnnnnnnnnnnnnnnnnnnnnnnnnnnnnnnnnnnnnnnnnnnnnnnnnnnnnnnnnnnnnnnnnnnnnnnnnnnnnnnnnnnnnnnnnnnnnnnnnnnnnnnnnnnnnnnnnnnnnnnnnnnnnnnnnnnnnnnnnnnnnnnnnnnnnnnnnnnnnnnnnnnnnnnnnnnnnnnnnnnnnnnnnnnnnnnnnnnnnnnnnnnnnnnnnnnnnnnnnnnnnnnnnnnnnnnnnnnnnnnnnnnnnnnnnnnnnnnnnnnnnnnnnnnnnnnnnnnnnnnnnnnnnnnnnnnnnnnnnnnnnnnnnnnnnnnnnnnnnnnnnnnnnnnnnnnnnnnnnnnnnnnnnnnnnnnnnnnnnnnnnnnnnnnnnnnnnnnnnnnnnnnnnnnnnnnnnnnnnnnnnnnnnnnnnnnnnnnnnnnnnnnnnnnnnnnnnnnnnnnnnnnnnnnnnnnnnnnnnnnnnnnnnnnnnnnnnnnnnnnnnnnnnnnnnnnnnnnnnnnnnnnnnnnnnnnnnnnnnnnnnnnnnnnnnnnnnnnnnnnnnnnnnnnnnnnnnnnnnnnnnnnnnnnnnnnnnnnnnnnnnnnnnnnnnnnnnnnnnnnnnnnnnnnnnnnnnnnnnnnnnnnnnnnnnnnnnnnnnnnnnnnnnnnnnnnnnnnnnnnnnnnnnnnnnnnnnnnnnnnnnnnnnnnnnnnnnnnnnnnnnnnnnnnnnnnnnnnnnnnnnnnnnnnnnnnnnnnnnnnnnnnnnnnnnnnnnnnnnnnnnnnnnnnnnnnnnnnnnnnnnnnnnnnnnnnnnnnnnnnnnnnnnnnnnnnnnnnnnnnnnnnnnnnnnnnnnnnnnnnnnnnnnnnnnnnnnnnnnnnnnnnnnnnnnnnnnnnnnnnnnnnnnnnnnnnnnnnnnnnnnnnnnnnnnnnnnnnnnnnnnnnnnnnnnnnnnnnnnnnnnnnnnnnnnnnnnnnnnnnnnnnnnnnnnnnnnnnnnnnnnnnnnnnnnnnnnnnnnnnnnnnnnnnnnnnnnnnnnnnnnnnnnnnnnnnnnnnnnnnnnnnnnnnnnnnnnnnnnnnnnnnnnnnnnnnnnnnnnnnnnnnnnnnnnnnnnnnnnnnnnnnnnnnnnnnnnnnnnnnnnnnnnnnnnnnnnnnnnnnnnnnnnnnnnnnnnnnnnnnnnnnnnnnnnnnnnnnnnnnnnnnnnnnnnnnnnnnnnnnnnnnnnnnnnnnnnnnnnnnnnnnnnnnnnnnnnnnnnnnnnnnnnnnnnnnnnnnnnnnnnnnnnnnnnnnnnnnnnnnnnnnnnnnnnnnnnnnnnnnnnnnnnnnnnnnnnnnnnnnnnnnnnnnnnnnnnnnnnnnnnnnnnnnnnnnnnnnnnnnnnnnnnnnnnnnnnnnnnnnnnnnnnnnnnnnnnnnnnnnnnnnnnnnnnnnnnnnnnnnnnnnnnnnnnnnnnnnnnnnnnnnnnnnnnnnnnnnnnnnnnnnnnnnnnnnnnnnnnnnnnnnnnnnnnnnnnnnnnnnnnnnnnnnnnnnnnnnnnnnnnnnnnnnnnnnnnnnnnnnnnnnnnnnnnnnnnnnnnnnnnnnnnnnnnnnnnnnnnnnnnnnnnnnnnnnnnnnnnnnnnnnnnnnnnnnnnnnnnnnnnnnnnnnnnnnnnnnnnnnnnnnnnnnnnnnnnnnnnnnnnnnnnnnnnnnnnnnnnnnnnnnnnnnnnnnnnnnnnnnnnnnnnnnnnnnnnnnnnnnnnnnnnnnnnnnnnnnnnnnnnnnnnnnnnnnnnnnnnnnnnnnnnnnnnnnnnnnnnnnnnnnnnnnnnnnnnnnnnnnnnnnnnnnnnnnnnnnnnnnnnnnnnnnnnnnnnnnnnnnnnnnnnnnnnnnnnnnnnnnnnnnnnnnnnnnnnnnnnnnnnnnnnnnnnnnnnnnnnnnnnnnnnnnnnnnnnnnnnnnnnnnnnnnnnnnnnnnnnnnnnnnnnnnnnnnnnnnnnnnnnnnnnnnnnnnnnnnnnnnnnnnnnnnnnnnnnnnnnnnnnnnnnnnnnnnnnnnnnnnnnnnnnnnnnnnnnnnnnnnnnnnnnnnnnnnnnnnnnnnnnnnnnnnnnnnnnnnnnnnnnnnnnnnnnnnnnnnnnnnnnnnnnnnnnnnnnnnnnnnnnnnnnnnnnnnnnnnnnnnnnnnnnnnnnnnnnnnnnnnnnnnnnnnnnnnnnnnnnnnnnnnnnnnnnnnnnnnnnnnnnnnnnnnnnnnnnnnnnnnnnnnnnnnnnnnnnnnnnnnnnnnnnnnnnnnnnnnnnnnnnnnnnnnnnnnnnnnnnnnnnnnnnnnnnnnnnnnnnnnnnnnnnnnnnnnnnnnnnnnnnnnnnnnnnnnnnnnnnnnnnnnnnnnnnnnnnnnnnnnnnnnnnnnnnnnnnnnnnnnnnnnnnnnnnnnnnnnnnnnnnnnnnnnnnnnnnnnnnnnnnnnnnnnnnnnnnnnnnnnnnnnnnnnnnnnnnnnnnnnnnnnnnnnnnnnnnnnnnnnnnnnnnnnnnnnnnnnnnnnnnnnnnnnnnnnnnnnnnnnnnnnnnnnnnnnnnnnnnnnnnnnnnnnnnnnnnnnnnnnnnnnnnnnnnnnnnnnnnnnnnnnnnnnnnnnnnnnnnnnnnnnnnnnnnnnnnnnnnnnnnnnnnnnnnnnnnnnnnnnnnnnnnnnnnnnnnnnnnnnnnnnnnnnnnnnnnnnnnnnnnnnnnnnnnnnnnnnnnnnnnnnnnnnnnnnnnnnnnnnnnnnnnnnnnnnnnnnnnnnnnnnnnnnnnnnnnnnnnnnnnnnnnnnnnnnnnnnnnnnnnnnnnnnnnnnnnnnnnnnnnnnnnnnnnnnnnnnnnnnnnnnnnnnnnnnnnnnnnnnnnnnnnnnnnnnnnnnnnnnnnnnnnnnnnnnnnnnnnnnnnnnnnnnnnnnnnnnnnnnnnnnnnnnnnnnnnnnnnnnnnnnnnnnnnnnnnnnnnnnnnnnnnnnnnnnnnnnnnnnnnnnnnnnnnnnnnnnnnnnnnnnnnnnnnnnnnnnnnnnnnnnnnnnnnnnnnnnnnnnnnnnnnnnnnnnnnnnnnnnnnnnnnnnnnnnnnnnnnnnnnnnnnnnnnnnnnnnnnnnnnnnnnnnnnnnnnnnnnnnnnnnnnnnnnnnnnnnnnnnnnnnnnnnnnnnnnnnnnnnnnnnnnnnnnnnnnnnnnnnnnnnnnnnnnnnnnnnnnnnnnnnnnnnnnnnnnnnnnnnnnnnnnnnnnnnnnnnnnnnnnnnnnnnnnnnnnnnnnnnnnnnnnnnnnnnnnnnnnnnnnnnnnnnnnnnnnnnnnnnnnnnnnnnnnnnnnnnnnnnnnnnnnnnnnnnnnnnnnnnnnnnnnnnnnnnnnnnnnnnnnnnnnnnnnnnnnnnnnnnnnnnnnnnnnnnnnnnnnnnnnnnnnnnnnnnnnnnnnnnnnnnnnnnnnnnnnnnnnnnnnnnnnnnnnnnnnnnnnnnnnnnnnnnnnnnnnnnnnnnnnnnnnnnnnnnnnnnnnnnnnnnnnnnnnnnnnnnnnnnnnnnnnnnnnnnnnnnnnnnnnnnnnnnnnnnnnnnnnnnnnnnnnnnnnnnnnnnnnnnnnnnnnnnnnnnnnnnnnnnnnnnnnnnnnnnnnnnnnnnnnnnnnnnnnnnnnnnnnnnnnnnnnnnnnnnnnnnnnnnnnnnnnnnnnnnnnnnnnnnnnnnnnnnnnnnnnnnnnnnnnnnnnnnnnnnnnnnnnnnnnnnnnnnnnnnnnnnnnnnnnnnnnnnnnnnnnnnnnnnnnnnnnnnnnnnnnnnnnnnnnnnnnnnnnnnnnnnnnnnnnnnnnnnnnnnnnnnnnnnnnnnnnnnnnnnnnnnnnnnnnnnnnnnnnnnnnnnnnnnnnnnnnnnnnnnnnnnnnnnnnnnnnnnnnnnnnnnnnnnnnnnnnnnnnnnnnnnnnnnnnnnnnnnnnnnnnnnnnnnnnnnnnnnnnnnnnnnnnnnnnnnnnnnnnnnnnnnnnnnnnnnnnnnnnnnnnnnnnnnnnnnnnnnnnnnnnnnnnnnnnnnnnnnnnnnnnnnnnnnnnnnnnnnnnnnnnnnnnnnnnnnnnnnnnnnnnnnnnnnnnnnnnnnnnnnnnnnnnnnnnnnnnnnnnnnnnnnnnnnnnnnnnnnnnnnnnnnnnnnnnnnnnnnnnnnnnnnnnnnnnnnnnnnnnnnnnnnnnnnnnnnnnnnnnnnnnnnnnnnnnnnnnnnnnnnnnnnnnnnnnnnnnnnnnnnnnnnnnnnnnnnnnnnnnnnnnnnnnnnnnnnnnnnnnnnnnnnnnnnnnnnnnnnnnnnnnnnnnnnnnnnnnnnnnnnnnnnnnnnnnnnnnnnnnnnnnnnnnnnnnnnnnnnnnnnnnnnnnnnnnnnnnnnnnnnnnnnnnnnnnnnnnnnnnnnnnnnnnnnnnnnnnnnnnnnnnnnnnnnnnnnnnnnnnnnnnnnnnnnnnnnnnnnnnnnnnnnnnnnnnnnnnnnnnnnnnnnnnnnnnnnnnnnnnnnnnnnnnnnnnnnnnnnnnnnnnnnnnnnnnnnnnnnnnnnnnnnnnnnnnnnnnnnnnnnnnnnnnnnnnnnnnnnnnnnnnnnnnnnnnnnnnnnnnnnnnnnnnnnnnnnnnnnnnnnnnnnnnnnnnnnnnnnnnnnnnnnnnnnnnnnnnnnnnnnnnnnnnnnnnnnnnnnnnnnnnnnnnnnnnnnnnnnnnnnnnnnnnnnnnnnnnnnnnnnnnnnnnnnnnnnnnnnnnnnnnnnnnnnnnnnnnnnnnnnnnnnnnnnnnnnnnnnnnnnnnnnnnnnnnnnnnnnnnnnnnnnnnnnnnnnnnnnnnnnnnnnnnnnnnnnnnnnnnnnnnnnnnnnnnnnnnnnnnnnnnnnnnnnnnnnnnnnnnnnnnnnnnnnnnnnnnnnnnnnnnnnnnnnnnnnnnnnnnnnnnnnnnnnnnnnnnnnnnnnnnnnnnnnnnnnnnnnnnnnnnnnnnnnnnnnnnnnnnnnnnnnnnnnnnnnnnnnnnnnnnnnnnnnnnnnnnnnnnnnnnnnnnnnnnnnnnnnnnnnnnnnnnnnnnnnnnnnnnnnnnnnnnnnnnnnnnnnnnnnnnnnnnnnnnnnnnnnnnnnnnnnnnnnnnnnnnnnnnnnnnnnnnnnnnnnnnnnnnnnnnnnnnnnnnnnnnnnnnnnnnnnnnnnnnnnnnnnnnnnnnnnnnnnnnnnnnnnnnnnnnnnnnnnnnnnnnnnnnnnnnnnnnnnnnnnnnnnnnnnnnnnnnnnnnnnnnnnnnnnnnnnnnnnnnnnnnnnnnnnnnnnnnnnnnnnnnnnnnnnnnnnnnnnnnnnnnnnnnnnnnnnnnnnnnnnnnnnnnnnnnnnnnnnnnnnnnnnnnnnnnnnnnnnnnnnnnnnnnnnnnnnnnnnnnnnnnnnnnnnnnnnnnnnnnnnnnnnnnnnnnnnnnnnnnnnnnnnnnnnnnnnnnnnnnnnnnnnnnnnnnnnnnnnnnnnnnnnnnnnnnnnnnnnnnnnnnnnnnnnnnnnnnnnnnnnnnnnnnnnnnnnnnnnnnnnnnnnnnnnnnnnnnnnnnnnnnnnnnnnnnnnnnnnnnnnnnnnnnnnnnnnnnnnnnnnnnnnnnnnnnnnnnnnnnnnnnnnnnnnnnnnnnnnnnnnnnnnnnnnnnnnnnnnnnnnnnnnnnnnnnnnnnnnnnnnnnnnnnnnnnnnnnnnnnnnnnnnnnnnnnnnnnnnnnnnnnnnnnnnnnnnnnnnnnnnnnnnnnnnnnnnnnnnnnnnnnnnnnnnnnnnnnnnnnnnnnnnnnnnnnnnnnnnnnnnnnnnnnnnnnnnnnnnnnnnnnnnnnnnnnnnnnnnnnnnnnnnnnnnnnnnnnnnnnnnnnnnnnnnnnnnnnnnnnnnnnnnnnnnnnnnnnnnnnnnnnnnnnnnnnnnnnnnnnnnnnnnnnnnnnnnnnnnnnnnnnnnnnnnnnnnnnnnnnnnnnnnnnnnnnnnnnnnnnnnnnnnnnnnnnnnnnnnnnnnnnnnnnnnnnnnnnnnnnnnnnnnnnnnnnnnnnnnnnnnnnnnnnnnnnnnnnnnnnnnnnnnnnnnnnnnnnnnnnnnnnnnnnnnnnnnnnnnnnnnnnnnnnnnnnnnnnnnnnnnnnnnnnnnnnnnnnnnnnnnnnnnnnnnnnnnnnnnnnnnnnnnnnnnnnnnnnnnnnnnnnnnnnnnnnnnnnnnnnnnnnnnnnnnnnnnnnnnnnnnnnnnnnnnnnnnnnnnnnnnnnnnnnnnnnnnnnnnnnnnnnnnnnnnnnnnnnnnnnnnnnnnnnnnnnnnnnnnnnnnnnnnnnnnnnnnnnnnnnnnnnnnnnnnnnnnnnnnnnnnnnnnnnnnnnnnnnnnnnnnnnnnnnnnnnnnnnnnnnnnnnnnnnnnnnnnnnnnnnnnnnnnnnnnnnnnnnnnnnnnnnnnnnnnnnnnnnnnnnnnnnnnnnnnnnnnnnnnnnnnnnnnnnnnnnnnnnnnnnnnnnnnnnnnnnnnnnnnnnnnnnnnnnnnnnnnnnnnnnnnnnnnnnnnnnnnnnnnnnnnnnnnnnnnnnnnnnnnnnnnnnnnnnnnnnnnnnnnnnnnnnnnnnnnnnnnnnnnnnnnnnnnnnnnnnnnnnnnnnnnnnnnnnnnnnnnnnnnnnnnnnnnnnnnnnnnnnnnnnnnnnnnnnnnnnnnnnnnnnnnnnnnnnnnnnnnnnnnnnnnnnnnnnnnnnnnnnnnnnnnnnnnnnnnnnnnnnnnnnnnnnnnnnnnnnnnnnnnnnnnnnnnnnnnnnnnnnnnnnnnnnnnnnnnnnnnnnnnnnnnnnnnnnnnnnnnnnnnnnnnnnnnnnnnnnnnnnnnnnnnnnnnnnnnnnnnnnnnnnnnnnnnnnnnnnnnnnnnnnnnnnnnnnnnnnnnnnnnnnnnnnnnnnnnnnnnnnnnnnnnnnnnnnnnnnnnnnnnnnnnnnnnnnnnnnnnnnnnnnnnnnnnnnnnnnnnnnnnnnnnnnnnnnnnnnnnnnnnnnnnnnnnnnnnnnnnnnnnnnnnnnnnnnnnnnnnnnnnnnnnnnnnnnnnnnnnnnnnnnnnnnnnnnnnnnnnnnnnnnnnnnnnnnnnnnnnnnnnnnnnnnnnnnnnnnnnnnnnnnnnnnnnnnnnnnnnnnnnnnnnnnnnnnnnnnnnnnnnnnnnnnnnnnnnnnnnnnnnnnnnnnnnnnnnnnnnnnnnnnnnnnnnnnnnnnnnnnnnnnnnnnnnnnnnnnnnnnnnnnnnnnnnnnnnnnnnnnnnnnnnnnnnnnnnnnnnnnnnnnnnnnnnnnnnnnnnnnnnnnnnnnnnnnnnnnnnnnnnnnnnnnnnnnnnnnnnnnnnnnnnnnnnnnnnnnnnnnnnnnnnnnnnnnnnnnnnnnnnnnnnnnnnnnnnnnnnnnnnnnnnnnnnnnnnnnnnnnnnnnnnnnnnnnnnnnnnnnnnnnnnnnnnnnnnnnnnnnnnnnnnnnnnnnnnnnnnnnnnnnnnnnnnnnnnnnnnnnnnnnnnnnnnnnnnnnnnnnnnnnnnnnnnnnnnnnnnnnnnnnnnnnnnnnnnnnnnnnnnnnnnnnnnnnnnnnnnnnnnnnnnnnnnnnnnnnnnnnnnnnnnnnnnnnnnnnnnnnnnnnnnnnnnnnnnnnnnnnnnnnnnnnnnnnnnnnnnnnnnnnnnnnnnnnnnnnnnnnnnnnnnnnnnnnnnnnnnnnnnnnnnnnnnnnnnnnnnnnnnnnnnnnnnnnnnnnnnnnnnnnnnnnnnnnnnnnnnnnnnnnnnnnnnnnnnnnnnnnnnnnnnnnnnnnnnnnnnnnnnnnnnnnnnnnnnnnnnnnnnnnnnnnnnnnnnnnnnnnnnnnnnnnnnnnnnnnnnnnnnnnnnnnnnnnnnnnnnnnnnnnnnnnnnnnnnnnnnnnnnnnnnnnnnnnnnnnnnnnnnnnnnnnnnnnnnnnnnnnnnnnnnnnnnnnnnnnnnnnnnnnnnnnnnnnnnnnnnnnnnnnnnnnnnnnnnnnnnnnnnnnnnnnnnnnnnnnnnnnnnnnnnnnnnnnnnnnnnnnnnnnnnnnnnnnnnnnnnnnnnnnnnnnnnnnnnnnnnnnnnnnnnnnnnnnnnnnnnnnnnnnnnnnnnnnnnnnnnnnnnnnnnnnnnnnnnnnnnnnnnnnnnnnnnnnnnnnnnnnnnnnnnnnnnnnnnnnnnnnnnnnnnnnnnnnnnnnnnnnnnnnnnnnnnnnnnnnnnnnnnnnnnnnnnnnnnnnnnnnnnnnnnnnnnnnnnnnnnnnnnnnnnnnnnnnnnnnnnnnnnnnnnnnnnnnnnnnnnnnnnnnnnnnnnnnnnnnnnnnnnnnnnnnnnnnnnnnnnnnnnnnnnnnnnnnnnnnnnnnnnnnnnnnnnnnnnnnnnnnnnnnnnnnnnnnnnnnnnnnnnnnnnnnnnnnnnnnnnnnnnnnnnnnnnnnnnnnnnnnnnnnnnnnnnnnnnnnnnnnnnnnnnnnnnnnnnnnnnnnnnnnnnnnnnnnnnnnnnnnnnnnnnnnnnnnnnnnnnnnnnnnnnnnnnnnnnnnnnnnnnnnnnnnnnnnnnnnnnnnnnnnnnnnnnnnnnnnnnnnnnnnnnnnnnnnnnnnnnnnnnnnnnnnnnnnnnnnnnnnnnnnnnnnnnnnnnnnnnnnnnnnnnnnnnnnnnnnnnnnnnnnnnnnnnnnnnnnnnnnnnnnnnnnnnnnnnnnnnnnnnnnnnnnnnnnnnnnnnnnnnnnnnnnnnnnnnnnnnnnnnnnnnnnnnnnnnnnnnnnnnnnnnnnnnnnnnnnnnnnnnnnnnnnnnnnnnnnnnnnnnnnnnnnnnnnnnnnnnnnnnnnnnnnnnnnnnnnnnnnnnnnnnnnnnnnnnnnnnnnnnnnnnnnnnnnnnnnnnnnnnnnnnnnnnnnnnnnnnnnnnnnnnnnnnnnnnnnnnnnnnnnnnnnnnnnnnnnnnnnnnnnnnnnnnnnnnnnnnnnnnnnnnnnnnnnnnnnnnnnnnnnnnnnnnnnnnnnnnnnnnnnnnnnnnnnnnnnnnnnnnnnnnnnnnnnnnnnnnnnnnnnnnnnnnnnnnnnnnnnnnnnnnnnnnnnnnnnnnnnnnnnnnnnnnnnnnnnnnnnnnnnnnnnnnnnnnnnnnnnnnnnnnnnnnnnnnnnnnnnnnnnnnnnnnnnnnnnnnnnnnnnnnnnnnnnnnnnnnnnnnnnnnnnnnnnnnnnnnnnnnnnnnnnnnnnnnnnnnnnnnnnnnnnnnnnnnnnnnnnnnnnnnnnnnnnnnnnnnnnnnnnnnnnnnnnnnnnnnnnnnnnnnnnnnnnnnnnnnnnnnnnnnnnnnnnnnnnnnnnnnnnnnnnnnnnnnnnnnnnnnnnnnnnnnnnnnnnnnnnnnnnnnnnnnnnnnnnnnnnnnnnnnnnnnnnnnnnnnnnnnnnnnnnnnnnnnnnnnnnnnnnnnnnnnnnnnnnnnnnnnnnnnnnnnnnnnnnnnnnnnnnnnnnnnnnnnnnnnnnnnnnnnnnnnnnnnnnnnnnnnnnnnnnnnnnnnnnnnnnnnnnnnnnnnnnnnnnnnnnnnnnnnnnnnnnnnnnnnnnnnnnnnnnnnnnnnnnnnnnnnnnnnnnnnnnnnnnnnnnnnnnnnnnnnnnnnnnnnnnnnnnnnnnnnnnnnnnnnnnnnnnnnnnnnnnnnnnnnnnnnnnnnnnnnnnnnnnnnnnnnnnnnnnnnnnnnnnnnnnnnnnnnnnnnnnnnnnnnnnnnnnnnnnnnnnnnnnnnnnnnnnnnnnnnnnnnnnnnnnnnnnnnnnnnnnnnnnnnnnnnnnnnnnnnnnnnnnnnnnnnnnnnnnnnnnnnnnnnnnnnnnnnnnnnnnnnnnnnnnnnnnnnnnnnnnnnnnnnnnnnnnnnnnnnnnnnnnnnnnnnnnnnnnnnnnnnnnnnnnnnnnnnnnnnnnnnnnnnnnnnnnnnnnnnnnnnnnnnnnnnnnnnnnnnnnnnnnnnnnnnnnnnnnnnnnnnnnnnnnnnnnnnnnnnnnnnnnnnnnnnnnnnnnnnnnnnnnnnnnnnnnnnnnnnnnnnnnnnnnnnnnnnnnnnnnnnnnnnnnnnnnnnnnnnnnnnnnnnnnnnnnnnnnnnnnnnnnnnnnnnnnnnnnnnnnnnnnnnnnnnnnnnnnnnnnnnnnnnnnnnnnnnnnnnnnnnnnnnnnnnnnnnnnnnnnnnnnnnnnnnnnnnnnnnnnnnnnnnnnnnnnnnnnnnnnnnnnnnnnnnnnnnnnnnnnnnnnnnnnnnnnnnnnnnnnnnnnnnnnnnnnnnnnnnnnnnnnnnnnnnnnnnnnnnnnnnnnnnnnnnnnnnnnnnnnnnnnnnnnnnnnnnnnnnnnnnnnnnnnnnnnnnnnnnnnnnnnnnnnnnnnnnnnnnnnnnnnnnnnnnnnnnnnnnnnnnnnnnnnnnnnnnnnnnnnnnnnnnnnnnnnnnnnnnnnnnnnnnnnnnnnnnnnnnnnnnnnnnnnnnnnnnnnnnnnnnnnnnnnnnnnnnnnnnnnnnnnnnnnnnnnnnnnnnnnnnnnnnnnnnnnnnnnnnnnnnnnnnnnnnnnnnnnnnnnnnnnnnnnnnnnnnnnnnnnnnnnnnnnnnnnnnnnnnnnnnnnnnnnnnnnnnnnnnnnnnnnnnnnnnnnnnnnnnnnnnnnnnnnnnnnnnnnnnnnnnnnnnnnnnnnnnnnnnnnnnnnnnnnnnnnnnnnnnnnnnnnnnnnnnnnnnnnnnnnnnnnnnnnnnnnnnnnnnnnnnnnnnnnnnnnnnnnnnnnnnnnnnnnnnnnnnnnnnnnnnnnnnnnnnnnnnnnnnnnnnnnnnnnnnnnnnnnnnnnnnnnnnnnnnnnnnnnnnnnnnnnnnnnnnnnnnnnnnnnnnnnnnnnnnnnnnnnnnnnnnnnnnnnnnnnnnnnnnnnnnnnnnnnnnnnnnnnnnnnnnnnnnnnnnnnnnnnnnnnnnnnnnnnnnnnnnnnnnnnnnnnnnnnnnnnnnnnnnnnnnnnnnnnnnnnnnnnnnnnnnnnnnnnnnnnnnnnnnnnnnnnnnnnnnnnnnnnnnnnnnnnnnnnnnnnnnnnnnnnnnnnnnnnnnnnnnnnnnnnnnnnnnnnnnnnnnnnnnnnnnnnnnnnnnnnnnnnnnnnnnnnnnnnnnnnnnnnnnnnnnnnnnnnnnnnnnnnnnnnnnnnnnnnnnnnnnnnnnnnnnnnnnnnnnnnnnnnnnnnnnnnnnnnnnnnnnnnnnnnnnnnnnnnnnnnnnnnnnnnnnnnnnnnnnnnnnnnnnnnnnnnnnnnnnnnnnnnnnnnnnnnnnnnnnnnnnnnnnnnnnnnnnnnnnnnnnnnnnnnnnnnnnnnnnnnnnnnnnnnnnnnnnnnnnnnnnnnnnnnnnnnnnnnnnnnnnnnnnnnnnnnnnnnnnnnnnnnnnnnnnnnnnnnnnnnnnnnnnnnnnnnnnnnnnnnnnnnnnnnnnnnnnnnnnnnnnnnnnnnnnnnnnnnnnnnnnnnnnnnnnnnnnnnnnnnnnnnnnnnnnnnnnnnnnnnnnnnnnnnnnnnnnnnnnnnnnnnnnnnnnnnnnnnnnnnnnnnnnnnnnnnnnnnnnnnnnnnnnnnnnnnnnnnnnnnnnnnnnnnnnnnnnnnnnnnnnnnnnnnnnnnnnnnnnnnnnnnnnnnnnnnnnnnnnnnnnnnnnnnnnnnnnnnnnnnnnnnnnnnnnnnnnnnnnnnnnnnnnnnnnnnnnnnnnnnnnnnnnnnnnnnnnnnnnnnnnnnnnnnnnnnnnnnnnnnnnnnnnnnnnnnnnnnnnnnnnnnnnnnnnnnnnnnnnnnnnnnnnnnnnnnnnnnnnnnnnnnnnnnnnnnnnnnnnnnnnnnnnnnnnnnnnnnnnnnnnnnnnnnnnnnnnnnnnnnnnnnnnnnnnnnnnnnnnnnnnnnnnnnnnnnnnnnnnnnnnnnnnnnnnnnnnnnnnnnnnnnnnnnnnnnnnnnnnnnnnnnnnnnnnnnnnnnnnnnnnnnnnnnnnnnnnnnnnnnnnnnnnnnnnnnnnnnnnnnnnnnnnnnnnnnnnnnnnnnnnnnnnnnnnnnnnnnnnnnnnnnnnnnnnnnnnnnnnnnnnnnnnnnnnnnnnnnnnnnnnnnnnnnnnnnnnnnnnnnnnnnnnnnnnnnnnnnnnnnnnnnnnnnnnnnnnnnnnnnnnnnnnnnnnnnnnnnnnnnnnnnnnnnnnnnnnnnnnnnnnnnnnnnnnnnnnnnnnnnnnnnnnnnnnnnnnnnnnnnnnnnnnnnnnnnnnnnnnnnnnnnnnnnnnnnnnnnnnnnnnnnnnnnnnnnnnnnnnnnnnnnnnnnnnnnnnnnnnnnnnnnnnnnnnnnnnnnnnnnnnnnnnnnnnnnnnnnnnnnnnnnnnnnnnnnnnnnnnnnnnnnnnnnnnnnnnnnnnnnnnnnnnnnnnnnnnnnnnnnnnnnnnnnnnnnnnnnnnnnnnnnnnnnnnnnnnnnnnnnnnnnnnnnnnnnnnnnnnnnnnnnnnnnnnnnnnnnnnnnnnnnnnnnnnnnnnnnnnnnnnnnnnnnnnnnnnnnnnnnnnnnnnnnnnnnnnnnnnnnnnnnnnnnnnnnnnnnnnnnnnnnnnnnnnnnnnnnnnnnnnnnnnnnnnnnnnnnnnnnnnnnnnnnnnnnnnnnnnnnnnnnnnnnnnnnnnnnnnnnnnnnnnnnnnnnnnnnnnnnnnnnnnnnnnnnnnnnnnnnnnnnnnnnnnnnnnnnnnnnnnnnnnnnnnnnnnnnnnnnnnnnnnnnnnnnnnnnnnnnnnnnnnnnnnnnnnnnnnnnnnnnnnnnnnnnnnnnnnnnnnnnnnnnnnnnnnnnnnnnnnnnnnnnnnnnnnnnnnnnnnnnnnnnnnnnnnnnnnnnnnnnnnnnnnnnnnnnnnnnnnnnnnnnnnnnnnnnnnnnnnnnnnnnnnnnnnnnnnnnnnnnnnnnnnnnnnnnnnnnnnnnnnnnnnnnnnnnnnnnnnnnnnnnnnnnnnnnnnnnnnnnnnnnnnnnnnnnnnnnnnnnnnnnnnnnnnnnnnnnnnnnnnnnnnnnnnnnnnnnnnnnnnnnnnnnnnnnnnnnnnnnnnnnnnnnnnnnnnnnnnnnnnnnnnnnnnnnnnnnnnnnnnnnnnnnnnnnnnnnnnnnnnnnnnnnnnnnnnnnnnnnnnnnnnnnnnnnnnnnnnnnnnnnnnnnnnnnnnnnnnnnnnnnnnnnnnnnnnnnnnnnnnnnnnnnnnnnnnnnnnnnnnnnnnnnnnnnnnnnnnnnnnnnnnnnnnnnnnnnnnnnnnnnnnnnnnnnnnnnnnnnnnnnnnnnnnnnnnnnnnnnnnnnnnnnnnnnnnnnnnnnnnnnnnnnnnnnnnnnnnnnnnnnnnnnnnnnnnnnnnnnnnnnnnnnnnnnnnnnnnnnnnnnnnnnnnnnnnnnnnnnnnnnnnnnnnnnnnnnnnnnnnnnnnnnnnnnnnnnnnnnnnnnnnnnnnnnnnnnnnnnnnnnnnnnnnnnnnnnnnnnnnnnnnnnnnnnnnnnnnnnnnnnnnnnnnnnnnnnnnnnnnnnnnnnnnnnnnnnnnnnnnnnnnnnnnnnnnnnnnnnnnnnnnnnnnnnnnnnnnnnnnnnnnnnnnnnnnnnnnnnnnnnnnnnnnnnnnnnnnnnnnnnnnnnnnnnnnnnnnnnnnnnnnnnnnnnnnnnnnnnnnnnnnnnnnnnnnnnnnnnnnnnnnnnnnnnnnnnnnnnnnnnnnnnnnnnnnnnnnnnnnnnnnnnnnnnnnnnnnnnnnnnnnnnnnnnnnnnnnnnnnnnnnnnnnnnnnnnnnnnnnnnnnnnnnnnnnnnnnnnnnnnnnnnnnnnnnnnnnnnnnnnnnnnnnnnnnnnnnnnnnnnnnnnnnnnnnnnnnnnnnnnnnnnnnnnnnnnnnnnnnnnnnnnnnnnnnnnnnnnnnnnnnnnnnnnnnnnnnnnnnnnnnnnnnnnnnnnnnnnnnnnnnnnnnnnnnnnnnnnnnnnnnnnnnnnnnnnnnnnnnnnnnnnnnnnnnnnnnnnnnnnnnnnnnnnnnnnnnnnnnnnnnnnnnnnnnnnnnnnnnnnnnnnnnnnnnnnnnnnnnnnnnnnnnnnnnnnnnnnnnnnnnnnnnnnnnnnnnnnnnnnnnnnnnnnnnnnnnnnnnnnnnnnnnnnnnnnnnnnnnnnnnnnnnnnnnnnnnnnnnnnnnnnnnnnnnnnnnnnnnnnnnnnnnnnnnnnnnnnnnnnnnnnnnnnnnnnnnnnnnnnnnnnnnnnnnnnnnnnnnnnnnnnnnnnnnnnnnnnnnnnnnnnnnnnnnnnnnnnnnnnnnnnnnnnnnnnnnnnnnnnnnnnnnnnnnnnnnnnnnnnnnnnnnnnnnnnnnnnnnnnnnnnnnnnnnnnnnnnnnnnnnnnnnnnnnnnnnnnnnnnnnnnnnnnnnnnnnnnnnnnnnnnnnnnnnnnnnnnnnnnnnnnnnnnnnnnnnnnnnnnnnnnnnnnnnnnnnnnnnnnnnnnnnnnnnnnnnnnnnnnnnnnnnnnnnnnnnnnnnnnnnnnnnnnnnnnnnnnnnnnnnnnnnnnnnnnnnnnnnnnnnnnnnnnnnnnnnnnnnnnnnnnnnnnnnnnnnnnnnnnnnnnnnnnnnnnnnnnnnnnnnnnnnnnnnnnnnnnnnnnnnnnnnnnnnnnnnnnnnnnnnnnnnnnnnnnnnnnnnnnnnnnnnnnnnnnnnnnnnnnnnnnnnnnnnnnnnnnnnnnnnnnnnnnnnnnnnnnnnnnnnnnnnnnnnnnnnnnnnnnnnnnnnnnnnnnnnnnnnnnnnnnnnnnnnnnnnnnnnnnnnnnnnnnnnnnnnnnnnnnnnnnnnnnnnnnnnnnnnnnnnnnnnnnnnnnnnnnnnnnnnnnnnnnnnnnnnnnnnnnnnnnnnnnnnnnnnnnnnnnnnnnnnnnnnnnnnnnnnnnnnnnnnnnnnnnnnnnnnnnnnnnnnnnnnnnnnnnnnnnnnnnnnnnnnnnnnnnnnnnnnnnnnnnnnnnnnnnnnnnnnnnnnnnnnnnnnnnnnnnnnnnnnnnnnnnnnnnnnnnnnnnnnnnnnnnnnnnnnnnnnnnnnnnnnnnnnnnnnnnnnnnnnnnnnnnnnnnnnnnnnnnnnnnnnnnnnnnnnnnnnnnnnnnnnnnnnnnnnnnnnnnnnnnnnnnnnnnnnnnnnnnnnnnnnnnnnnnnnnnnnnnnnnnnnnnnnnnnnnnnnnnnnnnnnnnnnnnnnnnnnnnnnnnnnnnnnnnnnnnnnnnnnnnnnnnnnnnnnnnnnnnnnnnnnnnnnnnnnnnnnnnnnnnnnnnnnnnnnnnnnnnnnnnnnnnnnnnnnnnnnnnnnnnnnnnnnnnnnnnnnnnnnnnnnnnnnnnnnnnnnnnnnnnnnnnnnnnnnnnnnnnnnnnnnnnnnnnnnnnnnnnnnnnnnnnnnnnnnnnnnnnnnnnnnnnnnnnnnnnnnnnnnnnnnnnnnnnnnnnnnnnnnnnnnnnnnnnnnnnnnnnnnnnnnnnnnnnnnnnnnnnnnnnnnnnnnnnnnnnnnnnnnnnnnnnnnnnnnnnnnnnnnnnnnnnnnnnnnnnnnnnnnnnnnnnnnnnnnnnnnnnnnnnnnnnnnnnnnnnnnnnnnnnnnnnnnnnnnnnnnnnnnnnnnnnnnnnnnnnnnnnnnnnnnnnnnnnnnnnnnnnnnnnnnnnnnnnnnnnnnnnnnnnnnnnnnnnnnnnnnnnnnnnnnnnnnnnnnnnnnnnnnnnnnnnnnnnnnnnnnnnnnnnnnnnnnnnnnnnnnnnnnnnnnnnnnnnnnnnnnnnnnnnnnnnnnnnnnnnnnnnnnnnnnnnnnnnnnnnnnnnnnnnnnnnnnnnnnnnnnnnnnnnnnnnnnnnnnnnnnnnnnnnnnnnnnnnnnnnnnnnnnnnnnnnnnnnnnnnnnnnnnnnnnnnnnnnnnnnnnnnnnnnnnnnnnnnnnnnnnnnnnnnnnnnnnnnnnnnnnnnnnnnnnnnnnnnnnnnnnnnnnnnnnnnnnnnnnnnnnnnnnnnnnnnnnnnnnnnnnnnnnnnnnnnnnnnnnnnnnnnnnnnnnnnnnnnnnnnnnnnnnnnnnnnnnnnnnnnnnnnnnnnnnnnnnnnnnnnnnnnnnnnnnnnnnnnnnnnnnnnnnnnnnnnnnnnnnnnnnnnnnnnnnnnnnnnnnnnnnnnnnnnnnnnnnnnnnnnnnnnnnnnnnnnnnnnnnnnnnnnnnnnnnnnnnnnnnnnnnnnnnnnnnnnnnnnnnnnnnnnnnnnnnnnnnnnnnnnnnnnnnnnnnnnnnnnnnnnnnnnnnnnnnnnnnnnnnnnnnnnnnnnnnnnnnnnnnnnnnnnnnnnnnnnnnnnnnnnnnnnnnnnnnnnnnnnnnnnnnnnnnnnnnnnnnnnnnnnnnnnnnnnnnnnnnnnnnnnnnnnnnnnnnnnnnnnnnnnnnnnnnnnnnnnnnnnnnnnnnnnnnnnnnnnnnnnnnnnnnnnnnnnnnnnnnnnnnnnnnnnnnnnnnnnnnnnnnnnnnnnnnnnnnnnnnnnnnnnnnnnnnnnnnnnnnnnnnnnnnnnnnnnnnnnnnnnnnnnnnnnnnnnnnnnnnnnnnnnnnnnnnnnnnnnnnnnnnnnnnnnnnnnnnnnnnnnnnnnnnnnnnnnnnnnnnnnnnnnnnnnnnnnnnnnnnnnnnnnnnnnnnnnnnnnnnnnnnnnnnnnnnnnnnnnnnnnnnnnnnnnnnnnnnnnnnnnnnnnnnnnnnnnnnnnnnnnnnnnnnnnnnnnnnnnnnnnnnnnnnnnnnnnnnnnnnnnnnnnnnnnnnnnnnnnnnnnnnnnnnnnnnnnnnnnnnnnnnnnnnnnnnnnnnnnnnnnnnnnnnnnnnnnnnnnnnnnnnnnnnnnnnnnnnnnnnnnnnnnnnnnnnnnnnnnnnnnnnnnnnnnnnnnnnnnnnnnnnnnnnnnnnnnnnnnnnnnnnnnnnnnnnnnnnnnnnnnnnnnnnnnnnnnnnnnnnnnnnnnnnnnnnnnnnnnnnnnnnnnnnnnnnnnnnnnnnnnnnnnnnnnnnnnnnnnnnnnnnnnnnnnnnnnnnnnnnnnnnnnnnnnnnnnnnnnnnnnnnnnnnnnnnnnnnnnnnnnnnnnnnnnnnnnnnnnnnnnnnnnnnnnnnnnnnnnnnnnnnnnnnnnnnnnnnnnnnnnnnnnnnnnnnnnnnnnnnnnnnnnnnnnnnnnnnnnnnnnnnnnnnnnnnnnnnnnnnnnnnnnnnnnnnnnnnnnnnnnnnnnnnnnnnnnnnnnnnnnnnnnnnnnnnnnnnnnnnnnnnnnnnnnnnnnnnnnnnnnnnnnnnnnnnnnnnnnnnnnnnnnnnnnnnnnnnnnnnnnnnnnnnnnnnnnnnnnnnnnnnnnnnnnnnnnnnnnnnnnnnnnnnnnnnnnnnnnnnnnnnnnnnnnnnnnnnnnnnnnnnnnnnnnnnnnnnnnnnnnnnnnnnnnnnnnnnnnnnnnnnnnnnnnnnnnnnnnnnnnnnnnnnnnnnnnnnnnnnnnnnnnnnnnnnnnnnnnnnnnnnnnnnnnnnnnnnnnnnnnnnnnnnnnnnnnnnnnnnnnnnnnnnnnnnnnnnnnnnnnnnnnnnnnnnnnnnnnnnnnnnnnnnnnnnnnnnnnnnnnnnnnnnnnnnnnnnnnnnnnnnnnnnnnnnnnnnnnnnnnnnnnnnnnnnnnnnnnnnnnnnnnnnnnnnnnnnnnnnnnnnnnnnnnnnnnnnnnnnnnnnnnnnnnnnnnnnnnnnnnnnnnnnnnnnnnnnnnnnnnnnnnnnnnnnnnnnnnnnnnnnnnnnnnnnnnnnnnnnnnnnnnnnnnnnnnnnnnnnnnnnnnnnnnnnnnnnnnnnnnnnnnnnnnnnnnnnnnnnnnnnnnnnnnnnnnnnnnnnnnnnnnnnnnnnnnnnnnnnnnnnnnnnnnnnnnnnnnnnnnnnnnnnnnnnnnnnnnnnnnnnnnnnnnnnnnnnnnnnnnnnnnnnnnnnnnnnnnnnnnnnnnnnnnnnnnnnnnnnnnnnnnnnnnnnnnnnnnnnnnnnnnnnnnnnnnnnnnnnnnnnnnnnnnnnnnnnnnnnnnnnnnnnnnnnnnnnnnnnnnnnnnnnnnnnnnnnnnnnnnnnnnnnnnnnnnnnnnnnnnnnnnnnnnnnnnnnnnnnnnnnnnnnnnnnnnnnnnnnnnnnnnnnnnnnnnnnnnnnnnnnnnnnnnnnnnnnnnnnnnnnnnnnnnnnnnnnnnnnnnnnnnnnnnnnnnnnnnnnnnnnnnnnnnnnnnnnnnnnnnnnnnnnnnnnnnnnnnnnnnnnnnnnnnnnnnnnnnnnnnnnnnnnnnnnnnnnnnnnnnnnnnnnnnnnnnnnnnnnnnnnnnnnnnnnnnnnnnnnnnnnnnnnnnnnnnnnnnnnnnnnnnnnnnnnnnnnnnnnnnnnnnnnnnnnnnnnnnnnnnnnnnnnnnnnnnnnnnnnnnnnnnnnnnnnnnnnnnnnnnnnnnnnnnnnnnnnnnnnnnnnnnnnnnnnnnnnnnnnnnnnnnnnnnnnnnnnnnnnnnnnnnnnnnnnnnnnnnnnnnnnnnnnnnnnnnnnnnnnnnnnnnnnnnnnnnnnnnnnnnnnnnnnnnnnnnnnnnnnnnnnnnnnnnnnnnnnnnnnnnnnnnnnnnnnnnnnnnnnnnnnnnnnnnnnnnnnnnnnnnnnnnnnnnnnnnnnnnnnnnnnnnnnnnnnnnnnnnnnnnnnnnnnnnnnnnnnnnnnnnnnnnnnnnnnnnnnnnnnnnnnnnnnnnnnnnnnnnnnnnnnnnnnnnnnnnnnnnnnnnnnnnnnnnnnnnnnnnnnnnnnnnnnnnnnnnnnnnnnnnnnnnnnnnnnnnnnnnnnnnnnnnnnnnnnnnnnnnnnnnnnnnnnnnnnnnnnnnnnnnnnnnnnnnnnnnnnnnnnnnnnnnnnnnnnnnnnnnnnnnnnnnnnnnnnnnnnnnnnnnnnnnnnnnnnnnnnnnnnnnnnnnnnnnnnnnnnnnnnnnnnnnnnnnnnnnnnnnnnnnnnnnnnnnnnnnnnnnnnnnnnnnnnnnnnnnnnnnnnnnnnnnnnnnnnnnnnnnnnnnnnnnnnnnnnnnnnnnnnnnnnnnnnnnnnnnnnnnnnnnnnnnnnnnnnnnnnnnnnnnnnnnnnnnnnnnnnnnnnnnnnnnnnnnnnnnnnnnnnnnnnnnnnnnnnnnnnnnnnnnnnnnnnnnnnnnnnnnnnnnnnnnnnnnnnnnnnnnnnnnnnnnnnnnnnnnnnnnnnnnnnnnnnnnnnnnnnnnnnnnnnnnnnnnnnnnnnnnnnnnnnnnnnnnnnnnnnnnnnnnnnnnnnnnnnnnnnnnnnnnnnnnnnnnnnnnnnnnnnnnnnnnnnnnnnnnnnnnnnnnnnnnnnnnnnnnnnnnnnnnnnnnnnnnnnnnnnnnnnnnnnnnnnnnnnnnnnnnnnnnnnnnnnnnnnnnnnnnnnnnnnnnnnnnnnnnnnnnnnnnnnnnnnnnnnnnnnnnnnnnnnnnnnnnnnnnnnnnnnnnnnnnnnnnnnnnnnnnnnnnnnnnnnnnnnnnnnnnnnnnnnnnnnnnnnnnnnnnnnnnnnnnnnnnnnnnnnnnnnnnnnnnnnnnnnnnnnnnnnnnnnnnnnnnnnnnnnnnnnnnnnnnnnnnnnnnnnnnnnnnnnnnnnnnnnnnnnnnnnnnnnnnnnnnnnnnnnnnnnnnnnnnnnnnnnnnnnnnnnnnnnnnnnnnnnnnnnnnnnnnnnnnnnnnnnnnnnnnnnnnnnnnnnnnnnnnnnnnnnnnnnnnnnnnnnnnnnnnnnnnnnnnnnnnnnnnnnnnnnnnnnnnnnnnnnnnnnnnnnnnnnnnnnnnnnnnnnnnnnnnnnnnnnnnnnnnnnnnnnnnnnnnnnnnnnnnnnnnnnnnnnnnnnnnnnnnnnnnnnnnnnnnnnnnnnnnnnnnnnnnnnnnnnnnnnnnnnnnnnnnnnnnnnnnnnnnnnnnnnnnnnnnnnnnnnnnnnnnnnnnnnnnnnnnnnnnnnnnnnnnnnnnnnnnnnnnnnnnnnnnnnnnnnnnnnnnnnnnnnnnnnnnnnnnnnnnnnnnnnnnnnnnnnnnnnnnnnnnnnnnnnnnnnnnnnnnnnnnnnnnnnnnnnnnnnnnnnnnnnnnnnnnnnnnnnnnnnnnnnnnnnnnnnnnnnnnnnnnnnnnnnnnnnnnnnnnnnnnnnnnnnnnnnnnnnnnnnnnnnnnnnnnnnnnnnnnnnnnnnnnnnnnnnnnnnnnnnnnnnnnnnnnnnnnnnnnnnnnnnnnnnnnnnnnnnnnnnnnnnnnnnnnnnnnnnnnnnnnnnnnnnnnnnnnnnnnnnnnnnnnnnnnnnnnnnnnnnnnnnnnnnnnnnnnnnnnnnnnnnnnnnnnnnnnnnnnnnnnnnnnnnnnnnnnnnnnnnnnnnnnnnnnnnnnnnnnnnnnnnnnnnnnnnnnnnnnnnnnnnnnnnnnnnnnnnnnnnnnnnnnnnnnnnnnnnnnnnnnnnnnnnnnnnnnnnnnnnnnnnnnnnnnnnnnnnnnnnnnnnnnnnnnnnnnnnnnnnnnnnnnnnnnnnnnnnnnnnnnnnnnnnnnnnnnnnnnnnnnnnnnnnnnnnnnnnnnnnnnnnnnnnnnnnnnnnnnnnnnnnnnnnnnnnnnnnnnnnnnnnnnnnnnnnnnnnnnnnnnnnnnnnnnnnnnnnnnnnnnnnnnnnnnnnnnnnnnnnnnnnnnnnnnnnnnnnnnnnnnnnnnnnnnnnnnnnnnnnnnnnnnnnnnnnnnnnnnnnnnnnnnnnnnnnnnnnnnnnnnnnnnnnnnnnnnnnnnnnnnnnnnnnnnnnnnnnnnnnnnnnnnnnnnnnnnnnnnnnnnnnnnnnnnnnnnnnnnnnnnnnnnnnnnnnnnnnnnnnnnnnnnnnnnnnnnnnnnnnnnnnnnnnnnnnnnnnnnnnnnnnnnnnnnnnnnnnnnnnnnnnnnnnnnnnnnnnnnnnnnnnnnnnnnnnnnnnnnnnnnnnnnnnnnnnnnnnnnnnnnnnnnnnnnnnnnnnnnnnnnnnnnnnnnnnnnnnnnnnnnnnnnnnnnnnnnnnnnnnnnnnnnnnnnnnnnnnnnnnnnnnnnnnnnnnnnnnnnnnnnnnnnnnnnnnnnnnnnnnnnnnnnnnnnnnnnnnnnnnnnnnnnnnnnnnnnnnnnnnnnnnnnnnnnnnnnnnnnnnnnnnnnnnnnnnnnnnnnnnnnnnnnnnnnnnnnnnnnnnnnnnnnnnnnnnnnnnnnnnnnnnnnnnnnnnnnnnnnnnnnnnnnnnnnnnnnnnnnnnnnnnnnnnnnnnnnnnnnnnnnnnnnnnnnnnnnnnnnnnnnnnnnnnnnnnnnnnnnnnnnnnnnnnnnnnnnnnnnnnnnnnnnnnnnnnnnnnnnnnnnnnnnnnnnnnnnnnnnnnnnnnnnnnnnnnnnnnnnnnnnnnnnnnnnnnnnnnnnnnnnnnnnnnnnnnnnnnnnnnnnnnnnnnnnnnnnnnnnnnnnnnnnnnnnnnnnnnnnnnnnnnnnnnnnnnnnnnnnnnnnnnnnnnnnnnnnnnnnnnnnnnnnnnnnnnnnnnnnnnnnnnnnnnnnnnnnnnnnnnnnnnnnnnnnnnnnnnnnnnnnnnnnnnnnnnnnnnnnnnnnnnnnnnnnnnnnnnnnnnnnnnnnnnnnnnnnnnnnnnnnnnnnnnnnnnnnnnnnnnnnnnnnnnnnnnnnnnnnnnnnnnnnnnnnnnnnnnnnnnnnnnnnnnnnnnnnnnnnnnnnnnnnnnnnnnnnnnnnnnnnnnnnnnnnnnnnnnnnnnnnnnnnnnnnnnnnnnnnnnnnnnnnnnnnnnnnnnnnnnnnnnnnnnnnnnnnnnnnnnnnnnnnnnnnnnnnnnnnnnnnnnnnnnnnnnnnnnnnnnnnnnnnnnnnnnnnnnnnnnnnnnnnnnnnnnnnnnnnnnnnnnnnnnnnnnnnnnnnnnnnnnnnnnnnnnnnnnnnnnnnnnnnnnnnnnnnnnnnnnnnnnnnnnnnnnnnnnnnnnnnnnnnnnnnnnnnnnnnnnnnnnnnnnnnnnnnnnnnnnnnnnnnnnnnnnnnnnnnnnnnnnnnnnnnnnnnnnnnnnnnnnnnnnnnnnnnnnnnnnnnnnnnnnnnnnnnnnnnnnnnnnnnnnnnnnnnnnnnnnnnnnnnnnnnnnnnnnnnnnnnnnnnnnnnnnnnnnnnnnnnnnnnnnnnnnnnnnnnnnnnnnnnnnnnnnnnnnnnnnnnnnnnnnnnnnnnnnnnnnnnnnnnnnnnnnnnnnnnnnnnnnnnnnnnnnnnnnnnnnnnnnnnnnnnnnnnnnnnnnnnnnnnnnnnnnnnnnnnnnnnnnnnnnnnnnnnnnnnnnnnnnnnnnnnnnnnnnnnnnnnnnnnnnnnnnnnnnnnnnnnnnnnnnnnnnnnnnnnnnnnnnnnnnnnnnnnnnnnnnnnnnnnnnnnnnnnnnnnnnnnnnnnnnnnnnnnnnnnnnnnnnnnnnnnnnnnnnnnnnnnnnnnnnnnnnnnnnnnnnnnnnnnnnnnnnnnnnnnnnnnnnnnnnnnnnnnnnnnnnnnnnnnnnnnnnnnnnnnnnnnnnnnnnnnnnnnnnnnnnnnnnnnnnnnnnnnnnnnnnnnnnnnnnnnnnnnnnnnnnnnnnnnnnnnnnnnnnnnnnnnnnnnnnnnnnnnnnnnnnnnnnnnnnnnnnnnnnnnnnnnnnnnnnnnnnnnnnnnnnnnnnnnnnnnnnnnnnnnnnnnnnnnnnnnnnnnnnnnnnnnnnnnnnnnnnnnnnnnnnnnnnnnnnnnnnnnnnnnnnnnnnnnnnnnnnnnnnnnnnnnnnnnnnnnnnnnnnnnnnnnnnnnnnnnnnnnnnnnnnnnnnnnnnnnnnnnnnnnnnnnnnnnnnnnnnnnnnnnnnnnnnnnnnnnnnnnnnnnnnnnnnnnnnnnnnnnnnnnnnnnnnnnnnnnnnnnnnnnnnnnnnnnnnnnnnnnnnnnnnnnnnnnnnnnnnnnnnnnnnnnnnnnnnnnnnnnnnnnnnnnnnnnnnnnnnnnnnnnnnnnnnnnnnnnnnnnnnnnnnnnnnnnnnnnnnnnnnnnnnnnnnnnnnnnnnnnnnnnnnnnnnnnnnnnnnnnnnnnnnnnnnnnnnnnnnnnnnnnnnnnnnnnnnnnnnnnnnnnnnnnnnnnnnnnnnnnnnnnnnnnnnnnnnnnnnnnnnnnnnnnnnnnnnnnnnnnnnnnnnnnnnnnnnnnnnnnnnnnnnnnnnnnnnnnnnnnnnnnnnnnnnnnnnnnnnnnnnnnnnnnnnnnnnnnnnnnnnnnnnnnnnnnnnnnnnnnnnnnnnnnnnnnnnnnnnnnnnnnnnnnnnnnnnnnnnnnnnnnnnnnnnnnnnnnnnnnnnnnnnnnnnnnnnnnnnnnnnnnnnnnnnnnnnnnnnnnnnnnnnnnnnnnnnnnnnnnnnnnnnnnnnnnnnnnnnnnnnnnnnnnnnnnnnnnnnnnnnnnnnnnnnnnnnnnnnnnnnnnnnnnnnnnnnnnnnnnnnnnnnnnnnnnnnnnnnnnnnnnnnnnnnnnnnnnnnnnnnnnnnnnnnnnnnnnnnnnnnnnnnnnnnnnnnnnnnnnnnnnnnnnnnnnnnnnnnnnnnnnnnnnnnnnnnnnnnnnnnnnnnnnnnnnnnnnnnnnnnnnnnnnnnnnnnnnnnnnnnnnnnnnnnnnnnnnnnnnnnnnnnnnnnnnnnnnnnnnnnnnnnnnnnnnnnnnnnnnnnnnnnnnnnnnnnnnnnnnnnnnnnnnnnnnnnnnnnnnnnnnnnnnnnnnnnnnnnnnnnnnnnnnnnnnnnnnnnnnnnnnnnnnnnnnnnnnnnnnnnnnnnnnnnnnnnnnnnnnnnnnnnnnnnnnnnnnnnnnnnnnnnnnnnnnnnnnnnnnnnnnnnnnnnnnnnnnnnnnnnnnnnnnnnnnnnnnnnnnnnnnnnnnnnnnnnnnnnnnnnnnnnnnnnnnnnnnnnnnnnnnnnnnnnnnnnnnnnnnnnnnnnnnnnnnnnnnnnnnnnnnnnnnnnnnnnnnnnnnnnnnnnnnnnnnnnnnnnnnnnnnnnnnnnnnnnnnnnnnnnnnnnnnnnnnnnnnnnnnnnnnnnnnnnnnnnnnnnnnnnnnnnnnnnnnnnnnnnnnnnnnnnnnnnnnnnnnnnnnnnnnnnnnnnnnnnnnnnnnnnnnnnnnnnnnnnnnnnnnnnnnnnnnnnnnnnnnnnnnnnnnnnnnnnnnnnnnnnnnnnnnnnnnnnnnnnnnnnnnnnnnnnnnnnnnnnnnnnnnnnnnnnnnnnnnnnnnnnnnnnnnnnnnnnnnnnnnnnnnnnnnnnnnnnnnnnnnnnnnnnnnnnnnnnnnnnnnnnnnnnnnnnnnnnnnnnnnnnnnnnnnnnnnnnnnnnnnnnnnnnnnnnnnnnnnnnnnnnnnnnnnnnnnnnnnnnnnnnnnnnnnnnnnnnnnnnnnnnnnnnnnnnnnnnnnnnnnnnnnnnnnnnnnnnnnnnnnnnnnnnnnnnnnnnnnnnnnnnnnnnnnnnnnnnnnnnnnnnnnnnnnnnnnnnnnnnnnnnnnnnnnnnnnnnnnnnnnnnnnnnnnnnnnnnnnnnnnnnnnnnnnnnnnnnnnnnnnnnnnnnnnnnnnnnnnnnnnnnnnnnnnnnnnnnnnnnnnnnnnnnnnnnnnnnnnnnnnnnnnnnnnnnnnnnnnnnnnnnnnnnnnnnnnnnnnnnnnnnnnnnnnnnnnnnnnnnnnnnnnnnnnnnnnnnnnnnnnnnnnnnnnnnnnnnnnnnnnnnnnnnnnnnnnnnnnnnnnnnnnnnnnnnnnnnnnnnnnnnnnnnnnnnnnnnnnnnnnnnnnnnnnnnnnnnnnnnnnnnnnnnnnnnnnnnnnnnnnnnnnnnnnnnnnnnnnnnnnnnnnnnnnnnnnnnnnnnnnnnnnnnnnnnnnnnnnnnnnnnnnnnnnnnnnnnnnnnnnnnnnnnnnnnnnnnnnnnnnnnnnnnnnnnnnnnnnnnnnnnnnnnnnnnnnnnnnnnnnnnnnnnnnnnnnnnnnnnnnnnnnnnnnnnnnnnnnnnnnnnnnnnnnnnnnnnnnnnnnnnnnnnnnnnnnnnnnnnnnnnnnnnnnnnnnnnnnnnnnnnnnnnnnnnnnnnnnnnnnnnnnnnnnnnnnnnnnnnnnnnnnnnnnnnnnnnnnnnnnnnnnnnnnnnnnnnnnnnnnnnnnnnnnnnnnnnnnnnnnnnnnnnnnnnnnnnnnnnnnnnnnnnnnnnnnnnnnnnnnnnnnnnnnnnnnnnnnnnnnnnnnnnnnnnnnnnnnnnnnnnnnnnnnnnnnnnnnnnnnnnnnnnnnnnnnnnnnnnnnnnnnnnnnnnnnnnnnnnnnnnnnnnnnnnnnnnnnnnnnnnnnnnnnnnnnnnnnnnnnnnnnnnnnnnnnnnnnnnnnnnnnnnnnnnnnnnnnnnnnnnnnnnnnnnnnnnnnnnnnnnnnnnnnnnnnnnnnnnnnnnnnnnnnnnnnnnnnnnnnnnnnnnnnnnnnnnnnnnnnnnnnnnnnnnnnnnnnnnnnnnnnnnnnnnnnnnnnnnnnnnnnnnnnnnnnnnnnnnnnnnnnnnnnnnnnnnnnnnnnnnnnnnnnnnnnnnnnnnnnnnnnnnnnnnnnnnnnnnnnnnnnnnnnnnnnnnnnnnnnnnnnnnnnnnnnnnnnnnnnnnnnnnnnnnnnnnnnnnnnnnnnnnnnnnnnnnnnnnnnnnnnnnnnnnnnnnnnnnnnnnnnnnnnnnnnnnnnnnnnnnnnnnnnnnnnnnnnnnnnnnnnnnnnnnnnnnnnnnnnnnnnnnnnnnnnnnnnnnnnnnnnnnnnnnnnnnnnnnnnnnnnnnnnnnnnnnnnnnnnnnnnnnnnnnnnnnnnnnnnnnnnnnnnnnnnnnnnnnnnnnnnnnnnnnnnnnnnnnnnnnnnnnnnnnnnnnnnnnnnnnnnnnnnnnnnnnnnnnnnnnnnnnnnnnnnnnnnnnnnnnnnnnnnnnnnnnnnnnnnnnnnnnnnnnnnnnnnnnnnnnnnnnnnnnnnnnnnnnnnnnnnnnnnnnnnnnnnnnnnnnnnnnnnnnnnnnnnnnnnnnnnnnnnnnnnnnnnnnnnnnnnnnnnnnnnnnnnnnnnnnnnnnnnnnnnnnnnnnnnnnnnnnnnnnnnnnnnnnnnnnnnnnnnnnnnnnnnnnnnnnnnnnnnnnnnnnnnnnnnnnnnnnnnnnnnnnnnnnnnnnnnnnnnnnnnnnnnnnnnnnnnnnnnnnnnnnnnnnnnnnnnnnnnnnnnnnnnnnnnnnnnnnnnnnnnnnnnnnnnnnnnnnnnnnnnnnnnnnnnnnnnnnnnnnnnnnnnnnnnnnnnnnnnnnnnnnnnnnnnnnnnnnnnnnnnnnnnnnnnnnnnnnnnnnnnnnnnnnnnnnnnnnnnnnnnnnnnnnnnnnnnnnnnnnnnnnnnnnnnnnnnnnnnnnnnnnnnnnnnnnnnnnnnnnnnnnnnnnnnnnnnnnnnnnnnnnnnnnnnnnnnnnnnnnnnnnnnnnnnnnnnnnnnnnnnnnnnnnnnnnnnnnnnnnnnnnnnnnnnnnnnnnnnnnnnnnnnnnnnnnnnnnnnnnnnnnnnnnnnnnnnnnnnnnnnnnnnnnnnnnnnnnnnnnnnnnnnnnnnnnnnnnnnnnnnnnnnnnnnnnnnnnnnnnnnnnnnnnnnnnnnnnnnnnnnnnnnnnnnnnnnnnnnnnnnnnnnnnnnnnnnnnnnnnnnnnnnnnnnnnnnnnnnnnnnnnnnnnnnnnnnnnnnnnnnnnnnnnnnnnnnnnnnnnnnnnnnnnnnnnnnnnnnnnnnnnnnnnnnnnnnnnnnnnnnnnnnnnnnnnnnnnnnnnnnnnnnnnnnnnnnnnnnnnnnnnnnnnnnnnnnnnnnnnnnnnnnnnnnnnnnnnnnnnnnnnnnnnnnnnnnnnnnnnnnnnnnnnnnnnnnnnnnnnnnnnnnnnnnnnnnnnnnnnnnnnnnnnnnnnnnnnnnnnnnnnnnnnnnnnnnnnnnnnnnnnnnnnnnnnnnnnnnnnnnnnnnnnnnnnnnnnnnnnnnnnnnnnnnnnnnnnnnnnnnnnnnnnnnnnnnnnnnnnnnnnnnnnnnnnnnnnnnnnnnnnnnnnnnnnnnnnnnnnnnnnnnnnnnnnnnnnnnnnnnnnnnnnnnnnnnnnnnnnnnnnnnnnnnnnnnnnnnnnnnnnnnnnnnnnnnnnnnnnnnnnnnnnnnnnnnnnnnnnnnnnnnnnnnnnnnnnnnnnnnnnnnnnnnnnnnnnnnnnnnnnnnnnnnnnnnnnnnnnnnnnnnnnnnnnnnnnnnnnnnnnnnnnnnnnnnnnnnnnnnnnnnnnnnnnnnnnnnnnnnnnnnnnnnnnnnnnnnnnnnnnnnnnnnnnnnnnnnnnnnnnnnnnnnnnnnnnnnnnnnnnnnnnnnnnnnnnnnnnnnnnnnnnnnnnnnnnnnnnnnnnnnnnnnnnnnnnnnnnnnnnnnnnnnnnnnnnnnnnnnnnnnnnnnnnnnnnnnnnnnnnnnnnnnnnnnnnnnnnnnnnnnnnnnnnnnnnnnnnnnnnnnnnnnnnnnnnnnnnnnnnnnnnnnnnnnnnnnnnnnnnnnnnnnnnnnnnnnnnnnnnnnnnnnnnnnnnnnnnnnnnnnnnnnnnnnnnnnnnnnnnnnnnnnnnnnnnnnnnnnnnnnnnnnnnnnnnnnnnnnnnnnnnnnnnnnnnnnnnnnnnnnnnnnnnnnnnnnnnnnnnnnnnnnnnnnnnnnnnnnnnnnnnnnnnnnnnnnnnnnnnnnnnnnnnnnnnnnnnnnnnnnnnnnnnnnnnnnnnnnnnnnnnnnnnnnnnnnnnnnnnnnnnnnnnnnnnnnnnnnnnnnnnnnnnnnnnnnnnnnnnnnnnnnnnnnnnnnnnnnnnnnnnnnnnnnnnnnnnnnnnnnnnnnnnnnnnnnnnnnnnnnnnnnnnnnnnnnnnnnnnnnnnnnnnnnnnnnnnnnnnnnnnnnnnnnnnnnnnnnnnnnnnnnnnnnnnnnnnnnnnnnnnnnnnnnnnnnnnnnnnnnnnnnnnnnnnnnnnnnnnnnnnnnnnnnnnnnnnnnnnnnnnnnnnnnnnnnnnnnnnnnnnnnnnnnnnnnnnnnnnnnnnnnnnnnnnnnnnnnnnnnnnnnnnnnnnnnnnnnnnnnnnnnnnnnnnnnnnnnnnnnnnnnnnnnnnnnnnnnnnnnnnnnnnnnnnnnnnnnnnnnnnnnnnnnnnnnnnnnnnnnnnnnnnnnnnnnnnnnnnnnnnnnnnnnnnnnnnnnnnnnnnnnnnnnnnnnnnnnnnnnnnnnnnnnnnnnnnnnnnnnnnnnnnnnnnnnnnnnnnnnnnnnnnnnnnnnnnnnnnnnnnnnnnnnnnnnnnnnnnnnnnnnnnnnnnnnnnnnnnnnnnnnnnnnnnnnnnnnnnnnnnnnnnnnnnnnnnnnnnnnnnnnnnnnnnnnnnnnnnnnnnnnnnnnnnnnnnnnnnnnnnnnnnnnnnnnnnnnnnnnnnnnnnnnnnnnnnnnnnnnnnnnnnnnnnnnnnnnnnnnnnnnnnnnnnnnnnnnnnnnnnnnnnnnnnnnnnnnnnnnnnnnnnnnnnnnnnnnnnnnnnnnnnnnnnnnnnnnnnnnnnnnnnnnnnnnnnnnnnnnnnnnnnnnnnnnnnnnnnnnnnnnnnnnnnnnnnnnnnnnnnnnnnnnnnnnnnnnnnnnnnnnnnnnnnnnnnnnnnnnnnnnnnnnnnnnnnnnnnnnnnnnnnnnnnnnnnnnnnnnnnnnnnnnnnnnnnnnnnnnnnnnnnnnnnnnnnnnnnnnnnnnnnnnnnnnnnnnnnnnnnnnnnnnnnnnnnnnnnnnnnnnnnnnnnnnnnnnnnnnnnnnnnnnnnnnnnnnnnnnnnnnnnnnnnnnnnnnnnnnnnnnnnnnnnnnnnnnnnnnnnnnnnnnnnnnnnnnnnnnnnnnnnnnnnnnnnnnnnnnnnnnnnnnnnnnnnnnnnnnnnnnnnnnnnnnnnnnnnnnnnnnnnnnnnnnnnnnnnnnnnnnnnnnnnnnnnnnnnnnnnnnnnnnnnnnnnnnnnnnnnnnnnnnnnnnnnnnnnnnnnnnnnnnnnnnnnnnnnnnnnnnnnnnnnnnnnnnnnnnnnnnnnnnnnnnnnnnnnnnnnnnnnnnnnnnnnnnnnnnnnnnnnnnnnnnnnnnnnnnnnnnnnnnnnnnnnnnnnnnnnnnnnnnnnnnnnnnnnnnnnnnnnnnnnnnnnnnnnnnnnnnnnnnnnnnnnnnnnnnnnnnnnnnnnnnnnnnnnnnnnnnnnnnnnnnnnnnnnnnnnnnnnnnnnnnnnnnnnnnnnnnnnnnnnnnnnnnnnnnnnnnnnnnnnnnnnnnnnnnnnnnnnnnnnnnnnnnnnnnnnnnnnnnnnnnnnnnnnnnnnnnnnnnnnnnnnnnnnnnnnnnnnnnnnnnnnnnnnnnnnnnnnnnnnnnnnnnnnnnnnnnnnnnnnnnnnnnnnnnnnnnnnnnnnnnnnnnnnnnnnnnnnnnnnnnnnnnnnnnnnnnnnnnnnnnnnnnnnnnnnnnnnnnnnnnnnnnnnnnnnnnnnnnnnnnnnnnnnnnnnnnnnnnnnnnnnnnnnnnnnnnnnnnnnnnnnnnnnnnnnnnnnnnnnnnnnnnnnnnnnnnnnnnnnnnnnnnnnnnnnnnnnnnnnnnnnnnnnnnnnnnnnnnnnnnnnnnnnnnnnnnnnnnnnnnnnnnnnnnnnnnnnnnnnnnnnnnnnnnnnnnnnnnnnnnnnnnnnnnnnnnnnnnnnnnnnnnnnnnnnnnnnnnnnnnnnnnnnnnnnnnnnnnnnnnnnnnnnnnnnnnnnnnnnnnnnnnnnnnnnnnnnnnnnnnnnnnnnnnnnnnnnnnnnnnnnnnnnnnnnnnnnnnnnnnnnnnnnnnnnnnnnnnnnnnnnnnnnnnnnnnnnnnnnnnnnnnnnnnnnnnnnnnnnnnnnnnnnnnnnnnnnnnnnnnnnnnnnnnnnnnnnnnnnnnnnnnnnnnnnnnnnnnnnnnnnnnnnnnnnnnnnnnnnnnnnnnnnnnnnnnnnnnnnnnnnnnnnnnnnnnnnnnnnnnnnnnnnnnnnnnnnnnnnnnnnnnnnnnnnnnnnnnnnnnnnnnnnnnnnnnnnnnnnnnnnnnnnnnnnnnnnnnnnnnnnnnnnnnnnnnnnnnnnnnnnnnnnnnnnnnnnnnnnnnnnnnnnnnnnnnnnnnnnnnnnnnnnnnnnnnnnnnnnnnnnnnnnnnnnnnnnnnnnnnnnnnnnnnnnnnnnnnnnnnnnnnnnnnnnnnnnnnnnnnnnnnnnnnnnnnnnnnnnnnnnnnnnnnnnnnnnnnnnnnnnnnnnnnnnnnnnnnnnnnnnnnnnnnnnnnnnnnnnnnnnnnnnnnnnnnnnnnnnnnnnnnnnnnnnnnnnnnnnnnnnnnnnnnnnnnnnnnnnnnnnnnnnnnnnnnnnnnnnnnnnnnnnnnnnnnnnnnnnnnnnnnnnnnnnnnnnnnnnnnnnnnnnnnnnnnnnnnnnnnnnnnnnnnnnnnnnnnnnnnnnnnnnnnnnnnnnnnnnnnnnnnnnnnnnnnnnnnnnnnnnnnnnnnnnnnnnnnnnnnnnnnnnnnnnnnnnnnnnnnnnnnnnnnnnnnnnnnnnnnnnnnnnnnnnnnnnnnnnnnnnnnnnnnnnnnnnnnnnnnnnnnnnnnnnnnnnnnnnnnnnnnnnnnnnnnnnnnnnnnnnnnnnnnnnnnnnnnnnnnnnnnnnnnnnnnnnnnnnnnnnnnnnnnnnnnnnnnnnnnnnnnnnnnnnnnnnnnnnnnnnnnnnnnnnnnnnnnnnnnnnnnnnnnnnnnnnnnnnnnnnnnnnnnnnnnnnnnnnnnnnnnnnnnnnnnnnnnnnnnnnnnnnnnnnnnnnnnnnnnnnnnnnnnnnnnnnnnnnnnnnnnnnnnnnnnnnnnnnnnnnnnnnnnnnnnnnnnnnnnnnnnnnnnnnnnnnnnnnnnnnnnnnnnnnnnnnnnnnnnnnnnnnnnnnnnnnnnnnnnnnnnnnnnnnnnnnnnnnnnnnnnnnnnnnnnnnnnnnnnnnnnnnnnnnnnnnnnnnnnnnnnnnnnnnnnnnnnnnnnnnnnnnnnnnnnnnnnnnnnnnnnnnnnnnnnnnnnnnnnnnnnnnnnnnnnnnnnnnnnnnnnnnnnnnnnnnnnnnnnnnnnnnnnnnnnnnnnnnnnnnnnnnnnnnnnnnnnnnnnnnnnnnnnnnnnnnnnnnnnnnnnnnnnnnnnnnnnnnnnnnnnnnnnnnnnnnnnnnnnnnnnnnnnnnnnnnnnnnnnnnnnnnnnnnnnnnnnnnnnnnnnnnnnnnnnnnnnnnnnnnnnnnnnnnnnnnnnnnnnnnnnnnnnnnnnnnnnnnnnnnnnnnnnnnnnnnnnnnnnnnnnnnnnnnnnnnnnnnnnnnnnnnnnnnnnnnnnnnnnnnnnnnnnnnnnnnnnnnnnnnnnnnnnnnnnnnnnnnnnnnnnnnnnnnnnnnnnnnnnnnnnnnnnnnnnnnnnnnnnnnnnnnnnnnnnnnnnnnnnnnnnnnnnnnnnnnnnnnnnnnnnnnnnnnnnnnnnnnnnnnnnnnnnnnnnnnnnnnnnnnnnnnnnnnnnnnnnnnnnnnnnnnnnnnnnnnnnnnnnnnnnnnnnnnnnnnnnnnnnnnnnnnnnnnnnnnnnnnnnnnnnnnnnnnnnnnnnnnnnnnnnnnnnnnnnnnnnnnnnnnnnnnnnnnnnnnnnnnnnnnnnnnnnnnnnnnnnnnnnnnnnnnnnnnnnnnnnnnnnnnnnnnnnnnnnnnnnnnnnnnnnnnnnnnnnnnnnnnnnnnnnnnnnnnnnnnnnnnnnnnnnnnnnnnnnnnnnnnnnnnnnnnnnnnnnnnnnnnnnnnnnnnnnnnnnnnnnnnnnnnnnnnnnnnnnnnnnnnnnnnnnnnnnnnnnnnnnnnnnnnnnnnnnnnnnnnnnnnnnnnnnnnnnnnnnnnnnnnnnnnnnnnnnnnnnnnnnnnnnnnnnnnnnnnnnnnnnnnnnnnnnnnnnnnnnnnnnnnnnnnnnnnnnnnnnnnnnnnnnnnnnnnnnnnnnnnnnnnnnnnnnnnnnnnnnnnnnnnnnnnnnnnnnnnnnnnnnnnnnnnnnnnnnnnnnnnnnnnnnnnnnnnnnnnnnnnnnnnnnnnnnnnnnnnnnnnnnnnnnnnnnnnnnnnnnnnnnnnnnnnnnnnnnnnnnnnnnnnnnnnnnnnnnnnnnnnnnnnnnnnnnnnnnnnnnnnnnnnnnnnnnnnnnnnnnnnnnnnnnnnnnnnnnnnnnnnnnnnnnnnnnnnnnnnnnnnnnnnnnnnnnnnnnnnnnnnnnnnnnnnnnnnnnnnnnnnnnnnnnnnnnnnnnnnnnnnnnnnnnnnnnnnnnnnnnnnnnnnnnnnnnnnnnnnnnnnnnnnnnnnnnnnnnnnnnnnnnnnnnnnnnnnnnnnnnnnnnnnnnnnnnnnnnnnnnnnnnnnnnnnnnnnnnnnnnnnnnnnnnnnnnnnnnnnnnnnnnnnnnnnnnnnnnnnnnnnnnnnnnnnnnnnnnnnnnnnnnnnnnnnnnnnnnnnnnnnnnnnnnnnnnnnnnnnnnnnnnnnnnnnnnnnnnnnnnnnnnnnnnnnnnnnnnnnnnnnnnnnnnnnnnnnnnnnnnnnnnnnnnnnnnnnnnnnnnnnnnnnnnnnnnnnnnnnnnnnnnnnnnnnnnnnnnnnnnnnnnnnnnnnnnnnnnnnnnnnnnnnnnnnnnnnnnnnnnnnnnnnnnnnnnnnnnnnnnnnnnnnnnnnnnnnnnnnnnnnnnnnnnnnnnnnnnnnnnnnnnnnnnnnnnnnnnnnnnnnnnnnnnnnnnnnnnnnnnnnnnnnnnnnnnnnnnnnnnnnnnnnnnnnnnnnnnnnnnnnnnnnnnnnnnnnnnnnnnnnnnnnnnnnnnnnnnnnnnnnnnnnnnnnnnnnnnnnnnnnnnnnnnnnnnnnnnnnnnnnnnnnnnnnnnnnnnnnnnnnnnnnnnnnnnnnnnnnnnnnnnnnnnnnnnnnnnnnnnnnnnnnnnnnnnnnnnnnnnnnnnnnnnnnnnnnnnnnnnnnnnnnnnnnnnnnnnnnnnnnnnnnnnnnnnnnnnnnnnnnnnnnnnnnnnnnnnnnnnnnnnnnnnnnnnnnnnnnnnnnnnnnnnnnnnnnnnnnnnnnnnnnnnnnnnnnnnnnnnnnnnnnnnnnnnnnnnnnnnnnnnnnnnnnnnnnnnnnnnnnnnnnnnnnnnnnnnnnnnnnnnnnnnnnnnnnnnnnnnnnnnnnnnnnnnnnnnnnnnnnnnnnnnnnnnnnnnnnnnnnnnnnnnnnnnnnnnnnnnnnnnnnnnnnnnnnnnnnnnnnnnnnnnnnnnnnnnnnnnnnnnnnnnnnnnnnnnnnnnnnnnnnnnnnnnnnnnnnnnnnnnnnnnnnnnnnnnnnnnnnnnnnnnnnnnnnnnnnnnnnnnnnnnnnnnnnnnnnnnnnnnnnnnnnnnnnnnnnnnnnnnnnnnnnnnnnnnnnnnnnnnnnnnnnnnnnnnnnnnnnnnnnnnnnnnnnnnnnnnnnnnnnnnnnnnnnnnnnnnnnnnnnnnnnnnnnnnnnnnnnnnnnnnnnnnnnnnnnnnnnnnnnnnnnnnnnnnnnnnnnnnnnnnnnnnnnnnnnnnnnnnnnnnnnnnnnnnnnnnnnnnnnnnnnnnnnnnnnnnnnnnnnnnnnnnnnnnnnnnnnnnnnnnnnnnnnnnnnnnnnnnnnnnnnnnnnnnnnnnnnnnnnnnnnnnnnnnnnnnnnnnnnnnnnnnnnnnnnnnnnnnnnnnnnnnnnnnnnnnnnnnnnnnnnnnnnnnnnnnnnnnnnnnnnnnnnnnnnnnnnnnnnnnnnnnnnnnnnnnnnnnnnnnnnnnnnnnnnnnnnnnnnnnnnnnnnnnnnnnnnnnnnnnnnnnnnnnnnnnnnnnnnnnnnnnnnnnnnnnnnnnnnnnnnnnnnnnnnnnnnnnnnnnnnnnnnnnnnnnnnnnnnnnnnnnnnnnnnnnnnnnnnnnnnnnnnnnnnnnnnnnnnnnnnnnnnnnnnnnnnnnnnnnnnnnnnnnnnnnnnnnnnnnnnnnnnnnnnnnnnnnnnnnnnnnnnnnnnnnnnnnnnnnnnnnnnnnnnnnnnnnnnnnnnnnnnnnnnnnnnnnnnnnnnnnnnnnnnnnnnnnnnnnnnnnnnnnnnnnnnnnnnnnnnnnnnnnnnnnnnnnnnnnnnnnnnnnnnnnnnnnnnnnnnnnnnnnnnnnnnnnnnnnnnnnnnnnnnnnnnnnnnnnnnnnnnnnnnnnnnnnnnnnnnnnnnnnnnnnnnnnnnnnnnnnnnnnnnnnnnnnnnnnnnnnnnnnnnnnnnnnnnnnnnnnnnnnnnnnnnnnnnnnnnnnnnnnnnnnnnnnnnnnnnnnnnnnnnnnnnnnnnnnnnnnnnnnnnnnnnnnnnnnnnnnnnnnnnnnnnnnnnnnnnnnnnnnnnnnnnnnnnnnnnnnnnnnnnnnnnnnnnnnnnnnnnnnnnnnnnnnnnnnnnnnnnnnnnnnnnnnnnnnnnnnnnnnnnnnnnnnnnnnnnnnnnnnnnnnnnnnnnnnnnnnnnnnnnnnnnnnnnnnnnnnnnnnnnnnnnnnnnnnnnnnnnnnnnnnnnnnnnnnnnnnnnnnnnnnnnnnnnnnnnnnnnnnnnnnnnnnnnnnnnnnnnnnnnnnnnnnnnnnnnnnnnnnnnnnnnnnnnnnnnnnnnnnnnnnnnnnnnnnnnnnnnnnnnnnnnnnnnnnnnnnnnnnnnnnnnnnnnnnnnnnnnnnnnnnnnnnnnnnnnnnnnnnnnnnnnnnnnnnnnnnnnnnnnnnnnnnnnnnnnnnnnnnnnnnnnnnnnnnnnnnnnnnnnnnnnnnnnnnnnnnnnnnnnnnnnnnnnnnnnnnnnnnnnnnnnnnnnnnnnnnnnnnnnnnnnnnnnnnnnnnnnnnnnnnnnnnnnnnnnnnnnnnnnnnnnnnnnnnnnnnnnnnnnnnnnnnnnnnnnnnnnnnnnnnnnnnnnnnnnnnnnnnnnnnnnnnnnnnnnnnnnnnnnnnnnnnnnnnnnnnnnnnnnnnnnnnnnnnnnnnnnnnnnnnnnnnnnnnnnnnnnnnnnnnnnnnnnnnnnnnnnnnnnnnnnnnnnnnnnnnnnnnnnnnnnnnnnnnnnnnnnnnnnnnnnnnnnnnnnnnnnnnnnnnnnnnnnnnnnnnnnnnnnnnnnnnnnnnnnnnnnnnnnnnnnnnnnnnnnnnnnnnnnnnnnnnnnnnnnnnnnnnnnnnnnnnnnnnnnnnnnnnnnnnnnnnnnnnnnnnnnnnnnnnnnnnnnnnnnnnnnnnnnnnnnnnnnnnnnnnnnnnnnnnnnnnnnnnnnnnnnnnnnnnnnnnnnnnnnnnnnnnnnnnnnnnnnnnnnnnnnnnnnnnnnnnnnnnnnnnnnnnnnnnnnnnnnnnnnnnnnnnnnnnnnnnnnnnnnnnnnnnnnnnnnnnnnnnnnnnnnnnnnnnnnnnnnnnnnnnnnnnnnnnnnnnnnnnnnnnnnnnnnnnnnnnnnnnnnnnnnnnnnnnnnnnnnnnnnnnnnnnnnnnnnnnnnnnnnnnnnnnnnnnnnnnnnnnnnnnnnnnnnnnnnnnnnnnnnnnnnnnnnnnnnnnnnnnnnnnnnnnnnnnnnnnnnnnnnnnnnnnnnnnnnnnnnnnnnnnnnnnnnnnnnnnnnnnnnnnnnnnnnnnnnnnnnnnnnnnnnnnnnnnnnnnnnnnnnnnnnnnnnnnnnnnnnnnnnnnnnnnnnnnnnnnnnnnnnnnnnnnnnnnnnnnnnnnnnnnnnnnnnnnnnnnnnnnnnnnnnnnnnnnnnnnnnnnnnnnnnnnnnnnnnnnnnnnnnnnnnnnnnnnnnnnnnnnnnnnnnnnnnnnnnnnnnnnnnnnnnnnnnnnnnnnnnnnnnnnnnnnnnnnnnnnnnnnnnnnnnnnnnnnnnnnnnnnnnnnnnnnnnnnnnnnnnnnnnnnnnnnnnnnnnnnnnnnnnnnnnnnnnnnnnnnnnnnnnnnnnnnnnnnnnnnnnnnnnnnnnnnnnnnnnnnnnnnnnnnnnnnnnnnnnnnnnnnnnnnnnnnnnnnnnnnnnnnnnnnnnnnnnnnnnnnnnnnnnnnnnnnnnnnnnnnnnnnnnnnnnnnnnnnnnnnnnnnnnnnnnnnnnnnnnnnnnnnnnnnnnnnnnnnnnnnnnnnnnnnnnnnnnnnnnnnnnnnnnnnnnnnnnnnnnnnnnnnnnnnnnnnnnnnnnnnnnnnnnnnnnnnnnnnnnnnnnnnnnnnnnnnnnnnnnnnnnnnnnnnnnnnnnnnnnnnnnnnnnnnnnnnnnnnnnnnnnnnnnnnnnnnnnnnnnnnnnnnnnnnnnnnnnnnnnnnnnnnnnnnnnnnnnnnnnnnnnnnnnnnnnnnnnnnnnnnnnnnnnnnnnnnnnnnnnnnnnnnnnnnnnnnnnnnnnnnnnnnnnnnnnnnnnnnnnnnnnnnnnnnnnnnnnnnnnnnnnnnnnnnnnnnnnnnnnnnnnnnnnnnnnnnnnnnnnnnnnnnnnnnnnnnnnnnnnnnnnnnnnnnnnnnnnnnnnnnnnnnnnnnnnnnnnnnnnnnnnnnnnnnnnnnnnnnnnnnnnnnnnnnnnnnnnnnnnnnnnnnnnnnnnnnnnnnnnnnnnnnnnnnnnnnnnnnnnnnnnnnnnnnnnnnnnnnnnnnnnnnnnnnnnnnnnnnnnnnnnnnnnnnnnnnnnnnnnnnnnnnnnnnnnnnnnnnnnnnnnnnnnnnnnnnnnnnnnnnnnnnnnnnnnnnnnnnnnnnnnnnnnnnnnnnnnnnnnnnnnnnnnnnnnnnnnnnnnnnnnnnnnnnnnnnnnnnnnnnnnnnnnnnnnnnnnnnnnnnnnnnnnnnnnnnnnnnnnnnnnnnnnnnnnnnnnnnnnnnnnnnnnnnnnnnnnnnnnnnnnnnnnnnnnnnnnnnnnnnnnnnnnnnnnnnnnnnnnnnnnnnnnnnnnnnnnnnnnnnnnnnnnnnnnnnnnnnnnnnnnnnnnnnnnnnnnnnnnnnnnnnnnnnnnnnnnnnnnnnnnnnnnnnnnnnnnnnnnnnnnnnnnnnnnnnnnnnnnnnnnnnnnnnnnnnnnnnnnnnnnnnnnnnnnnnnnnnnnnnnnnnnnnnnnnnnnnnnnnnnnnnnnnnnnnnnnnnnnnnnnnnnnnnnnnnnnnnnnnnnnnnnnnnnnnnnnnnnnnnnnnnnnnnnnnnnnnnnnnnnnnnnnnnnnnnnnnnnnnnnnnnnnnnnnnnnnnnnnnnnnnnnnnnnnnnnnnnnnnnnnnnnnnnnnnnnnnnnnnnnnnnnnnnnnnnnnnnnnnnnnnnnnnnnnnnnnnnnnnnnnnnnnnnnnnnnnnnnnnnnnnnnnnnnnnnnnnnnnnnnnnnnnnnnnnnnnnnnnnnnnnnnnnnnnnnnnnnnnnnnnnnnnnnnnnnnnnnnnnnnnnnnnnnnnnnnnnnnnnnnnnnnnnnnnnnnnnnnnnnnnnnnnnnnnnnnnnnnnnnnnnnnnnnnnnnnnnnnnnnnnnnnnnnnnnnnnnnnnnnnnnnnnnnnnnnnnnnnnnnnnnnnnnnnnnnnnnnnnnnnnnnnnnnnnnnnnnnnnnnnnnnnnnnnnnnnnnnnnnnnnnnnnnnnnnnnnnnnnnnnnnnnnnnnnnnnnnnnnnnnnnnnnnnnnnnnnnnnnnnnnnnnnnnnnnnnnnnnnnnnnnnnnnnnnnnnnnnnnnnnnnnnnnnnnnnnnnnnnnnnnnnnnnnnnnnnnnnnnnnnnnnnnnnnnnnnnnnnnnnnnnnnnnnnnnnnnnnnnnnnnnnnnnnnnnnnnnnnnnnnnnnnnnnnnnnnnnnnnnnnnnnnnnnnnnnnnnnnnnnnnnnnnnnnnnnnnnnnnnnnnnnnnnnnnnnnnnnnnnnnnnnnnnnnnnnnnnnnnnnnnnnnnnnnnnnnnnnnnnnnnnnnnnnnnnnnnnnnnnnnnnnnnnnnnnnnnnnnnnnnnnnnnnnnnnnnnnnnnnnnnnnnnnnnnnnnnnnnnnnnnnnnnnnnnnnnnnnnnnnnnnnnnnnnnnnnnnnnnnnnnnnnnnnnnnnnnnnnnnnnnnnnnnnnnnnnnnnnnnnnnnnnnnnnnnnnnnnnnnnnnnnnnnnnnnnnnnnnnnnnnnnnnnnnnnnnnnnnnnnnnnnnnnnnnnnnnnnnnnnnnnnnnnnnnnnnnnnnnnnnnnnnnnnnnnnnnnnnnnnnnnnnnnnnnnnnnnnnnnnnnnnnnnnnnnnnnnnnnnnnnnnnnnnnnnnnnnnnnnnnnnnnnnnnnnnnnnnnnnnnnnnnnnnnnnnnnnnnnnnnnnnnnnnnnnnnnnnnnnnnnnnnnnnnnnnnnnnnnnnnnnnnnnnnnnnnnnnnnnnnnnnnnnnnnnnnnnnnnnnnnnnnnnnnnnnnnnnnnnnnnnnnnnnnnnnnnnnnnnnnnnnnnnnnnnnnnnnnnnnnnnnnnnnnnnnnnnnnnnnnnnnnnnnnnnnnnnnnnnnnnnnnnnnnnnnnnnnnnnnnnnnnnnnnnnnnnnnnnnnnnnnnnnnnnnnnnnnnnnnnnnnnnnnnnnnnnnnnnnnnnnnnnnnnnnnnnnnnnnnnnnnnnnnnnnnnnnnnnnnnnnnnnnnnnnnnnnnnnnnnnnnnnnnnnnnnnnnnnnnnnnnnnnnnnnnnnnnnnnnnnnnnnnnnnnnnnnnnnnnnnnnnnnnnnnnnnnnnnnnnnnnnnnnnnnnnnnnnnnnnnnnnnnnnnnnnnnnnnnnnnnnnnnnnnnnnnnnnnnnnnnnnnnnnnnnnnnnnnnnnnnnnnnnnnnnnnnnnnnnnnnnnnnnnnnnnnnnnnnnnnnnnnnnnnnnnnnnnnnnnnnnnnnnnnnnnnnnnnnnnnnnnnnnnnnnnnnnnnnnnnnnnnnnnnnnnnnnnnnnnnnnnnnnnnnnnnnnnnnnnnnnnnnnnnnnnnnnnnnnnnnnnnnnnnnnnnnnnnnnnnnnnnnnnnnnnnnnnnnnnnnnnnnnnnnnnnnnnnnnnnnnnnnnnnnnnnnnnnnnnnnnnnnnnnnnnnnnnnnnnnnnnnnnnnnnnnnnnnnnnnnnnnnnnnnnnnnnnnnnnnnnnnnnnnnnnnnnnnnnnnnnnnnnnnnnnnnnnnnnnnnnnnnnnnnnnnnnnnnnnnnnnnnnnnnnnnnnnnnnnnnnnnnnnnnnnnnnnnnnnnnnnnnnnnnnnnnnnnnnnnnnnnnnnnnnnnnnnnnnnnnnnnnnnnnnnnnnnnnnnnnnnnnnnnnnnnnnnnnnnnnnnnnnnnnnnnnnnnnnnnnnnnnnnnnnnnnnnnnnnnnnnnnnnnnnnnnnnnnnnnnnnnnnnnnnnnnnnnnnnnnnnnnnnnnnnnnnnnnnnnnnnnnnnnnnnnnnnnnnnnnnnnnnnnnnnnnnnnnnnnnnnnnnnnnnnnnnnnnnnnnnnnnnnnnnnnnnnnnnnnnnnnnnnnnnnnnnnnnnnnnnnnnnnnnnnnnnnnnnnnnnnnnnnnnnnnnnnnnnnnnnnnnnnnnnnnnnnnnnnnnnnnnnnnnnnnnnnnnnnnnnnnnnnnnnnnnnnnnnnnnnnnnnnnnnnnnnnnnnnnnnnnnnnnnnnnnnnnnnnnnnnnnnnnnnnnnnnnnnnnnnnnnnnnnnnnnnnnnnnnnnnnnnnnnnnnnnnnnnnnnnnnnnnnnnnnnnnnnnnnnnnnnnnnnnnnnnnnnnnnnnnnnnnnnnnnnnnnnnnnnnnnnnnnnnnnnnnnnnnnnnnnnnnnnnnnnnnnnnnnnnnnnnnnnnnnnnnnnnnnnnnnnnnnnnnnnnnnnnnnnnnnnnnnnnnnnnnnnnnnnnnnnnnnnnnnnnnnnnnnnnnnnnnnnnnnnnnnnnnnnnnnnnnnnnnnnnnnnnnnnnnnnnnnnnnnnnnnnnnnnnnnnnnnnnnnnnnnnnnnnnnnnnnnnnnnnnnnnnnnnnnnnnnnnnnnnnnnnnnnnnnnnnnnnnnnnnnnnnnnnnnnnnnnnnnnnnnnnnnnnnnnnnnnnnnnnnnnnnnnnnnnnnnnnnnnnnnnnnnnnnnnnnnnnnnnnnnnnnnnnnnnnnnnnnnnnnnnnnnnnnnnnnnnnnnnnnnnnnnnnnnnnnnnnnnnnnnnnnnnnnnnnnnnnnnnnnnnnnnnnnnnnnnnnnnnnnnnnnnnnnnnnnnnnnnnnnnnnnnnnnnnnnnnnnnnnnnnnnnnnnnnnnnnnnnnnnnnnnnnnnnnnnnnnnnnnnnnnnnnnnnnnnnnnnnnnnnnnnnnnnnnnnnnnnnnnnnnnnnnnnnnnnnnnnnnnnnnnnnnnnnnnnnnnnnnnnnnnnnnnnnnnnnnnnnnnnnnnnnnnnnnnnnnnnnnnnnnnnnnnnnnnnnnnnnnnnnnnnnnnnnnnnnnnnnnnnnnnnnnnnnnnnnnnnnnnnnnnnnnnnnnnnnnnnnnnnnnnnnnnnnnnnnnnnnnnnnnnnnnnnnnnnnnnnnnnnnnnnnnnnnnnnnnnnnnnnnnnnnnnnnnnnnnnnnnnnnnnnnnnnnnnnnnnnnnnnnnnnnnnnnnnnnnnnnnnnnnnnnnnnnnnnnnnnnnnnnnnnnnnnnnnnnnnnnnnnnnnnnnnnnnnnnnnnnnnnnnnnnnnnnnnnnnnnnnnnnnnnnnnnnnnnnnnnnnnnnnnnnnnnnnnnnnnnnnnnnnnnnnnnnnnnnnnnnnnnnnnnnnnnnnnnnnnnnnnnnnnnnnnnnnnnnnnnnnnnnnnnnnnnnnnnnnnnnnnnnnnnnnnnnnnnnnnnnnnnnnnnnnnnnnnnnnnnnnnnnnnnnnnnnnnnnnnnnnnnnnnnnnnnnnnnnnnnnnnnnnnnnnnnnnnnnnnnnnnnnnnnnnnnnnnnnnnnnnnnnnnnnnnnnnnnnnnnnnnnnnnnnnnnnnnnnnnnnnnnnnnnnnnnnnnnnnnnnnnnnnnnnnnnnnnnnnnnnnnnnnnnnnnnnnnnnnnnnnnnnnnnnnnnnnnnnnnnnnnnnnnnnnnnnnnnnnnnnnnnnnnnnnnnnnnnnnnnnnnnnnnnnnnnnnnnnnnnnnnnnnnnnnnnnnnnnnnnnnnnnnnnnnnnnnnnnnnnnnnnnnnnnnnnnnnnnnnnnnnnnnnnnnnnnnnnnnnnnnnnnnnnnnnnnnnnnnnnnnnnnnnnnnnnnnnnnnnnnnnnnnnnnnnnnnnnnnnnnnnnnnnnnnnnnnnnnnnnnnnnnnnnnnnnnnnnnnnnnnnnnnnnnnnnnnnnnnnnnnnnnnnnnnnnnnnnnnnnnnnnnnnnnnnnnnnnnnnnnnnnnnnnnnnnnnnnnnnnnnnnnnnnnnnnnnnnnnnnnnnnnnnnnnnnnnnnnnnnnnnnnnnnnnnnnnnnnnnnnnnnnnnnnnnnnnnnnnnnnnnnnnnnnnnnnnnnnnnnnnnnnnnnnnnnnnnnnnnnnnnnnnnnnnnnnnnnnnnnnnnnnnnnnnnnnnnnnnnnnnnnnnnnnnnnnnnnnnnnnnnnnnnnnnnnnnnnnnnnnnnnnnnnnnnnnnnnnnnnnnnnnnnnnnnnnnnnnnnnnnnnnnnnnnnnnnnnnnnnnnnnnnnnnnnnnnnnnnnnnnnnnnnnnnnnnnnnnnnnnnnnnnnnnnnnnnnnnnnnnnnnnnnnnnnnnnnnnnnnnnnnnnnnnnnnnnnnnnnnnnnnnnnnnnnnnnnnnnnnnnnnnnnnnnnnnnnnnnnnnnnnnnnnnnnnnnnnnnnnnnnnnnnnnnnnnnnnnnnnnnnnnnnnnnnnnnnnnnnnnnnnnnnnnnnnnnnnnnnnnnnnnnnnnnnnnnnnnnnnnnnnnnnnnnnnnnnnnnnnnnnnnnnnnnnnnnnnnnnnnnnnnnnnnnnnnnnnnnnnnnnnnnnnnnnnnnnnnnnnnnnnnnnnnnnnnnnnnnnnnnnnnnnnnnnnnnnnnnnnnnnnnnnnnnnnnnnnnnnnnnnnnnnnnnnnnnnnnnnnnnnnnnnnnnnnnnnnnnnnnnnnnnnnnnnnnnnnnnnnnnnnnnnnnnnnnnnnnnnnnnnnnnnnnnnnnnnnnnnnnnnnnnnnnnnnnnnnnnnnnnnnnnnnnnnnnnnnnnnnnnnnnnnnnnnnnnnnnnnnnnnnnnnnnnnnnnnnnnnnnnnnnnnnnnnnnnnnnnnnnnnnnnnnnnnnnnnnnnnnnnnnnnnnnnnnnnnnnnnnnnnnnnnnnnnnnnnnnnnnnnnnnnnnnnnnnnnnnnnnnnnnnnnnnnnnnnnnnnnnnnnnnnnnnnnnnnnnnnnnnnnnnnnnnnnnnnnnnnnnnnnnnnnnnnnnnnnnnnnnnnnnnnnnnnnnnnnnnnnnnnnnnnnnnnnnnnnnnnnnnnnnnnnnnnnnnnnnnnnnnnnnnnnnnnnnnnnnnnnnnnnnnnnnnnnnnnnnnnnnnnnnnnnnnnnnnnnnnnnnnnnnnnnnnnnnnnnnnnnnnnnnnnnnnnnnnnnnnnnnnnnnnnnnnnnnnnnnnnnnnnnnnnnnnnnnnnnnnnnnnnnnnnnnnnnnnnnnnnnnnnnnnnnnnnnnnnnnnnnnnnnnnnnnnnnnnnnnnnnnnnnnnnnnnnnnnnnnnnnnnnnnnnnnnnnnnnnnnnnnnnnnnnnnnnnnnnnnnnnnnnnnnnnnnnnnnnnnnnnnnnnnnnnnnnnnnnnnnnnnnnnnnnnnnnnnnnnnnnnnnnnnnnnnnnnnnnnnnnnnnnnnnnnnnnnnnnnnnnnnnnnnnnnnnnnnnnnnnnnnnnnnnnnnnnnnnnnnnnnnnnnnnnnnnnnnnnnnnnnnnnnnnnnnnnnnnnnnnnnnnnnnnnnnnnnnnnnnnnnnnnnnnnnnnnnnnnnnnnnnnnnnnnnnnnnnnnnnnnnnnnnnnnnnnnnnnnnnnnnnnnnnnnnnnnnnnnnnnnnnnnnnnnnnnnnnnnnnnnnnnnnnnnnnnnnnnnnnnnnnnnnnnnnnnnnnnnnnnnnnnnnnnnnnnnnnnnnnnnnnnnnnnnnnnnnnnnnnnnnnnnnnnnnnnnnnnnnnnnnnnnnnnnnnnnnnnnnnnnnnnnnnnnnnnnnnnnnnnnnnnnnnnnnnnnnnnnnnnnnnnnnnnnnnnnnnnnnnnnnnnnnnnnnnnnnnnnnnnnnnnnnnnnnnnnnnnnnnnnnnnnnnnnnnnnnnnnnnnnnnnnnnnnnnnnnnnnnnnnnnnnnnnnnnnnnnnnnnnnnnnnnnnnnnnnnnnnnnnnnnnnnnnnnnnnnnnnnnnnnnnnnnnnnnnnnnnnnnnnnnnnnnnnnnnnnnnnnnnnnnnnnnnnnnnnnnnnnnnnnnnnnnnnnnnnnnnnnnnnnnnnnnnnnnnnnnnnnnnnnnnnnnnnnnnnnnnnnnnnnnnnnnnnnnnnnnnnnnnnnnnnnnnnnnnnnnnnnnnnnnnnnnnnnnnnnnnnnnnnnnnnnnnnnnnnnnnnnnnnnnnnnnnnnnnnnnnnnnnnnnnnnnnnnnnnnnnnnnnnnnnnnnnnnnnnnnnnnnnnnnnnnnnnnnnnnnnnnnnnnnnnnnnnnnnnnnnnnnnnnnnnnnnnnnnnnnnnnnnnnnnnnnnnnnnnnnnnnnnnnnnnnnnnnnnnnnnnnnnnnnnnnnnnnnnnnnnnnnnnnnnnnnnnnnnnnnnnnnnnnnnnnnnnnnnnnnnnnnnnnnnnnnnnnnnnnnnnnnnnnnnnnnnnnnnnnnnnnnnnnnnnnnnnnnnnnnnnnnnnnnnnnnnnnnnnnnnnnnnnnnnnnnnnnnnnnnnnnnnnnnnnnnnnnnnnnnnnnnnnnnnnnnnnnnnnnnnnnnnnnnnnnnnnnnnnnnnnnnnnnnnnnnnnnnnnnnnnnnnnnnnnnnnnnnnnnnnnnnnnnnnnnnnnnnnnnnnnnnnnnnnnnnnnnnnnnnnnnnnnnnnnnnnnnnnnnnnnnnnnnnnnnnnnnnnnnnnnnnnnnnnnnnnnnnnnnnnnnnnnnnnnnnnnnnnnnnnnnnnnnnnnnnnnnnnnnnnnnnnnnnnnnnnnnnnnnnnnnnnnnnnnnnnnnnnnnnnnnnnnnnnnnnnnnnnnnnnnnnnnnnnnnnnnnnnnnnnnnnnnnnnnnnnnnnnnnnnnnnnnnnnnnnnnnnnnnnnnnnnnnnnnnnnnnnnnnnnnnnnnnnnnnnnnnnnnnnnnnnnnnnnnnnnnnnnnnnnnnnnnnnnnnnnnnnnnnnnnnnnnnnnnnnnnnnnnnnnnnnnnnnnnnnnnnnnnnnnnnnnnnnnnnnnnnnnnnnnnnnnnnnnnnnnnnnnnnnnnnnnnnnnnnnnnnnnnnnnnnnnnnnnnnnnnnnnnnnnnnnnnnnnnnnnnnnnnnnnnnnnnnnnnnnnnnnnnnnnnnnnnnnnnnnnnnnnnnnnnnnnnnnnnnnnnnnnnnnnnnnnnnnnnnnnnnnnnnnnnnnnnnnnnnnnnnnnnnnnnnnnnnnnnnnnnnnnnnnnnnnnnnnnnnnnnnnnnnnnnnnnnnnnnnnnnnnnnnnnnnnnnnnnnnnnnnnnnnnnnnnnnnnnnnnnnnnnnnnnnnnnnnnnnnnnnnnnnnnnnnnnnnnnnnnnnnnnnnnnnnnnnnnnnnnnnnnnnnnnnnnnnnnnnnnnnnnnnnnnnnnnnnnnnnnnnnnnnnnnnnnnnnnnnnnnnnnnnnnnnnnnnnnnnnnnnnnnnnnnnnnnnnnnnnnnnnnnnnnnnnnnnnnnnnnnnnnnnnnnnnnnnnnnnnnnnnnnnnnnnnnnnnnnnnnnnnnnnnnnnnnnnnnnnnnnnnnnnnnnnnnnnnnnnnnnnnnnnnnnnnnnnnnnnnnnnnnnnnnnnnnnnnnnnnnnnnnnnnnnnnnnnnnnnnnnnnnnnnnnnnnnnnnnnnnnnnnnnnnnnnnnnnnnnnnnnnnnnnnnnnnnnnnnnnnnnnnnnnnnnnnnnnnnnnnnnnnnnnnnnnnnnnnnnnnnnnnnnnnnnnnnnnnnnnnnnnnnnnnnnnnnnnnnnnnnnnnnnnnnnnnnnnnnnnnnnnnnnnnnnnnnnnnnnnnnnnnnnnnnnnnnnnnnnnnnnnnnnnnnnnnnnnnnnnnnnnnnnnnnnnnnnnnnnnnnnnnnnnnnnnnnnnnnnnnnnnnnnnnnnnnnnnnnnnnnnnnnnnnnnnnnnnnnnnnnnnnnnnnnnnnnnnnnnnnnnnnnnnnnnnnnnnnnnnnnnnnnnnnnnnnnnnnnnnnnnnnnnnnnnnnnnnnnnnnnnnnnnnnnnnnnnnnnnnnnnnnnnnnnnnnnnnnnnnnnnnnnnnnnnnnnnnnnnnnnnnnnnnnnnnnnnnnnnnnnnnnnnnnnnnnnnnnnnnnnnnnnnnnnnnnnnnnnnnnnnnnnnnnnnnnnnnnnnnnnnnnnnnnnnnnnnnnnnnnnnnnnnnnnnnnnnnnnnnnnnnnnnnnnnnnnnnnnnnnnnnnnnnnnnnnnnnnnnnnnnnnnnnnnnnnnnnnnnnnnnnnnnnnnnnnnnnnnnnnnnnnnnnnnnnnnnnnnnnnnnnnnnnnnnnnnnnnnnnnnnnnnnnnnnnnnnnnnnnnnnnnnnnnnnnnnnnnnnnnnnnnnnnnnnnnnnnnnnnnnnnnnnnnnnnnnnnnnnnnnnnnnnnnnnnnnnnnnnnnnnnnnnnnnnnnnnnnnnnnnnnnnnnnnnnnnnnnnnnnnnnnnnnnnnnnnnnnnnnnnnnnnnnnnnnnnnnnnnnnnnnnnnnnnnnnnnnnnnnnnnnnnnnnnnnnnnnnnnnnnnnnnnnnnnnnnnnnnnnnnnnnnnnnnnnnnnnnnnnnnnnnnnnnnnnnnnnnnnnnnnnnnnnnnnnnnnnnnnnnnnnnnnnnnnnnnnnnnnnnnnnnnnnnnnnnnnnnnnnnnnnnnnnnnnnnnnnnnnnnnnnnnnnnnnnnnnnnnnnnnnnnnnnnnnnnnnnnnnnnnnnnnnnnnnnnnnnnnnnnnnnnnnnnnnnnnnnnnnnnnnnnnnnnnnnnnnnnnnnnnnnnnnnnnnnnnnnnnnnnnnnnnnnnnnnnnnnnnnnnnnnnnnnnnnnnnnnnnnnnnnnnnnnnnnnnnnnnnnnnnnnnnnnnnnnnnnnnnnnnnnnnnnnnnnnnnnnnnnnnnnnnnnnnnnnnnnnnnnnnnnnnnnnnnnnnnnnnnnnnnnnnnnnnnnnnnnnnnnnnnnnnnnnnnnnnnnnnnnnnnnnnnnnnnnnnnnnnnnnnnnnnnnnnnnnnnnnnnnnnnnnnnnnnnnnnnnnnnnnnnnnnnnnnnnnnnnnnnnnnnnnnnnnnnnnnnnnnnnnnnnnnnnnnnnnnnnnnnnnnnnnnnnnnnnnnnnnnnnnnnnnnnnnnnnnnnnnnnnnnnnnnnnnnnnnnnnnnnnnnnnnnnnnnnnnnnnnnnnnnnnnnnnnnnnnnnnnnnnnnnnnnnnnnnnnnnnnnnnnnnnnnnnnnnnnnnnnnnnnnnnnnnnnnnnnnnnnnnnnnnnnnnnnnnnnnnnnnnnnnnnnnnnnnnnnnnnnnnnnnnnnnnnnnnnnnnnnnnnnnnnnnnnnnnnnnnnnnnnnnnnnnnnnnnnnnnnnnnnnnnnnnnnnnnnnnnnnnnnnnnnnnnnnnnnnnnnnnnnnnnnnnnnnnnnnnnnnnnnnnnnnnnnnnnnnnnnnnnnnnnnnnnnnnnnnnnnnnnnnnnnnnnnnnnnnnnnnnnnnnnnnnnnnnnnnnnnnnnnnnnnnnnnnnnnnnnnnnnnnnnnnnnnnnnnnnnnnnnnnnnnnnnnnnnnnnnnnnnnnnnnnnnnnnnnnnnnnnnnnnnnnnnnnnnnnnnnnnnnnnnnnnnnnnnnnnnnnnnnnnnnnnnnnnnnnnnnnnnnnnnnnnnnnnnnnnnnnnnnnnnnnnnnnnnnnnnnnnnnnnnnnnnnnnnnnnnnnnnnnnnnnnnnnnnnnnnnnnnnnnnnnnnnnnnnnnnnnnnnnnnnnnnnnnnnnnnnnnnnnnnnnnnnnnnnnnnnnnnnnnnnnnnnnnnnnnnnnnnnnnnnnnnnnnnnnnnnnnnnnnnnnnnnnnnnnnnnnnnnnnnnnnnnnnnnnnnnnnnnnnnnnnnnnnnnnnnnnnnnnnnnnnnnnnnnnnnnnnnnnnnnnnnnnnnnnnnnnnnnnnnnnnnnnnnnnnnnnnnnnnnnnnnnnnnnnnnnnnnnnnnnnnnnnnnnnnnnnnnnnnnnnnnnnnnnnnnnnnnnnnnnnnnnnnnnnnnnnnnnnnnnnnnnnnnnnnnnnnnnnnnnnnnnnnnnnnnnnnnnnnnnnnnnnnnnnnnnnnnnnnnnnnnnnnnnnnnnnnnnnnnnnnnnnnnnnnnnnnnnnnnnnnnnnnnnnnnnnnnnnnnnnnnnnnnnnnnnnnnnnnnnnnnnnnnnnnnnnnnnnnnnnnnnnnnnnnnnnnnnnnnnnnnnnnnnnnnnnnnnnnnnnnnnnnnnnnnnnnnnnnnnnnnnnnnnnnnnnnnnnnnnnnnnnnnnnnnnnnnnnnnnnnnnnnnnnnnnnnnnnnnnnnnnnnnnnnnnnnnnnnnnnnnnnnnnnnnnnnnnnnnnnnnnnnnnnnnnnnnnnnnnnnnnnnnnnnnnnnnnnnnnnnnnnnnnnnnnnnnnnnnnnnnnnnnnnnnnnnnnnnnnnnnnnnnnnnnnnnnnnnnnnnnnnnnnnnnnnnnnnnnnnnnnnnnnnnnnnnnnnnnnnnnnnnnnnnnnnnnnnnnnnnnnnnnnnnnnnnnnnnnnnnnnnnnnnnnnnnnnnnnnnnnnnnnnnnnnnnnnnnnnnnnnnnnnnnnnnnnnnnnnnnnnnnnnnnnnnnnnnnnnnnnnnnnnnnnnnnnnnnnnnnnnnnnnnnnnnnnnnnnnnnnnnnnnnnnnnnnnnnnnnnnnnnnnnnnnnnnnnnnnnnnnnnnnnnnnnnnnnnnnnnnnnnnnnnnnnnnnnnnnnnnnnnnnnnnnnnnnnnnnnnnnnnnnnnnnnnnnnnnnnnnnnnnnnnnnnnnnnnnnnnnnnnnnnnnnnnnnnnnnnnnnnnnnnnnnnnnnnnnnnnnnnnnnnnnnnnnnnnnnnnnnnnnnnnnnnnnnnnnnnnnnnnnnnnnnnnnnnnnnnnnnnnnnnnnnnnnnnnnnnnnnnnnnnnnnnnnnnnnnnnnnnnnnnnnnnnnnnnnnnnnnnnnnnnnnnnnnnnnnnnnnnnnnnnnnnnnnnnnnnnnnnnnnnnnnnnnnnnnnnnnnnnnnnnnnnnnnnnnnnnnnnnnnnnnnnnnnnnnnnnnnnnnnnnnnnnnnnnnnnnnnnnnnnnnnnnnnnnnnnnnnnnnnnnnnnnnnnnnnnnnnnnnnnnnnnnnnnnnnnnnnnnnnnnnnnnnnnnnnnnnnnnnnnnnnnnnnnnnnnnnnnnnnnnnnnnnnnnnnnnnnnnnnnnnnnnnnnnnnnnnnnnnnnnnnnnnnnnnnnnnnnnnnnnnnnnnnnnnnnnnnnnnnnnnnnnnnnnnnnnnnnnnnnnnnnnnnnnnnnnnnnnnnnnnnnnnnnnnnnnnnnnnnnnnnnnnnnnnnnnnnnnnnnnnnnnnnnnnnnnnnnnnnnnnnnnnnnnnnnnnnnnnnnnnnnnnnnnnnnnnnnnnnnnnnnnnnnnnnnnnnnnnnnnnnnnnnnnnnnnnnnnnnnnnnnnnnnnnnnnnnnnnnnnnnnnnnnnnnnnnnnnnnnnnnnnnnnnnnnnnnnnnnnnnnnnnnnnnnnnnnnnnnnnnnnnnnnnnnnnnnnnnnnnnnnnnnnnnnnnnnnnnnnnnnnnnnnnnnnnnnnnnnnnnnnnnnnnnnnnnnnnnnnnnnnnnnnnnnnnnnnnnnnnnnnnnnnnnnnnnnnnnnnnnnnnnnnnnnnnnnnnnnnnnnnnnnnnnnnnnnnnnnnnnnnnnnnnnnnnnnnnnnnnnnnnnnnnnnnnnnnnnnnnnnnnnnnnnnnnnnnnnnnnnnnnnnnnnnnnnnnnnnnnnnnnnnnnnnnnnnnnnnnnnnnnnnnnnnnnnnnnnnnnnnnnnnnnnnnnnnnnnnnnnnnnnnnnnnnnnnnnnnnnnnnnnnnnnnnnnnnnnnnnnnnnnnnnnnnnnnnnnnnnnnnnnnnnnnnnnnnnnnnnnnnnnnnnnnnnnnnnnnnnnnnnnnnnnnnnnnnnnnnnnnnnnnnnnnnnnnnnnnnnnnnnnnnnnnnnnnnnnnnnnnnnnnnnnnnnnnnnnnnnnnnnnnnnnnnnnnnnnnnnnnnnnnnnnnnnnnnnnnnnnnnnnnnnnnnnnnnnnnnnnnnnnnnnnnnnnnnnnnnnnnnnnnnnnnnnnnnnnnnnnnnnnnnnnnnnnnnnnnnnnnnnnnnnnnnnnnnnnnnnnnnnnnnnnnnnnnnnnnnnnnnnnnnnnnnnnnnnnnnnnnnnnnnnnnnnnnnnnnnnnnnnnnnnnnnnnnnnnnnnnnnnnnnnnnnnnnnnnnnnnnnnnnnnnnnnnnnnnnnnnnnnnnnnnnnnnnnnnnnnnnnnnnnnnnnnnnnnnnnnnnnnnnnnnnnnnnnnnnnnnnnnnnnnnnnnnnnnnnnnnnnnnnnnnnnnnnnnnnnnnnnnnnnnnnnnnnnnnnnnnnnnnnnnnnnnnnnnnnnnnnnnnnnnnnnnnnnnnnnnnnnnnnnnnnnnnnnnnnnnnnnnnnnnnnnnnnnnnnnnnnnnnnnnnnnnnnnnnnnnnnnnnnnnnnnnnnnnnnnnnnnnnnnnnnnnnnnnnnnnnnnnnnnnnnnnnnnnnnnnnnnnnnnnnnnnnnnnnnnnnnnnnnnnnnnnnnnnnnnnnnnnnnnnnnnnnnnnnnnnnnnnnnnnnnnnnnnnnnnnnnnnnnnnnnnnnnnnnnnnnnnnnnnnnnnnnnnnnnnnnnnnnnnnnnnnnnnnnnnnnnnnnnnnnnnnnnnnnnnnnnnnnnnnnnnnnnnnnnnnnnnnnnnnnnnnnnnnnnnnnnnnnnnnnnnnnnnnnnnnnnnnnnnnnnnnnnnnnnnnnnnnnnnnnnnnnnnnnnnnnnnnnnnnnnnnnnnnnnnnnnnnnnnnnnnnnnnnnnnnnnnnnnnnnnnnnnnnnnnnnnnnnnnnnnnnnnnnnnnnnnnnnnnnnnnnnnnnnnnnnnnnnnnnnnnnnnnnnnnnnnnnnnnnnnnnnnnnnnnnnnnnnnnnnnnnnnnnnnnnnnnnnnnnnnnnnnnnnnnnnnnnnnnnnnnnnnnnnnnnnnnnnnnnnnnnnnnnnnnnnnnnnnnnnnnnnnnnnnnnnnnnnnnnnnnnnnnnnnnnnnnnnnnnnnnnnnnnnnnnnnnnnnnnnnnnnnnnnnnnnnnnnnnnnnnnnnnnnnnnnnnnnnnnnnnnnnnnnnnnnnnnnnnnnnnnnnnnnnnnnnnnnnnnnnnnnnnnnnnnnnnnnnnnnnnnnnnnnnnnnnnnnnnnnnnnnnnnnnnnnnnnnnnnnnnnnnnnnnnnnnnnnnnnnnnnnnnnnnnnnnnnnnnnnnnnnnnnnnnnnnnnnnnnnnnnnnnnnnnnnnnnnnnnnnnnnnnnnnnnnnnnnnnnnnnnnnnnnnnnnnnnnnnnnnnnnnnnnnnnnnnnnnnnnnnnnnnnnnnnnnnnnnnnnnnnnnnnnnnnnnnnnnnnnnnnnnnnnnnnnnnnnnnnnnnnnnnnnnnnnnnnnnnnnnnnnnnnnnnnnnnnnnnnnnnnnnnnnnnnnnnnnnnnnnnnnnnnnnnnnnnnnnnnnnnnnnnnnnnnnnnnnnnnnnnnnnnnnnnnnnnnnnnnnnnnnnnnnnnnnnnnnnnnnnnnnnnnnnnnnnnnnnnnnnnnnnnnnnnnnnnnnnnnnnnnnnnnnnnnnnnnnnnnnnnnnnnnnnnnnnnnnnnnnnnnnnnnnnnnnnnnnnnnnnnnnnnnnnnnnnnnnnnnnnnnnnnnnnnnnnnnnnnnnnnnnnnnnnnnnnnnnnnnnnnnnnnnnnnnnnnnnnnnnnnnnnnnnnnnnnnnnnnnnnnnnnnnnnnnnnnnnnnnnnnnnnnnnnnnnnnnnnnnnnnnnnnnnnnnnnnnnnnnnnnnnnnnnnnnnnnnnnnnnnnnnnnnnnnnnnnnnnnnnnnnnnnnnnnnnnnnnnnnnnnnnnnnnnnnnnnnnnnnnnnnnnnnnnnnnnnnnnnnnnnnnnnnnnnnnnnnnnnnnnnnnnnnnnnnnnnnnnnnnnnnnnnnnnnnnnnnnnnnnnnnnnnnnnnnnnnnnnnnnnnnnnnnnnnnnnnnnnnnnnnnnnnnnnnnnnnnnnnnnnnnnnnnnnnnnnnnnnnnnnnnnnnnnnnnnnnnnnnnnnnnnnnnnnnnnnnnnnnnnnnnnnnnnnnnnnnnnnnnnnnnnnnnnnnnnnnnnnnnnnnnnnnnnnnnnnnnnnnnnnnnnnnnnnnnnnnnnnnnnnnnnnnnnnnnnnnnnnnnnnnnnnnnnnnnnnnnnnnnnnnnnnnnnnnnnnnnnnnnnnnnnnnnnnnnnnnnnnnnnnnnnnnnnnnnnnnnnnnnnnnnnnnnnnnnnnnnnnnnnnnnnnnnnnnnnnnnnnnnnnnnnnnnnnnnnnnnnnnnnnnnnnnnnnnnnnnnnnnnnnnnnnnnnnnnnnnnnnnnnnnnnnnnnnnnnnnnnnnnnnnnnnnnnnnnnnnnnnnnnnnnnnnnnnnnnnnnnnnnnnnnnnnnnnnnnnnnnnnnnnnnnnnnnnnnnnnnnnnnnnnnnnnnnnnnnnnnnnnnnnnnnnnnnnnnnnnnnnnnnnnnnnnnnnnnnnnnnnnnnnnnnnnnnnnnnnnnnnnnnnnnnnnnnnnnnnnnnnnnnnnnnnnnnnnnnnnnnnnnnnnnnnnnnnnnnnnnnnnnnnnnnnnnnnnnnnnnnnnnnnnnnnnnnnnnnnnnnnnnnnnnnnnnnnnnnnnnnnnnnnnnnnnnnnnnnnnnnnnnnnnnnnnnnnnnnnnnnnnnnnnnnnnnnnnnnnnnnnnnnnnnnnnnnnnnnnnnnnnnnnnnnnnnnnnnnnnnnnnnnnnnnnnnnnnnnnnnnnnnnnnnnnnnnnnnnnnnnnnnnnnnnnnnnnnnnnnnnnnnnnnnnnnnnnnnnnnnnnnnnnnnnnnnnnnnnnnnnnnnnnnnnnnnnnnnnnnnnnnnnnnnnnnnnnnnnnnnnnnnnnnnnnnnnnnnnnnnnnnnnnnnnnnnnnnnnnnnnnnnnnnnnnnnnnnnnnnnnnnnnnnnnnnnnnnnnnnnnnnnnnnnnnnnnnnnnnnnnnnnnnnnnnnnnnnnnnnnnnnnnnnnnnnnnnnnnnnnnnnnnnnnnnnnnnnnnnnnnnnnnnnnnnnnnnnnnnnnnnnnnnnnnnnnnnnnnnnnnnnnnnnnnnnnnnnnnnnnnnnnnnnnnnnnnnnnnnnnnnnnnnnnnnnnnnnnnnnnnnnnnnnnnnnnnnnnnnnnnnnnnnnnnnnnnnnnnnnnnnnnnnnnnnnnnnnnnnnnnnnnnnnnnnnnnnnnnnnnnnnnnnnnnnnnnnnnnnnnnnnnnnnnnnnnnnnnnnnnnnnnnnnnnnnnnnnnnnnnnnnnnnnnnnnnnnnnnnnnnnnnnnnnnnnnnnnnnnnnnnnnnnnnnnnnnnnnnnnnnnnnnnnnnnnnnnnnnnnnnnnnnnnnnnnnnnnnnnnnnnnnnnnnnnnnnnnnnnnnnnnnnnnnnnnnnnnnnnnnnnnnnnnnnnnnnnnnnnnnnnnnnnnnnnnnnnnnnnnnnnnnnnnnnnnnnnnnnnnnnnnnnnnnnnnnnnnnnnnnnnnnnnnnnnnnnnnnnnnnnnnnnnnnnnnnnnnnnnnnnnnnnnnnnnnnnnnnnnnnnnnnnnnnnnnnnnnnnnnnnnnnnnnnnnnnnnnnnnnnnnnnnnnnnnnnnnnnnnnnnnnnnnnnnnnnnnnnnnnnnnnnnnnnnnnnnnnnnnnnnnnnnnnnnnnnnnnnnnnnnnnnnnnnnnnnnnnnnnnnnnnnnnnnnnnnnnnnnnnnnnnnnnnnnnnnnnnnnnnnnnnnnnnnnnnnnnnnnnnnnnnnnnnnnnnnnnnnnnnnnnnnnnnnnnnnnnnnnnnnnnnnnnnnnnnnnnnnnnnnnnnnnnnnnnnnnnnnnnnnnnnnnnnnnnnnnnnnnnnnnnnnnnnnnnnnnnnnnnnnnnnnnnnnnnnnnnnnnnnnnnnnnnnnnnnnnnnnnnnnnnnnnnnnnnnnnnnnnnnnnnnnnnnnnnnnnnnnnnnnnnnnnnnnnnnnnnnnnnnnnnnnnnnnnnnnnnnnnnnnnnnnnnnnnnnnnnnnnnnnnnnnnnnnnnnnnnnnnnnnnnnnnnnnnnnnnnnnnnnnnnnnnnnnnnnnnnnnnnnnnnnnnnnnnnnnnnnnnnnnnnnnnnnnnnnnnnnnnnnnnnnnnnnnnnnnnnnnnnnnnnnnnnnnnnnnnnnnnnnnnnnnnnnnnnnnnnnnnnnnnnnnnnnnnnnnnnnnnnnnnnnnnnnnnnnnnnnnnnnnnnnnnnnnnnnnnnnnnnnnnnnnnnnnnnnnnnnnnnnnnnnnnnnnnnnnnnnnnnnnnnnnnnnnnnnnnnnnnnnnnnnnnnnnnnnnnnnnnnnnnnnnnnnnnnnnnnnnnnnnnnnnnnnnnnnnnnnnnnnnnnnnnnnnnnnnnnnnnnnnnnnnnnnnnnnnnnnnnnnnnnnnnnnnnnnnnnnnnnnnnnnnnnnnnnnnnnnnnnnnnnnnnnnnnnnnnnnnnnnnnnnnnnnnnnnnnnnnnnnnnnnnnnnnnnnnnnnnnnnnnnnnnnnnnnnnnnnnnnnnnnnnnnnnnnnnnnnnnnnnnnnnnnnnnnnnnnnnnnnnnnnnnnnnnnnnnnnnnnnnnnnnnnnnnnnnnnnnnnnnnnnnnnnnnnnnnnnnnnnnnnnnnnnnnnnnnnnnnnnnnnnnnnnnnnnnnnnnnnnnnnnnnnnnnnnnnnnnnnnnnnnnnnnnnnnnnnnnnnnnnnnnnnnnnnnnnnnnnnnnnnnnnnnnnnnnnnnnnnnnnnnnnnnnnnnnnnnnnnnnnnnnnnnnnnnnnnnnnnnnnnnnnnnnnnnnnnnnnnnnnnnnnnnnnnnnnnnnnnnnnnnnnnnnnnnnnnnnnnnnnnnnnnnnnnnnnnnnnnnnnnnnnnnnnnnnnnnnnnnnnnnnnnnnnnnnnnnnnnnnnnnnnnnnnnnnnnnnnnnnnnnnnnnnnnnnnnnnnnnnnnnnnnnnnnnnnnnnnnnnnnnnnnnnnnnnnnnnnnnnnnnnnnnnnnnnnnnnnnnnnnnnnnnnnnnnnnnnnnnnnnnnnnnnnnnnnnnnnnnnnnnnnnnnnnnnnnnnnnnnnnnnnnnnnnnnnnnnnnnnnnnnnnnnnnnnnnnnnnnnnnnnnnnnnnnnnnnnnnnnnnnnnnnnnnnnnnnnnnnnnnnnnnnnnnnnnnnnnnnnnnnnnnnnnnnnnnnnnnnnnnnnnnnnnnnnnnnnnnnnnnnnnnnnnnnnnnnnnnnnnnnnnnnnnnnnnnnnnnnnnnnnnnnnnnnnnnnnnnnnnnnnnnnnnnnnnnnnnnnnnnnnnnnnnnnnnnnnnnnnnnnnnnnnnnnnnnnnnnnnnnnnnnnnnnnnnnnnnnnnnnnnnnnnnnnnnnnnnnnnnnnnnnnnnnnnnnnnnnnnnnnnnnnnnnnnnnnnnnnnnnnnnnnnnnnnnnnnnnnnnnnnnnnnnnnnnnnnnnnnnnnnnnnnnnnnnnnnnnnnnnnnnnnnnnnnnnnnnnnnnnnnnnnnnnnnnnnnnnnnnnnnnnnnnnnnnnnnnnnnnnnnnnnnnnnnnnnnnnnnnnnnnnnnnnnnnnnnnnnnnnnnnnnnnnnnnnnnnnnnnnnnnnnnnnnnnnnnnnnnnnnnnnnnnnnnnnnnnnnnnnnnnnnnnnnnnnnnnnnnnnnnnnnnnnnnnnnnnnnnnnnnnnnnnnnnnnnnnnnnnnnnnnnnnnnnnnnnnnnnnnnnnnnnnnnnnnnnnnnnnnnnnnnnnnnnnnnnnnnnnnnnnnnnnnnnnnnnnnnnnnnnnnnnnnnnnnnnnnnnnnnnnnnnnnnnnnnnnnnnnnnnnnnnnnnnnnnnnnnnnnnnnnnnnnnnnnnnnnnnnnnnnnnnnnnnnnnnnnnnnnnnnnnnnnnnnnnnnnnnnnnnnnnnnnnnnnnnnnnnnnnnnnnnnnnnnnnnnnnnnnnnnnnnnnnnnnnnnnnnnnnnnnnnnnnnnnnnnnnnnnnnnnnnnnnnnnnnnnnnnnnnnnnnnnnnnnnnnnnnnnnnnnnnnnnnnnnnnnnnnnnnnnnnnnnnnnnnnnnnnnnnnnnnnnnnnnnnnnnnnnnnnnnnnnnnnnnnnnnnnnnnnnnnnnnnnnnnnnnnnnnnnnnnnnnnnnnnnnnnnnnnnnnnnnnnnnnnnnnnnnnnnnnnnnnnnnnnnnnnnnnnnnnnnnnnnnnnnnnnnnnnnnnnnnnnnnnnnnnnnnnnnnnnnnnnnnnnnnnnnnnnnnnnnnnnnnnnnnnnnnnnnnnnnnnnnnnnnnnnnnnnnnnnnnnnnnnnnnnnnnnnnnnnnnnnnnnnnnnnnnnnnnnnnnnnnnnnnnnnnnnnnnnnnnnnnnnnnnnnnnnnnnnnnnnnnnnnnnnnnnnnnnnnnnnnnnnnnnnnnnnnnnnnnnnnnnnnnnnnnnnnnnnnnnnnnnnnnnnnnnnnnnnnnnnnnnnnnnnnnnnnnnnnnnnnnnnnnnnnnnnnnnnnnnnnnnnnnnnnnnnnnnnnnnnnnnnnnnnnnnnnnnnnnnnnnnnnnnnnnnnnnnnnnnnnnnnnnnnnnnnnnnnnnnnnnnnnnnnnnnnnnnnnnnnnnnnnnnnnnnnnnnnnnnnnnnnnnnnnnnnnnnnnnnnnnnnnnnnnnnnnnnnnnnnnnnnnnnnnnnnnnnnnnnnnnnnnnnnnnnnnnnnnnnnnnnnnnnnnnnnnnnnnnnnnnnnnnnnnnnnnnnnnnnnnnnnnnnnnnnnnnnnnnnnnnnnnnnnnnnnnnnnnnnnnnnnnnnnnnnnnnnnnnnnnnnnnnnnnnnnnnnnnnnnnnnnnnnnnnnnnnnnnnnnnnnnnnnnnnnnnnnnnnnnnnnnnnnnnnnnnnnnnnnnnnnnnnnnnnnnnnnnnnnnnnnnnnnnnnnnnnnnnnnnnnnnnnnnnnnnnnnnnnnnnnnnnnnnnnnnnnnnnnnnnnnnnnnnnnnnnnnnnnnnnnnnnnnnnnnnnnnnnnnnnnnnnnnnnnnnnnnnnnnnnnnnnnnnnnnnnnnnnnnnnnnnnnnnnnnnnnnnnnnnnnnnnnnnnnnnnnnnnnnnnnnnnnnnnnnnnnnnnnnnnnnnnnnnnnnnnnnnnnnnnnnnnnnnnnnnnnnnnnnnnnnnnnnnnnnnnnnnnnnnnnnnnnnnnnnnnnnnnnnnnnnnnnnnnnnnnnnnnnnnnnnnnnnnnnnnnnnnnnnnnnnnnnnnnnnnnnnnnnnnnnnnnnnnnnnnnnnnnnnnnnnnnnnnnnnnnnnnnnnnnnnnnnnnnnnnnnnnnnnnnnnnnnnnnnnnnnnnnnnnnnnnnnnnnnnnnnnnnnnnnnnnnnnnnnnnnnnnnnnnnnnnnnnnnnnnnnnnnnnnnnnnnnnnnnnnnnnnnnnnnnnnnnnnnnnnnnnnnnnnnnnnnnnnnnnnnnnnnnnnnnnnnnnnnnnnnnnnnnnnnnnnnnnnnnnnnnnnnnnnnnnnnnnnnnnnnnnnnnnnnnnnnnnnnnnnnnnnnnnnnnnnnnnnnnnnnnnnnnnnnnnnnnnnnnnnnnnnnnnnnnnnnnnnnnnnnnnnnnnnnnnnnnnnnnnnnnnnnnnnnnnnnnnnnnnnnnnnnnnnnnnnnnnnnnnnnnnnnnnnnnnnnnnnnnnnnnnnnnnnnnnnnnnnnnnnnnnnnnnnnnnnnnnnnnnnnnnnnnnnnnnnnnnnnnnnnnnnnnnnnnnnnnnnnnnnnnnnnnnnnnnnnnnnnnnnnnnnnnnnnnnnnnnnnnnnnnnnnnnnnnnnnnnnnnnnnnnnnnnnnnnnnnnnnnnnnnnnnnnnnnnnnnnnnnnnnnnnnnnnnnnnnnnnnnnnnnnnnnnnnnnnnnnnnnnnnnnnnnnnnnnnnnnnnnnnnnnnnnnnnnnnnnnnnnnnnnnnnnnnnnnnnnnnnnnnnnnnnnnnnnnnnnnnnnnnnnnnnnnnnnnnnnnnnnnnnnnnnnnnnnnnnnnnnnnnnnnnnnnnnnnnnnnnnnnnnnnnnnnnnnnnnnnnnnnnnnnnnnnnnnnnnnnnnnnnnnnnnnnnnnnnnnnnnnnnnnnnnnnnnnnnnnnnnnnnnnnnnnnnnnnnnnnnnnnnnnnnnnnnnnnnnnnnnnnnnnnnnnnnnnnnnnnnnnnnnnnnnnnnnnnnnnnnnnnnnnnnnnnnnnnnnnnnnnnnnnnnnnnnnnnnnnnnnnnnnnnnnnnnnnnnnnnnnnnnnnnnnnnnnnnnnnnnnnnnnnnnnnnnnnnnnnnnnnnnnnnnnnnnnnnnnnnnnnnnnnnnnnnnnnnnnnnnnnnnnnnnnnnnnnnnnnnnnnnnnnnnnnnnnnnnnnnnnnnnnnnnnnnnnnnnnnnnnnnnnnnnnnnnnnnnnnnnnnnnnnnnnnnnnnnnnnnnnnnnnnnnnnnnnnnnnnnnnnnnnnnnnnnnnnnnnnnnnnnnnnnnnnnnnnnnnnnnnnnnnnnnnnnnnnnnnnnnnnnnnnnnnnnnnnnnnnnnnnnnnnnnnnnnnnnnnnnnnnnnnnnnnnnnnnnnnnnnnnnnnnnnnnnnnnnnnnnnnnnnnnnnnnnnnnnnnnnnnnnnnnnnnnnnnnnnnnnnnnnnnnnnnnnnnnnnnnnnnnnnnnnnnnnnnnnnnnnnnnnnnnnnnnnnnnnnnnnnnnnnnnnnnnnnnnnnnnnnnnnnnnnnnnnnnnnnnnnnnnnnnnnnnnnnnnnnnnnnnnnnnnnnnnnnnnnnnnnnnnnnnnnnnnnnnnnnnnnnnnnnnnnnnnnnnnnnnnnnnnnnnnnnnnnnnnnnnnnnnnnnnnnnnnnnnnnnnnnnnnnnnnnnnnnnnnnnnnnnnnnnnnnnnnnnnnnnnnnnnnnnnnnnnnnnnnnnnnnnnnnnnnnnnnnnnnnnnnnnnnnnnnnnnnnnnnnnnnnnnnnnnnnnnnnnnnnnnnnnnnnnnnnnnnnnnnnnnnnnnnnnnnnnnnnnnnnnnnnnnnnnnnnnnnnnnnnnnnnnnnnnnnnnnnnnnnnnnnnnnnnnnnnnnnnnnnnnnnnnnnnnnnnnnnnnnnnnnnnnnnnnnnnnnnnnnnnnnnnnnnnnnnnnnnnnnnnnnnnnnnnnnnnnnnnnnnnnnnnnnnnnnnnnnnnnnnnnnnnnnnnnnnnnnnnnnnnnnnnnnnnnnnnnnnnnnnnnnnnnnnnnnnnnnnnnnnnnnnnnnnnnnnnnnnnnnnnnnnnnnnnnnnnnnnnnnnnnnnnnnnnnnnnnnnnnnnnnnnnnnnnnnnnnnnnnnnnnnnnnnnnnnnnnnnnnnnnnnnnnnnnnnnnnnnnnnnnnnnnnnnnnnnnnnnnnnnnnnnnnnnnnnnnnnnnnnnnnnnnnnnnnnnnnnnnnnnnnnnnnnnnnnnnnnnnnnnnnnnnnnnnnnnnnnnnnnnnnnnnnnnnnnnnnnnnnnnnnnnnnnnnnnnnnnnnnnnnnnnnnnnnnnnnnnnnnnnnnnnnnnnnnnnnnnnnnnnnnnnnnnnnnnnnnnnnnnnnnnnnnnnnnnnnnnnnnnnnnnnnnnnnnnnnnnnnnnnnnnnnnnnnnnnnnnnnnnnnnnnnnnnnnnnnnnnnnnnnnnnnnnnnnnnnnnnnnnnnnnnnnnnnnnnnnnnnnnnnnnnnnnnnnnnnnnnnnnnnnnnnnnnnnnnnnnnnnnnnnnnnnnnnnnnnnnnnnnnnnnnnnnnnnnnnnnnnnnnnnnnnnnnnnnnnnnnnnnnnnnnnnnnnnnnnnnnnnnnnnnnnnnnnnnnnnnnnnnnnnnnnnnnnnnnnnnnnnnnnnnnnnnnnnnnnnnnnnnnnnnnnnnnnnnnnnnnnnnnnnnnnnnnnnnnnnnnnnnnnnnnnnnnnnnnnnnnnnnnnnnnnnnnnnnnnnnnnnnnnnnnnnnnnnnnnnnnnnnnnnnnnnnnnnnnnnnnnnnnnnnnnnnnnnnnnnnnnnnnnnnnnnnnnnnnnnnnnnnnnnnnnnnnnnnnnnnnnnnnnnnnnnnnnnnnnnnnnnnnnnnnnnnnnnnnnnnnnnnnnnnnnnnnnnnnnnnnnnnnnnnnnnnnnnnnnnnnnnnnnnnnnnnnnnnnnnnnnnnnnnnnnnnnnnnnnnnnnnnnnnnnnnnnnnnnnnnnnnnnnnnnnnnnnnnnnnnnnnnnnnnnnnnnnnnnnnnnnnnnnnnnnnnnnnnnnnnnnnnnnnnnnnnnnnnnnnnnnnnnnnnnnnnnnnnnnnnnnnnnnnnnnnnnnnnnnnnnnnnnnnnnnnnnnnnnnnnnnnnnnnnnnnnnnnnnnnnnnnnnnnnnnnnnnnnnnnnnnnnnnnnnnnnnnnnnnnnnnnnnnnnnnnnnnnnnnnnnnnnnnnnnnnnnnnnnnnnnnnnnnnnnnnnnnnnnnnnnnnnnnnnnnnnnnnnnnnnnnnnnnnnnnnnnnnnnnnnnnnnnnnnnnnnnnnnnnnnnnnnnnnnnnnnnnnnnnnnnnnnnnnnnnnnnnnnnnnnnnnnnnnnnnnnnnnnnnnnnnnnnnnnnnnnnnnnnnnnnnnnnnnnnnnnnnnnnnnnnnnnnnnnnnnnnnnnnnnnnnnnnnnnnnnnnnnnnnnnnnnnnnnnnnnnnnnnnnnnnnnnnnnnnnnnnnnnnnnnnnnnnnnnnnnnnnnnnnnnnnnnnnnnnnnnnnnnnnnnnnnnnnnnnnnnnnnnnnnnnnnnnnnnnnnnnnnnnnnnnnnnnnnnnnnnnnnnnnnnnnnnnnnnnnnnnnnnnnnnnnnnnnnnnnnnnnnnnnnnnnnnnnnnnnnnnnnnnnnnnnnnnnnnnnnnnnnnnnnnnnnnnnnnnnnnnnnnnnnnnnnnnnnnnnnnnnnnnnnnnnnnnnnnnnnnnnnnnnnnnnnnnnnnnnnnnnnnnnnnnnnnnnnnnnnnnnnnnnnnnnnnnnnnnnnnnnnnnnnnnnnnnnnnnnnnnnnnnnnnnnnnnnnnnnnnnnnnnnnnnnnnnnnnnnnnnnnnnnnnnnnnnnnnnnnnnnnnnnnnnnnnnnnnnnnnnnnnnnnnnnnnnnnnnnnnnnnnnnnnnnnnnnnnnnnnnnnnnnnnnnnnnnnnnnnnnnnnnnnnnnnnnnnnnnnnnnnnnnnnnnnnnnnnnnnnnnnnnnnnnnnnnnnnnnnnnnnnnnnnnnnnnnnnnnnnnnnnnnnnnnnnnnnnnnnnnnnnnnnnnnnnnnnnnnnnnnnnnnnnnnnnnnnnnnnnnnnnnnnnnnnnnnnnnnnnnnnnnnnnnnnnnnnnnnnnnnnnnnnnnnnnnnnnnnnnnnnnnnnnnnnnnnnnnnnnnnnnnnnnnnnnnnnnnnnnnnnnnnnnnnnnnnnnnnnnnnnnnnnnnnnnnnnnnnnnnnnnnnnnnnnnnnnnnnnnnnnnnnnnnnnnnnnnnnnnnnnnnnnnnnnnnnnnnnnnnnnnnnnnnnnnnnnnnnnnnnnnnnnnnnnnnnnnnnnnnnnnnnnnnnnnnnnnnnnnnnnnnnnnnnnnnnnnnnnnnnnnnnnnnnnnnnnnnnnnnnnnnnnnnnnnnnnnnnnnnnnnnnnnnnnnnnnnnnnnnnnnnnnnnnnnnnnnnnnnnnnnnnnnnnnnnnnnnnnnnnnnnnnnnnnnnnnnnnnnnnnnnnnnnnnnnnnnnnnnnnnnnnnnnnnnnnnnnnnnnnnnnnnnnnnnnnnnnnnnnnnnnnnnnnnnnnnnnnnnnnnnnnnnnnnnnnnnnnnnnnnnnnnnnnnnnnnnnnnnnnnnnnnnnnnnnnnnnnnnnnnnnnnnnnnnnnnnnnnnnnnnnnnnnnnnnnnnnnnnnnnnnnnnnnnnnnnnnnnnnnnnnnnnnnnnnnnnnnnnnnnnnnnnnnnnnnnnnnnnnnnnnnnnnnnnnnnnnnnnnnnnnnnnnnnnnnnnnnnnnnnnnnnnnnnnnnnnnnnnnnnnnnnnnnnnnnnnnnnnnnnnnnnnnnnnnnnnnnnnnnnnnnnnnnnnnnnnnnnnnnnnnnnnnnnnnnnnnnnnnnnnnnnnnnnnnnnnnnnnnnnnnnnnnnnnnnnnnnnnnnnnnnnnnnnnnnnnnnnnnnnnnnnnnnnnnnnnnnnnnnnnnnnnnnnnnnnnnnnnnnnnnnnnnnnnnnnnnnnnnnnnnnnnnnnnnnnnnnnnnnnnnnnnnnnnnnnnnnnnnnnnnnnnnnnnnnnnnnnnnnnnnnnnnnnnnnnnnnnnnnnnnnnnnnnnnnnnnnnnnnnnnnnnnnnnnnnnnnnnnnnnnnnnnnnnnnnnnnnnnnnnnnnnnnnnnnnnnnnnnnnnnnnnnnnnnnnnnnnnnnnnnnnnnnnnnnnnnnnnnnnnnnnnnnnnnnnnnnnnnnnnnnnnnnnnnnnnnnnnnnnnnnnnnnnnnnnnnnnnnnnnnnnnnnnnnnnnnnnnnnnnnnnnnnnnnnnnnnnnnnnnnnnnnnnnnnnnnnnnnnnnnnnnnnnnnnnnnnnnnnnnnnnnnnnnnnnnnnnnnnnnnnnnnnnnnnnnnnnnnnnnnnnnnnnnnnnnnnnnnnnnnnnnnnnnnnnnnnnnnnnnnnnnnnnnnnnnnnnnnnnnnnnnnnnnnnnnnnnnnnnnnnnnnnnnnnnnnnnnnnnnnnnnnnnnnnnnnnnnnnnnnnnnnnnnnnnnnnnnnnnnnnnnnnnnnnnnnnnnnnnnnnnnnnnnnnnnnnnnnnnnnnnnnnnnnnnnnnnnnnnnnnnnnnnnnnnnnnnnnnnnnnnnnnnnnnnnnnnnnnnnnnnnnnnnnnnnnnnnnnnnnnnnnnnnnnnnnnnnnnnnnnnnnnnnnnnnnnnnnnnnnnnnnnnnnnnnnnnnnnnnnnnnnnnnnnnnnnnnnnnnnnnnnnnnnnnnnnnnnnnnnnnnnnnnnnnnnnnnnnnnnnnnnnnnnnnnnnnnnnnnnnnnnnnnnnnnnnnnnnnnnnnnnnnnnnnnnnnnnnnnnnnnnnnnnnnnnnnnnnnnnnnnnnnnnnnnnnnnnnnnnnnnnnnnnnnnnnnnnnnnnnnnnnnnnnnnnnnnnnnnnnnnnnnnnnnnnnnnnnnnnnnnnnnnnnnnnnnnnnnnnnnnnnnnnnnnnnnnnnnnnnnnnnnnnnnnnnnnnnnnnnnnnnnnnnnnnnnnnnnnnnnnnnnnnnnnnnnnnnnnnnnnnnnnnnnnnnnnnnnnnnnnnnnnnnnnnnnnnnnnnnnnnnnnnnnnnnnnnnnnnnnnnnnnnnnnnnnnnnnnnnnnnnnnnnnnnnnnnnnnnnnnnnnnnnnnnnnnnnnnnnnnnnnnnnnnnnnnnnnnnnnnnnnnnnnnnnnnnnnnnnnnnnnnnnnnnnnnnnnnnnnnnnnnnnnnnnnnnnnnnnnnnnnnnnnnnnnnnnnnnnnnnnnnnnnnnnnnnnnnnnnnnnnnnnnnnnnnnnnnnnnnnnnnnnnnnnnnnnnnnnnnnnnnnnnnnnnnnnnnnnnnnnnnnnnnnnnnnnnnnnnnnnnnnnnnnnnnnnnnnnnnnnnnnnnnnnnnnnnnnnnnnnnnnnnnnnnnnnnnnnnnnnnnnnnnnnnnnnnnnnnnnnnnnnnnnnnnnnnnnnnnnnnnnnnnnnnnnnnnnnnnnnnnnnnnnnnnnnnnnnnnnnnnnnnnnnnnnnnnnnnnnnnnnnnnnnnnnnnnnnnnnnnnnnnnnnnnnnnnnnnnnnnnnnnnnnnnnnnnnnnnnnnnnnnnnnnnnnnnnnnnnnnnnnnnnnnnnnnnnnnnnnnnnnnnnnnnnnnnnnnnnnnnnnnnnnnnnnnnnnnnnnnnnnnnnnnnnnnnnnnnnnnnnnnnnnnnnnnnnnnnnnnnnnnnnnnnnnnnnnnnnnnnnnnnnnnnnnnnnnnnnnnnnnnnnnnnnnnnnnnnnnnnnnnnnnnnnnnnnnnnnnnnnnnnnnnnnnnnnnnnnnnnnnnnnnnnnnnnnnnnnnnnnnnnnnnnnnnnnnnnnnnnnnnnnnnnnnnnnnnnnnnnnnnnnnnnnnnnnnnnnnnnnnnnnnnnnnnnnnnnnnnnnnnnnnnnnnnnnnnnnnnnnnnnnnnnnnnnnnnnnnnnnnnnnnnnnnnnnnnnnnnnnnnnnnnnnnnnnnnnnnnnnnnnnnnnnnnnnnnnnnnnnnnnnnnnnnnnnnnnnnnnnnnnnnnnnnnnnnnnnnnnnnnnnnnnnnnnnnnnnnnnnnnnnnnnnnnnnnnnnnnnnnnnnnnnnnnnnnnnnnnnnnnnnnnnnnnnnnnnnnnnnnnnnnnnnnnnnnnnnnnnnnnnnnnnnnnnnnnnnnnnnnnnnnnnnnnnnnnnnnnnnnnnnnnnnnnnnnnnnnnnnnnnnnnnnnnnnnnnnnnnnnnnnnnnnnnnnnnnnnnnnnnnnnnnnnnnnnnnnnnnnnnnnnnnnnnnnnnnnnnnnnnnnnnnnnnnnnnnnnnnnnnnnnnnnnnnnnnnnnnnnnnnnnnnnnnnnnnnnnnnnnnnnnnnnnnnnnnnnnnnnnnnnnnnnnnnnnnnnnnnnnnnnnnnnnnnnnnnnnnnnnnnnnnnnnnnnnnnnnnnnnnnnnnnnnnnnnnnnnnnnnnnnnnnnnnnnnnnnnnnnnnnnnnnnnnnnnnnnnnnnnnnnnnnnnnnnnnnnnnnnnnnnnnnnnnnnnnnnnnnnnnnnnnnnnnnnnnnnnnnnnnnnnnnnnnnnnnnnnnnnnnnnnnnnnnnnnnnnnnnnnnnnnnnnnnnnnnnnnnnnnnnnnnnnnnnnnnnnnnnnnnnnnnnnnnnnnnnnnnnnnnnnnnnnnnnnnnnnnnnnnnnnnnnnnnnnnnnnnnnnnnnnnnnnnnnnnnnnnnnnnnnnnnnnnnnnnnnnnnnnnnnnnnnnnnnnnnnnnnnnnnnnnnnnnnnnnnnnnnnnnnnnnnnnnnnnnnnnnnnnnnnnnnnnnnnnnnnnnnnnnnnnnnnnnnnnnnnnnnnnnnnnnnnnnnnnnnnnnnnnnnnnnnnnnnnnnnnnnnnnnnnnnnnnnnnnnnnnnnnnnnnnnnnnnnnnnnnnnnnnnnnnnnnnnnnnnnnnnnnnnnnnnnnnnnnnnnnnnnnnnnnnnnnnnnnnnnnnnnnnnnnnnnnnnnnnnnnnnnnnnnnnnnnnnnnnnnnnnnnnnnnnnnnnnnnnnnnnnnnnnnnnnnnnnnnnnnnnnnnnnnnnnnnnnnnnnnnnnnnnnnnnnnnnnnnnnnnnnnnnnnnnnnnnnnnnnnnnnnnnnnnnnnnnnnnnnnnnnnnnnnnnnnnnnnnnnnnnnnnnnnnnnnnnnnnnnnnnnnnnnnnnnnnnnnnnnnnnnnnnnnnnnnnnnnnnnnnnnnnnnnnnnnnnnnnnnnnnnnnnnnnnnnnnnnnnnnnnnnnnnnnnnnnnnnnnnnnnnnnnnnnnnnnnnnnnnnnnnnnnnnnnnnnnnnnnnnnnnnnnnnnnnnnnnnnnnnnnnnnnnnnnnnnnnnnnnnnnnnnnnnnnnnnnnnnnnnnnnnnnnnnnnnnnnnnnnnnnnnnnnnnnnnnnnnnnnnnnnnnnnnnnnnnnnnnnnnnnnnnnnnnnnnnnnnnnnnnnnnnnnnnnnnnnnnnnnnnnnnnnnnnnnnnnnnnnnnnnnnnnnnnnnnnnnnnnnnnnnnnnnnnnnnnnnnnnnnnnnnnnnnnnnnnnnnnnnnnnnnnnnnnnnnnnnnnnnnnnnnnnnnnnnnnnnnnnnnnnnnnnnnnnnnnnnnnnnnnnnnnnnnnnnnnnnnnnnnnnnnnnnnnnnnnnnnnnnnnnnnnnnnnnnnnnnnnnnnnnnnnnnnnnnnnnnnnnnnnnnnnnnnnnnnnnnnnnnnnnnnnnnnnnnnnnnnnnnnnnnnnnnnnnnnnnnnnnnnnnnnnnnnnnnnnnnnnnnnnnnnnnnnnnnnnnnnnnnnnnnnnnnnnnnnnnnnnnnnnnnnnnnnnnnnnnnnnnnnnnnnnnnnnnnnnnnnnnnnnnnnnnnnnnnnnnnnnnnnnnnnnnnnnnnnnnnnnnnnnnnnnnnnnnnnnnnnnnnnnnnnnnnnnnnnnnnnnnnnnnnnnnnnnnnnnnnnnnnnnnnnnnnnnnnnnnnnnnnnnnnnnnnnnnnnnnnnnnnnnnnnnnnnnnnnnnnnnnnnnnnnnnnnnnnnnnnnnnnnnnnnnnnnnnnnnnnnnnnnnnnnnnnnnnnnnnnnnnnnnnnnnnnnnnnnnnnnnnnnnnnnnnnnnnnnnnnnnnnnnnnnnnnnnnnnnnnnnnnnnnnnnnnnnnnnnnnnnnnnnnnnnnnnnnnnnnnnnnnnnnnnnnnnnnnnnnnnnnnnnnnnnnnnnnnnnnnnnnnnnnnnnnnnnnnnnnnnnnnnnnnnnnnnnnnnnnnnnnnnnnnnnnnnnnnnnnnnnnnnnnnnnnnnnnnnnnnnnnnnnnnnnnnnnnnnnnnnnnnnnnnnnnnnnnnnnnnnnnnnnnnnnnnnnnnnnnnnnnnnnnnnnnnnnnnnnnnnnnnnnnnnnnnnnnnnnnnnnnnnnnnnnnnnnnnnnnnnnnnnnnnnnnnnnnnnnnnnnnnnnnnnnnnnnnnnnnnnnnnnnnnnnnnnnnnnnnnnnnnnnnnnnnnnnnnnnnnnnnnnnnnnnnnnnnnnnnnnnnnnnnnnnnnnnnnnnnnnnnnnnnnnnnnnnnnnnnnnnnnnnnnnnnnnnnnnnnnnnnnnnnnnnnnnnnnnnnnnnnnnnnnnnnnnnnnnnnnnnnnnnnnnnnnnnnnnnnnnnnnnnnnnnnnnnnnnnnnnnnnnnnnnnnnnnnnnnnnnnnnnnnnnnnnnnnnnnnnnnnnnnnnnnnnnnnnnnnnnnnnnnnnnnnnnnnnnnnnnnnnnnnnnnnnnnnnnnnnnnnnnnnnnnnnnnnnnnnnnnnnnnnnnnnnnnnnnnnnnnnnnnnnnnnnnnnnnnnnnnnnnnnnnnnnnnnnnnnnnnnnnnnnnnnnnnnnnnnnnnnnnnnnnnnnnnnnnnnnnnnnnnnnnnnnnnnnnnnnnnnnnnnnnnnnnnnnnnnnnnnnnnnnnnnnnnnnnnnnnnnnnnnnnnnnnnnnnnnnnnnnnnnnnnnnnnnnnnnnnnnnnnnnnnnnnnnnnnnnnnnnnnnnnnnnnnnnnnnnnnnnnnnnnnnnnnnnnnnnnnnnnnnnnnnnnnnnnnnnnnnnnnnnnnnnnnnnnnnnnnnnnnnnnnnnnnnnnnnnnnnnnnnnnnnnnnnnnnnnnnnnnnnnnnnnnnnnnnnnnnnnnnnnnnnnnnnnnnnnnnnnnnnnnnnnnnnnnnnnnnnnnnnnnnnnnnnnnnnnnnnnnnnnnnnnnnnnnnnnnnnnnnnnnnnnnnnnnnnnnnnnnnnnnnnnnnnnnnnnnnnnnnnnnnnnnnnnnnnnnnnnnnnnnnnnnnnnnnnnnnnnnnnnnnnnnnnnnnnnnnnnnnnnnnnnnnnnnnnnnnnnnnnnnnnnnnnnnnnnnnnnnnnnnnnnnnnnnnnnnnnnnnnnnnnnnnnnnnnnnnnnnnnnnnnnnnnnnnnnnnnnnnnnnnnnnnnnnnnnnnnnnnnnnnnnnnnnnnnnnnnnnnnnnnnnnnnnnnnnnnnnnnnnnnnnnnnnnnnnnnnnnnnnnnnnnnnnnnnnnnnnnnnnnnnnnnnnnnnnnnnnnnnnnnnnnnnnnnnnnnnnnnnnnnnnnnnnnnnnnnnnnnnnnnnnnnnnnnnnnnnnnnnnnnnnnnnnnnnnnnnnnnnnnnnnnnnnnnnnnnnnnnnnnnnnnnnnnnnnnnnnnnnnnnnnnnnnnnnnnnnnnnnnnnnnnnnnnnnnnnnnnnnnnnnnnnnnnnnnnnnnnnnnnnnnnnnnnnnnnnnnnnnnnnnnnnnnnnnnnnnnnnnnnnnnnnnnnnnnnnnnnnnnnnnnnnnnnnnnnnnnnnnnnnnnnnnnnnnnnnnnnnnnnnnnnnnnnnnnnnnnnnnnnnnnnnnnnnnnnnnnnnnnnnnnnnnnnnnnnnnnnnnnnnnnnnnnnnnnnnnnnnnnnnnnnnnnnnnnnnnnnnnnnnnnnnnnnnnnnnnnnnnnnnnnnnnnnnnnnnnnnnnnnnnnnnnnnnnnnnnnnnnnnnnnnnnnnnnnnnnnnnnnnnnnnnnnnnnnnnnnnnnnnnnnnnnnnnnnnnnnnnnnnnnnnnnnnnnnnnnnnnnnnnnnnnnnnnnnnnnnnnnnnnnnnnnnnnnnnnnnnnnnnnnnnnnnnnnnnnnnnnnnnnnnnnnnnnnnnnnnnnnnnnnnnnnnnnnnnnnnnnnnnnnnnnnnnnnnnnnnnnnnnnnnnnnnnnnnnnnnnnnnnnnnnnnnnnnnnnnnnnnnnnnnnnnnnnnnnnnnnnnnnnnnnnnnnnnnnnnnnnnnnnnnnnnnnnnnnnnnnnnnnnnnnnnnnnnnnnnnnnnnnnnnnnnnnnnnnnnnnnnnnnnnnnnnnnnnnnnnnnnnnnnnnnnnnnnnnnnnnnnnnnnnnnnnnnnnnnnnnnnnnnnnnnnnnnnnnnnnnnnnnnnnnnnnnnnnnnnnnnnnnnnnnnnnnnnnnnnnnnnnnnnnnnnnnnnnnnnnnnnnnnnnnnnnnnnnnnnnnnnnnnnnnnnnnnnnnnnnnnnnnnnnnnnnnnnnnnnnnnnnnnnnnnnnnnnnnnnnnnnnnnnnnnnnnnnnnnnnnnnnnnnnnnnnnnnnnnnnnnnnnnnnnnnnnnnnnnnnnnnnnnnnnnnnnnnnnnnnnnnnnnnnnnnnnnnnnnnnnnnnnnnnnnnnnnnnnnnnnnnnnnnnnnnnnnnnnnnnnnnnnnnnnnnnnnnnnnnnnnnnnnnnnnnnnnnnnnnnnnnnnnnnnnnnnnnnnnnnnnnnnnnnnnnnnnnnnnnnnnnnnnnnnnnnnnnnnnnnnnnnnnnnnnnnnnnnnnnnnnnnnnnnnnnnnnnnnnnnnnnnnnnnnnnnnnnnnnnnnnnnnnnnnnnnnnnnnnnnnnnnnnnnnnnnnnnnnnnnnnnnnnnnnnnnnnnnnnnnnnnnnnnnnnnnnnnnnnnnnnnnnnnnnnnnnnnnnnnnnnnnnnnnnnnnnnnnnnnnnnnnnnnnnnnnnnnnnnnnnnnnnnnnnnnnnnnnnnnnnnnnnnnnnnnnnnnnnnnnnnnnnnnnnnnnnnnnnnnnnnnnnnnnnnnnnnnnnnnnnnnnnnnnnnnnnnnnnnnnnnnnnnnnnnnnnnnnnnnnnnnnnnnnnnnnnnnnnnnnnnnnnnnnnnnnnnnnnnnnnnnnnnnnnnnnnnnnnnnnnnnnnnnnnnnnnnnnnnnnnnnnnnnnnnnnnnnnnnnnnnnnnnnnnnnnnnnnnnnnnnnnnnnnnnnnnnnnnnnnnnnnnnnnnnnnnnnnnnnnnnnnnnnnnnnnnnnnnnnnnnnnnnnnnnnnnnnnnnnnnnnnnnnnnnnnnnnnnnnnnnnnnnnnnnnnnnnnnnnnnnnnnnnnnnnnnnnnnnnnnnnnnnnnnnnnnnnnnnnnnnnnnnnnnnnnnnnnnnnnnnnnnnnnnnnnnnnnnnnnnnnnnnnnnnnnnnnnnnnnnnnnnnnnnnnnnnnnnnnnnnnnnnnnnnnnnnnnnnnnnnnnnnnnnnnnnnnnnnnnnnnnnnnnnnnnnnnnnnnnnnnnnnnnnnnnnnnnnnnnnnnnnnnnnnnnnnnnnnnnnnnnnnnnnnnnnnnnnnnnnnnnnnnnnnnnnnnnnnnnnnnnnnnnnnnnnnnnnnnnnnnnnnnnnnnnnnnnnnnnnnnnnnnnnnnnnnnnnnnnnnnnnnnnnnnnnnnnnnnnnnnnnnnnnnnnnnnnnnnnnnnnnnnnnnnnnnnnnnnnnnnnnnnnnnnnnnnnnnnnnnnnnnnnnnnnnnnnnnnnnnnnnnnnnnnnnnnnnnnnnnnnnnnnnnnnnnnnnnnnnnnnnnnnnnnnnnnnnnnnnnnnnnnnnnnnnnnnnnnnnnnnnnnnnnnnnnnnnnnnnnnnnnnnnnnnnnnnnnnnnnnnnnnnnnnnnnnnnnnnnnnnnnnnnnnnnnnnnnnnnnnnnnnnnnnnnnnnnnnnnnnnnnnnnnnnnnnnnnnnnnnnnnnnnnnnnnnnnnnnnnnnnnnnnnnnnnnnnnnnnnnnnnnnnnnnnnnnnnnnnnnnnnnnnnnnnnnnnnnnnnnnnnnnnnnnnnnnnnnnnnnnnnnnnnnnnnnnnnnnnnnnnnnnnnnnnnnnnnnnnnnnnnnnnnnnnnnnnnnnnnnnnnnnnnnnnnnnnnnnnnnnnnnnnnnnnnnnnnnnnnnnnnnnnnnnnnnnnnnnnnnnnnnnnnnnnnnnnnnnnnnnnnnnnnnnnnnnnnnnnnnnnnnnnnnnnnnnnnnnnnnnnnnnnnnnnnnnnnnnnnnnnnnnnnnnnnnnnnnnnnnnnnnnnnnnnnnnnnnnnnnnnnnnnnnnnnnnnnnnnnnnnnnnnnnnnnnnnnnnnnnnnnnnnnnnnnnnnnnnnnnnnnnnnnnnnnnnnnnnnnnnnnnnnnnnnnnnnnnnnnnnnnnnnnnnnnnnnnnnnnnnnnnnnnnnnnnnnnnnnnnnnnnnnnnnnnnnnnnnnnnnnnnnnnnnnnnnnnnnnnnnnnnnnnnnnnnnnnnnnnnnnnnnnnnnnnnnnnnnnnnnnnnnnnnnnnnnnnnnnnnnnnnnnnnnnnnnnnnnnnnnnnnnnnnnnnnnnnnnnnnnnnnnnnnnnnnnnnnnnnnnnnnnnnnnnnnnnnnnnnnnnnnnnnnnnnnnnnnnnnnnnnnnnnnnnnnnnnnnnnnnnnnnnnnnnnnnnnnnnnnnnnnnnnnnnnnnnnnnnnnnnnnnnnnnnnnnnnnnnnnnnnnnnnnnnnnnnnnnnnnnnnnnnnnnnnnnnnnnnnnnnnnnnnnnnnnnnnnnnnnnnnnnnnnnnnnnnnnnnnnnnnnnnnnnnnnnnnnnnnnnnnnnnnnnnnnnnnnnnnnnnnnnnnnnnnnnnnnnnnnnnnnnnnnnnnnnnnnnnnnnnnnnnnnnnnnnnnnnnnnnnnnnnnnnnnnnnnnnnnnnnnnnnnnnnnnnnnnnnnnnnnnnnnnnnnnnnnnnnnnnnnnnnnnnnnnnnnnnnnnnnnnnnnnnnnnnnnnnnnnnnnnnnnnnnnnnnnnnnnnnnnnnnnnnnnnnnnnnnnnnnnnnnnnnnnnnnnnnnnnnnnnnnnnnnnnnnnnnnnnnnnnnnnnnnnnnnnnnnnnnnnnnnnnnnnnnnnnnnnnnnnnnnnnnnnnnnnnnnnnnnnnnnnnnnnnnnnnnnnnnnnnnnnnnnnnnnnnnnnnnnnnnnnnnnnnnnnnnnnnnnnnnnnnnnnnnnnnnnnnnnnnnnnnnnnnnnnnnnnnnnnnnnnnnnnnnnnnnnnnnnnnnnnnnnnnnnnnnnnnnnnnnnnnnnnnnnnnnnnnnnnnnnnnnnnnnnnnnnnnnnnnnnnnnnnnnnnnnnnnnnnnnnnnnnnnnnnnnnnnnnnnnnnnnnnnnnnnnnnnnnnnnnnnnnnnnnnnnnnnnnnnnnnnnnnnnnnnnnnnnnnnnnnnnnnnnnnnnnnnnnnnnnnnnnnnnnnnnnnnnnnnnnnnnnnnnnnnnnnnnnnnnnnnnnnnnnnnnnnnnnnnnnnnnnnnnnnnnnnnnnnnnnnnnnnnnnnnnnnnnnnnnnnnnnnnnnnnnnnnnnnnnnnnnnnnnnnnnnnnnnnnnnnnnnnnnnnnnnnnnnnnnnnnnnnnnnnnnnnnnnnnnnnnnnnnnnnnnnnnnnnnnnnnnnnnnnnnnnnnnnnnnnnnnnnnnnnnnnnnnnnnnnnnnnnnnnnnnnnnnnnnnnnnnnnnnnnnnnnnnnnnnnnnnnnnnnnnnnnnnnnnnnnnnnnnnnnnnnnnnnnnnnnnnnnnnnnnnnnnnnnnnnnnnnnnnnnnnnnnnnnnnnnnnnnnnnnnnnnnnnnnnnnnnnnnnnnnnnnnnnnnnnnnnnnnnnnnnnnnnnnnnnnnnnnnnnnnnnnnnnnnnnnnnnnnnnnnnnnnnnnnnnnnnnnnnnnnnnnnnnnnnnnnnnnnnnnnnnnnnnnnnnnnnnnnnnnnnnnnnnnnnnnnnnnnnnnnnnnnnnnnnnnnnnnnnnnnnnnnnnnnnnnnnnnnnnnnnnnnnnnnnnnnnnnnnnnnnnnnnnnnnnnnnnnnnnnnnnnnnnnnnnnnnnnnnnnnnnnnnnnnnnnnnnnnnnnnnnnnnnnnnnnnnnnnnnnnnnnnnnnnnnnnnnnnnnnnnnnnnnnnnnnnnnnnnnnnnnnnnnnnnnnnnnnnnnnnnnnnnnnnnnnnnnnnnnnnnnnnnnnnnnnnnnnnnnnnnnnnnnnnnnnnnnnnnnnnnnnnnnnnnnnnnnnnnnnnnnnnnnnnnnnnnnnnnnnnnnnnnnnnnnnnnnnnnnnnnnnnnnnnnnnnnnnnnnnnnnnnnnnnnnnnnnnnnnnnnnnnnnnnnnnnnnnnnnnnnnnnnnnnnnnnnnnnnnnnnnnnnnnnnnnnnnnnnnnnnnnnnnnnnnnnnnnnnnnnnnnnnnnnnnnnnnnnnnnnnnnnnnnnnnnnnnnnnnnnnnnnnnnnnnnnnnnnnnnnnnnnnnnnnnnnnnnnnnnnnnnnnnnnnnnnnnnnnnnnnnnnnnnnnnnnnnnnnnnnnnnnnnnnnnnnnnnnnnnnnnnnnnnnnnnnnnnnnnnnnnnnnnnnnnnnnnnnnnnnnnnnnnnnnnnnnnnnnnnnnnnnnnnnnnnnnnnnnnnnnnnnnnnnnnnnnnnnnnnnnnnnnnnnnnnnnnnnnnnnnnnnnnnnnnnnnnnnnnnnnnnnnnnnnnnnnnnnnnnnnnnnnnnnnnnnnnnnnnnnnnnnnnnnnnnnnnnnnnnnnnnnnnnnnnnnnnnnnnnnnnnnnnnnnnnnnnnnnnnnnnnnnnnnnnnnnnnnnnnnnnnnnnnnnnnnnnnnnnnnnnnnnnnnnnnnnnnnnnnnnnnnnnnnnnnnnnnnnnnnnnnnnnnnnnnnnnnnnnnnnnnnnnnnnnnnnnnnnnnnnnnnnnnnnnnnnnnnnnnnnnnnnnnnnnnnnnnnnnnnnnnnnnnnnnnnnnnnnnnnnnnnnnnnnnnnnnnnnnnnnnnnnnnnnnnnnnnnnnnnnnnnnnnnnnnnnnnnnnnnnnnnnnnnnnnnnnnnnnnnnnnnnnnnnnnnnnnnnnnnnnnnnnnnnnnnnnnnnnnnnnnnnnnnnnnnnnnnnnnnnnnnnnnnnnnnnnnnnnnnnnnnnnnnnnnnnnnnnnnnnnnnnnnnnnnnnnnnnnnnnnnnnnnnnnnnnnnnnnnnnnnnnnnnnnnnnnnnnnnnnnnnnnnnnnnnnnnnnnnnnnnnnnnnnnnnnnnnnnnnnnnnnnnnnnnnnnnnnnnnnnnnnnnnnnnnnnnnnnnnnnnnnnnnnnnnnnnnnnnnnnnnnnnnnnnnnnnnnnnnnnnnnnnnnnnnnnnnnnnnnnnnnnnnnnnnnnnnnnnnnnnnnnnnnnnnnnnnnnnnnnnnnnnnnnnnnnnnnnnnnnnnnnnnnnnnnnnnnnnnnnnnnnnnnnnnnnnnnnnnnnnnnnnnnnnnnnnnnnnnnnnnnnnnnnnnnnnnnnnnnnnnnnnnnnnnnnnnnnnnnnnnnnnnnnnnnnnnnnnnnnnnnnnnnnnnnnnnnnnnnnnnnnnnnnnnnnnnnnnnnnnnnnnnnnnnnnnnnnnnnnnnnnnnnnnnnnnnnnnnnnnnnnnnnnnnnnnnnnnnnnnnnnnnnnnnnnnnnnnnnnnnnnnnnnnnnnnnnnnnnnnnnnnnnnnnnnnnnnnnnnnnnnnnnnnnnnnnnnnnnnnnnnnnnnnnnnnnnnnnnnnnnnnnnnnnnnnnnnnnnnnnnnnnnnnnnnnnnnnnnnnnnnnnnnnnnnnnnnnnnnnnnnnnnnnnnnnnnnnnnnnnnnnnnnnnnnnnnnnnnnnnnnnnnnnnnnnnnnnnnnnnnnnnnnnnnnnnnnnnnnnnnnnnnnnnnnnnnnnnnnnnnnnnnnnnnnnnnnnnnnnnnnnnnnnnnnnnnnnnnnnnnnnnnnnnnnnnnnnnnnnnnnnnnnnnnnnnnnnnnnnnnnnnnnnnnnnnnnnnnnnnnnnnnnnnnnnnnnnnnnnnnnnnnnnnnnnnnnnnnnnnnnnnnnnnnnnnnnnnnnnnnnnnnnnnnnnnnnnnnnnnnnnnnnnnnnnnnnnnnnnnnnnnnnnnnnnnnnnnnnnnnnnnnnnnnnnnnnnnnnnnnnnnnnnnnnnnnnnnnnnnnnnnnnnnnnnnnnnnnnnnnnnnnnnnnnnnnnnnnnnnnnnnnnnnnnnnnnnnnnnnnnnnnnnnnnnnnnnnnnnnnnnnnnnnnnnnnnnnnnnnnnnnnnnnnnnnnnnnnnnnnnnnnnnnnnnnnnnnnnnnnnnnnnnnnnnnnnnnnnnnnnnnnnnnnnnnnnnnnnnnnnnnnnnnnnnnnnnnnnnnnnnnnnnnnnnnnnnnnnnnnnnnnnnnnnnnnnnnnnnnnnnnnnnnnnnnnnnnnnnnnnnnnnnnnnnnnnnnnnnnnnnnnnnnnnnnnnnnnnnnnnnnnnnnnnnnnnnnnnnnnnnnnnnnnnnnnnnnnnnnnnnnnnnnnnnnnnnnnnnnnnnnnnnnnnnnnnnnnnnnnnnnnnnnnnnnnnnnnnnnnnnnnnnnnnnnnnnnnnnnnnnnnnnnnnnnnnnnnnnnnnnnnnnnnnnnnnnnnnnnnnnnnnnnnnnnnnnnnnnnnnnnnnnnnnnnnnnnnnnnnnnnnnnnnnnnnnnnnnnnnnnnnnnnnnnnnnnnnnnnnnnnnnnnnnnnnnnnnnnnnnnnnnnnnnnnnnnnnnnnnnnnnnnnnnnnnnnnnnnnnnnnnnnnnnnnnnnnnnnnnnnnnnnnnnnnnnnnnnnnnnnnnnnnnnnnnnnnnnnnnnnnnnnnnnnnnnnnnnnnnnnnnnnnnnnnnnnnnnnnnnnnnnnnnnnnnnnnnnnnnnnnnnnnnnnnnnnnnnnnnnnnnnnnnnnnnnnnnnnnnnnnnnnnnnnnnnnnnnnnnnnnnnnnnnnnnnnnnnnnnnnnnnnnnnnnnnnnnnnnnnnnnnnnnnnnnnnnnnnnnnnnnnnnnnnnnnnnnnnnnnnnnnnnnnnnnnnnnnnnnnnnnnnnnnnnnnnnnnnnnnnnnnnnnnnnnnnnnnnnnnnnnnnnnnnnnnnnnnnnnnnnnnnnnnnnnnnnnnnnnnnnnnnnnnnnnnnnnnnnnnnnnnnnnnnnnnnnnnnnnnnnnnnnnnnnnnnnnnnnnnnnnnnnnnnnnnnnnnnnnnnnnnnnnnnnnnnnnnnnnnnnnnnnnnnnnnnnnnnnnnnnnnnnnnnnnnnnnnnnnnnnnnnnnnnnnnnnnnnnnnnnnnnnnnnnnnnnnnnnnnnnnnnnnnnnnnnnnnnnnnnnnnnnnnnnnnnnnnnnnnnnnnnnnnnnnnnnnnnnnnnnnnnnnnnnnnnnnnnnnnnnnnnnnnnnnnnnnnnnnnnnnnnnnnnnnnnnnnnnnnnnnnnnnnnnnnnnnnnnnnnnnnnnnnnnnnnnnnnnnnnnnnnnnnnnnnnnnnnnnnnnnnnnnnnnnnnnnnnnnnnnnnnnnnnnnnnnnnnnnnnnnnnnnnnnnnnnnnnnnnnnnnnnnnnnnnnnnnnnnnnnnnnnnnnnnnnnnnnnnnnnnnnnnnnnnnnnnnnnnnnnnnnnnnnnnnnnnnnnnnnnnnnnnnnnnnnnnnnnnnnnnnnnnnnnnnnnnnnnnnnnnnnnnnnnnnnnnnnnnnnnnnnnnnnnnnnnnnnnnnnnnnnnnnnnnnnnnnnnnnnnnnnnnnnnnnnnnnnnnnnnnnnnnnnnnnnnnnnnnnnnnnnnnnnnnnnnnnnnnnnnnnnnnnnnnnnnnnnnnnnnnnnnnnnnnnnnnnnnnnnnnnnnnnnnnnnnnnnnnnnnnnnnnnnnnnnnnnnnnnnnnnnnnnnnnnnnnnnnnnnnnnnnnnnnnnnnnnnnnnnnnnnnnnnnnnnnnnnnnnnnnnnnnnnnnnnnnnnnnnnnnnnnnnnnnnnnnnnnnnnnnnnnnnnnnnnnnnnnnnnnnnnnnnnnnnnnnnnnnnnnnnnnnnnnnnnnnnnnnnnnnnnnnnnnnnnnnnnnnnnnnnnnnnnnnnnnnnnnnnnnnnnnnnnnnnnnnnnnnnnnnnnnnnnnnnnnnnnnnnnnnnnnnnnnnnnnnnnnnnnnnnnnnnnnnnnnnnnnnnnnnnnnnnnnnnnnnnnnnnnnnnnnnnnnnnnnnnnnnnnnnnnnnnnnnnnnnnnnnnnnnnnnnnnnnnnnnnnnnnnnnnnnnnnnnnnnnnnnnnnnnnnnnnnnnnnnnnnnnnnnnnnnnnnnnnnnnnnnnnnnnnnnnnnnnnnnnnnnnnnnnnnnnnnnnnnnnnnnnnnnnnnnnnnnnnnnnnnnnnnnnnnnnnnnnnnnnnnnnnnnnnnnnnnnnnnnnnnnnnnnnnnnnnnnnnnnnnnnnnnnnnnnnnnnnnnnnnnnnnnnnnnnnnnnnnnnnnnnnnnnnnnnnnnnnnnnnnnnnnnnnnnnnnnnnnnnnnnnnnnnnnnnnnnnnnnnnnnnnnnnnnnnnnnnnnnnnnnnnnnnnnnnnnnnnnnnnnnnnnnnnnnnnnnnnnnnnnnnnnnnnnnnnnnnnnnnnnnnnnnnnnnnnnnnnnnnnnnnnnnnnnnnnnnnnnnnnnnnnnnnnnnnnnnnnnnnnnnnnnnnnnnnnnnnnnnnnnnnnnnnnnnnnnnnnnnnnnnnnnnnnnnnnnnnnnnnnnnnnnnnnnnnnnnnnnnnnnnnnnnnnnnnnnnnnnnnnnnnnnnnnnnnnnnnnnnnnnnnnnnnnnnnnnnnnnnnnnnnnnnnnnnnnnnnnnnnnnnnnnnnnnnnnnnnnnnnnnnnnnnnnnnnnnnnnnnnnnnnnnnnnnnnnnnnnnnnnnnnnnnnnnnnnnnnnnnnnnnnnnnnnnnnnnnnnnnnnnnnnnnnnnnnnnnnnnnnnnnnnnnnnnnnnnnnnnnnnnnnnnnnnnnnnnnnnnnnnnnnnnnnnnnnnnnnnnnnnnnnnnnnnnnnnnnnnnnnnnnnnnnnnnnnnnnnnnnnnnnnnnnnnnnnnnnnnnnnnnnnnnnnnnnnnnnnnnnnnnnnnnnnnnnnnnnnnnnnnnnnnnnnnnnnnnnnnnnnnnnnnnnnnnnnnnnnnnnnnnnnnnnnnnnnnnnnnnnnnnnnnnnnnnnnnnnnnnnnnnnnnnnnnnnnnnnnnnnnnnnnnnnnnnnnnnnnnnnnnnnnnnnnnnnnnnnnnnnnnnnnnnnnnnnnnnnnnnnnnnnnnnnnnnnnnnnnnnnnnnnnnnnnnnnnnnnnnnnnnnnnnnnnnnnnnnnnnnnnnnnnnnnnnnnnnnnnnnnnnnnnnnnnnnnnnnnnnnnnnnnnnnnnnnnnnnnnnnnnnnnnnnnnnnnnnnnnnnnnnnnnnnnnnnnnnnnnnnnnnnnnnnnnnnnnnnnnnnnnnnnnnnnnnnnnnnnnnnnnnnnnnnnnnnnnnnnnnnnnnnnnnnnnnnnnnnnnnnnnnnnnnnnnnnnnnnnnnnnnnnnnnnnnnnnnnnnnnnnnnnnnnnnnnnnnnnnnnnnnnnnnnnnnnnnnnnnnnnnnnnnnnnnnnnnnnnnnnnnnnnnnnnnnnnnnnnnnnnnnnnnnnnnnnnnnnnnnnnnnnnnnnnnnnnnnnnnnnnnnnnnnnnnnnnnnnnnnnnnnnnnnnnnnnnnnnnnnnnnnnnnnnnnnnnnnnnnnnnnnnnnnnnnnnnnnnnnnnnnnnnnnnnnnnnnnnnnnnnnnnnnnnnnnnnnnnnnnnnnnnnnnnnnnnnnnnnnnnnnnnnnnnnnnnnnnnnnnnnnnnnnnnnnnnnnnnnnnnnnnnnnnnnnnnnnnnnnnnnnnnnnnnnnnnnnnnnnnnnnnnnnnnnnnnnnnnnnnnnnnnnnnnnnnnnnnnnnnnnnnnnnnnnnnnnnnnnnnnnnnnnnnnnnnnnnnnnnnnnnnnnnnnnnnnnnnnnnnnnnnnnnnnnnnnnnnnnnnnnnnnnnnnnnnnnnnnnnnnnnnnnnnnnnnnnnnnnnnnnnnnnnnnnnnnnnnnnnnnnnnnnnnnnnnnnnnnnnnnnnnnnnnnnnnnnnnnnnnnnnnnnnnnnnnnnnnnnnnnnnnnnnnnnnnnnnnnnnnnnnnnnnnnnnnnnnnnnnnnnnnnnnnnnnnnnnnnnnnnnnnnnnnnnnnnnnnnnnnnnnnnnnnnnnnnnnnnnnnnnnnnnnnnnnnnnnnnnnnnnnnnnnnnnnnnnnnnnnnnnnnnnnnnnnnnnnnnnnnnnnnnnnnnnnnnnnnnnnnnnnnnnnnnnnnnnnnnnnnnnnnnnnnnnnnnnnnnnnnnnnnnnnnnnnnnnnnnnnnnnnnnnnnnnnnnnnnnnnnnnnnnnnnnnnnnnnnnnnnnnnnnnnnnnnnnnnnnnnnnnnnnnnnnnnnnnnnnnnnnnnnnnnnnnnnnnnnnnnnnnnnnnnnnnnnnnnnnnnnnnnnnnnnnnnnnnnnnnnnnnnnnnnnnnnnnnnnnnnnnnnnnnnnnnnnnnnnnnnnnnnnnnnnnnnnnnnnnnnnnnnnnnnnnnnnnnnnnnnnnnnnnnnnnnnnnnnnnnnnnnnnnnnnnnnnnnnnnnnnnnnnnnnnnnnnnnnnnnnnnnnnnnnnnnnnnnnnnnnnnnnnnnnnnnnnnnnnnnnnnnnnnnnnnnnnnnnnnnnnnnnnnnnnnnnnnnnnnnnnnnnnnnnnnnnnnnnnnnnnnnnnnnnnnnnnnnnnnnnnnnnnnnnnnnnnnnnnnnnnnnnnnnnnnnnnnnnnnnnnnnnnnnnnnnnnnnnnnnnnnnnnnnnnnnnnnnnnnnnnnnnnnnnnnnnnnnnnnnnnnnnnnnnnnnnnnnnnnnnnnnnnnnnnnnnnnnnnnnnnnnnnnnnnnnnnnnnnnnnnnnnnnnnnnnnnnnnnnnnnnnnnnnnnnnnnnnnnnnnnnnnnnnnnnnnnnnnnnnnnnnnnnnnnnnnnnnnnnnnnnnnnnnnnnnnnnnnnnnnnnnnnnnnnnnnnnnnnnnnnnnnnnnnnnnnnnnnnnnnnnnnnnnnnnnnnnnnnnnnnnnnnnnnnnnnnnnnnnnnnnnnnnnnnnnnnnnnnnnnnnnnnnnnnnnnnnnnnnnnnnnnnnnnnnnnnnnnnnnnnnnnnnnnnnnnnnnnnnnnnnnnnnnnnnnnnnnnnnnnnnnnnnnnnnnnnnnnnnnnnnnnnnnnnnnnnnnnnnnnnnnnnnnnnnnnnnnnnnnnnnnnnnnnnnnnnnnnnnnnnnnnnnnnnnnnnnnnnnnnnnnnnnnnnnnnnnnnnnnnnnnnnnnnnnnnnnnnnnnnnnnnnnnnnnnnnnnnnnnnnnnnnnnnnnnnnnnnnnnnnnnnnnnnnnnnnnnnnnnnnnnnnnnnnnnnnnnnnnnnnnnnnnnnnnnnnnnnnnnnnnnnnnnnnnnnnnnnnnnnnnnnnnnnnnnnnnnnnnnnnnnnnnnnnnnnnnnnnnnnnnnnnnnnnnnnnnnnnnnnnnnnnnnnnnnnnnnnnnnnnnnnnnnnnnnnnnnnnnnnnnnnnnnnnnnnnnnnnnnnnnnnnnnnnnnnnnnnnnnnnnnnnnnnnnnnnnnnnnnnnnnnnnnnnnnnnnnnnnnnnnnnnnnnnnnnnnnnnnnnnnnnnnnnnnnnnnnnnnnnnnnnnnnnnnnnnnnnnnnnnnnnnnnnnnnnnnnnnnnnnnnnnnnnnnnnnnnnnnnnnnnnnnnnnnnnnnnnnnnnnnnnnnnnnnnnnnnnnnnnnnnnnnnnnnnnnnnnnnnnnnnnnnnnnnnnnnnnnnnnnnnnnnnnnnnnnnnnnnnnnnnnnnnnnnnnnnnnnnnnnnnnnnnnnnnnnnnnnnnnnnnnnnnnnnnnnnnnnnnnnnnnnnnnnnnnnnnnnnnnnnnnnnnnnnnnnnnnnnnnnnnnnnnnnnnnnnnnnnnnnnnnnnnnnnnnnnnnnnnnnnnnnnnnnnnnnnnnnnnnnnnnnnnnnnnnnnnnnnnnnnnnnnnnnnnnnnnnnnnnnnnnnnnnnnnnnnnnnnnnnnnnnnnnnnnnnnnnnnnnnnnnnnnnnnnnnnnnnnnnnnnnnnnnnnnnnnnnnnnnnnnnnnnnnnnnnnnnnnnnnnnnnnnnnnnnnnnnnnnnnnnnnnnnnnnnnnnnnnnnnnnnnnnnnnnnnnnnnnnnnnnnnnnnnnnnnnnnnnnnnnnnnnnnnnnnnnnnnnnnnnnnnnnnnnnnnnnnnnnnnnnnnnnnnnnnnnnnnnnnnnnnnnnnnnnnnnnnnnnnnnnnnnnnnnnnnnnnnnnnnnnnnnnnnnnnnnnnnnnnnnnnnnnnnnnnnnnnnnnnnnnnnnnnnnnnnnnnnnnnnnnnnnnnnnnnnnnnnnnnnnnnnnnnnnnnnnnnnnnnnnnnnnnnnnnnnnnnnnnnnnnnnnnnnnnnnnnnnnnnnnnnnnnnnnnnnnnnnnnnnnnnnnnnnnnnnnnnnnnnnnnnnnnnnnnnnnnnnnnnnnnnnnnnnnnnnnnnnnnnnnnnnnnnnnnnnnnnnnnnnnnnnnnnnnnnnnnnnnnnnnnnnnnnnnnnnnnnnnnnnnnnnnnnnnnnnnnnnnnnnnnnnnnnnnnnnnnnnnnnnnnnnnnnnnnnnnnnnnnnnnnnnnnnnnnnnnnnnnnnnnnnnnnnnnnnnnnnnnnnnnnnnnnnnnnnnnnnnnnnnnnnnnnnnnnnnnnnnnnnnnnnnnnnnnnnnnnnnnnnnnnnnnnnnnnnnnnnnnnnnnnnnnnnnnnnnnnnnnnnnnnnnnnnnnnnnnnnnnnnnnnnnnnnnnnnnnnnnnnnnnnnnnnnnnnnnnnnnnnnnnnnnnnnnnnnnnnnnnnnnnnnnnnnnnnnnnnnnnnnnnnnnnnnnnnnnnnnnnnnnnnnnnnnnnnnnnnnnnnnnnnnnnnnnnnnnnnnnnnnnnnnnnnnnnnnnnnnnnnnnnnnnnnnnnnnnnnnnnnnnnnnnnnnnnnnnnnnnnnnnnnnnnnnnnnnnnnnnnnnnnnnnnnnnnnnnnnnnnnnnnnnnnnnnnnnnnnnnnnnnnnnnnnnnnnnnnnnnnnnnnnnnnnnnnnnnnnnnnnnnnnnnnnnnnnnnnnnnnnnnnnnnnnnnnnnnnnnnnnnnnnnnnnnnnnnnnnnnnnnnnnnnnnnnnnnnnnnnnnnnnnnnnnnnnnnnnnnnnnnnnnnnnnnnnnnnnnnnnnnnnnnnnnnnnnnnnnnnnnnnnnnnnnnnnnnnnnnnnnnnnnnnnnnnnnnnnnnnnnnnnnnnnnnnnnnnnnnnnnnnnnnnnnnnnnnnnnnnnnnnnnnnnnnnnnnnnnnnnnnnnnnnnnnnnnnnnnnnnnnnnnnnnnnnnnnnnnnnnnnnnnnnnnnnnnnnnnnnnnnnnnnnnnnnnnnnnnnnnnnnnnnnnnnnnnnnnnnnnnnnnnnnnnnnnnnnnnnnnnnnnnnnnnnnnnnnnnnnnnnnnnnnnnnnnnnnnnnnnnnnnnnnnnnnnnnnnnnnnnnnnnnnnnnnnnnnnnnnnnnnnnnnnnnnnnnnnnnnnnnnnnnnnnnnnnnnnnnnnnnnnnnnnnnnnnnnnnnnnnnnnnnnnnnnnnnnnnnnnnnnnnnnnnnnnnnnnnnnnnnnnnnnnnnnnnnnnnnnnnnnnnnnnnnnnnnnnnnnnnnnnnnnnnnnnnnnnnnnnnnnnnnnnnnnnnnnnnnnnnnnnnnnnnnnnnnnnnnnnnnnnnnnnnnnnnnnnnnnnnnnnnnnnnnnnnnnnnnnnnnnnnnnnnnnnnnnnnnnnnnnnnnnnnnnnnnnnnnnnnnnnnnnnnnnnnnnnnnnnnnnnnnnnnnnnnnnnnnnnnnnnnnnnnnnnnnnnnnnnnnnnnnnnnnnnnnnnnnnnnnnnnnnnnnnnnnnnnnnnnnnnnnnnnnnnnnnnnnnnnnnnnnnnnnnnnnnnnnnnnnnnnnnnnnnnnnnnnnnnnnnnnnnnnnnnnnnnnnnnnnnnnnnnnnnnnnnnnnnnnnnnnnnnnnnnnnnnnnnnnnnnnnnnnnnnnnnnnnnnnnnnnnnnnnnnnnnnnnnnnnnnnnnnnnnnnnnnnnnnnnnnnnnnnnnnnnnnnnnnnnnnnnnnnnnnnnnnnnnnnnnnnnnnnnnnnnnnnnnnnnnnnnnnnnnnnnnnnnnnnnnnnnnnnnnnnnnnnnnnnnnnnnnnnnnnnnnnnnnnnnnnnnnnnnnnnnnnnnnnnnnnnnnnnnnnnnnnnnnnnnnnnnnnnnnnnnnnnnnnnnnnnnnnnnnnnnnnnnnnnnnnnnnnnnnnnnnnnnnnnnnnnnnnnnnnnnnnnnnnnnnnnnnnnnnnnnnnnnnnnnnnnnnnnnnnnnnnnnnnnnnnnnnnnnnnnnnnnnnnnnnnnnnnnnnnnnnnnnnnnnnnnnnnnnnnnnnnnnnnnnnnnnnnnnnnnnnnnnnnnnnnnnnnnnnnnnnnnnnnnnnnnnnnnnnnnnnnnnnnnnnnnnnnnnnnnnnnnnnnnnnnnnnnnnnnnnnnnnnnnnnnnnnnnnnnnnnnnnnnnnnnnnnnnnnnnnnnnnnnnnnnnnnnnnnnnnnnnnnnnnnnnnnnnnnnnnnnnnnnnnnnnnnnnnnnnnnnnnnnnnnnnnnnnnnnnnnnnnnnnnnnnnnnnnnnnnnnnnnnnnnnnnnnnnnnnnnnnnnnnnnnnnnnnnnnnnnnnnnnnnnnnnnnnnnnnnnnnnnnnnnnnnnnnnnnnnnnnnnnnnnnnnnnnnnnnnnnnnnnnnnnnnnnnnnnnnnnnnnnnnnnnnnnnnnnnnnnnnnnnnnnnnnnnnnnnnnnnnnnnnnnnnnnnnnnnnnnnnnnnnnnnnnnnnnnnnnnnnnnnnnnnnnnnnnnnnnnnnnnnnnnnnnnnnnnnnnnnnnnnnnnnnnnnnnnnnnnnnnnnnnnnnnnnnnnnnnnnnnnnnnnnnnnnnnnnnnnnnnnnnnnnnnnnnnnnnnnnnnnnnnnnnnnnnnnnnnnnnnnnnnnnnnnnnnnnnnnnnnnnnnnnnnnnnnnnnnnnnnnnnnnnnnnnnnnnnnnnnnnnnnnnnnnnnnnnnnnnnnnnnnnnnnnnnnnnnnnnnnnnnnnnnnnnnnnnnnnnnnnnnnnnnnnnnnnnnnnnnnnnnnnnnnnnnnnnnnnnnnnnnnnnnnnnnnnnnnnnnnnnnnnnnnnnnnnnnnnnnnnnnnnnnnnnnnnnnnnnnnnnnnnnnnnnnnnnnnnnnnnnnnnnnnnnnnnnnnnnnnnnnnnnnnnnnnnnnnnnnnnnnnnnnnnnnnnnnnnnnnnnnnnnnnnnnnnnnnnnnnnnnnnnnnnnnnnnnnnnnnnnnnnnnnnnnnnnnnnnnnnnnnnnnnnnnnnnnnnnnnnnnnnnnnnnnnnnnnnnnnnnnnnnnnnnnnnnnnnnnnnnnnnnnnnnnnnnnnnnnnnnnnnnnnnnnnnnnnnnnnnnnnnnnnnnnnnnnnnnnnnnnnnnnnnnnnnnnnnnnnnnnnnnnnnnnnnnnnnnnnnnnnnnnnnnnnnnnnnnnnnnnnnnnnnnnnnnnnnnnnnnnnnnnnnnnnnnnnnnnnnnnnnnnnnnnnnnnnnnnnnnnnnnnnnnnnnnnnnnnnnnnnnnnnnnnnnnnnnnnnnnnnnnnnnnnnnnnnnnnnnnnnnnnnnnnnnnnnnnnnnnnnnnnnnnnnnnnnnnnnnnnnnnnnnnnnnnnnnnnnnnnnnnnnnnnnnnnnnnnnnnnnnnnnnnnnnnnnnnnnnnnnnnnnnnnnnnnnnnnnnnnnnnnnnnnnnnnnnnnnnnnnnnnnnnnnnnnnnnnnnnnnnnnnnnnnnnnnnnnnnnnnnnnnnnnnnnnnnnnnnnnnnnnnnnnnnnnnnnnnnnnnnnnnnnnnnnnnnnnnnnnnnnnnnnnnnnnnnnnnnnnnnnnnnnnnnnnnnnnnnnnnnnnnnnnnnnnnnnnnnnnnnnnnnnnnnnnnnnnnnnnnnnnnnnnnnnnnnnnnnnnnnnnnnnnnnnnnnnnnnnnnnnnnnnnnnnnnnnnnnnnnnnnnnnnnnnnnnnnnnnnnnnnnnnnnnnnnnnnnnnnnnnnnnnnnnnnnnnnnnnnnnnnnnnnnnnnnnnnnnnnnnnnnnnnnnnnnnnnnnnnnnnnnnnnnnnnnnnnnnnnnnnnnnnnnnnnnnnnnnnnnnnnnnnnnnnnnnnnnnnnnnnnnnnnnnnnnnnnnnnnnnnnnnnnnnnnnnnnnnnnnnnnnnnnnnnnnnnnnnnnnnnnnnnnnnnnnnnnnnnnnnnnnnnnnnnnnnnnnnnnnnnnnnnnnnnnnnnnnnnnnnnnnnnnnnnnnnnnnnnnnnnnnnnnnnnnnnnnnnnnnnnnnnnnnnnnnnnnnnnnnnnnnnnnnnnnnnnnnnnnnnnnnnnnnnnnnnnnnnnnnnnnnnnnnnnnnnnnnnnnnnnnnnnnnnnnnnnnnnnnnnnnnnnnnnnnnnnnnnnnnnnnnnnnnnnnnnnnnnnnnnnnnnnnnnnnnnnnnnnnnnnnnnnnnnnnnnnnnnnnnnnnnnnnnnnnnnnnnnnnnnnnnnnnnnnnnnnnnnnnnnnnnnnnnnnnnnnnnnnnnnnnnnnnnnnnnnnnnnnnnnnnnnnnnnnnnnnnnnnnnnnnnnnnnnnnnnnnnnnnnnnnnnnnnnnnnnnnnnnnnnnnnnnnnnnnnnnnnnnnnnnnnnnnnnnnnnnnnnnnnnnnnnnnnnnnnnnnnnnnnnnnnnnnnnnnnnnnnnnnnnnnnnnnnnnnnnnnnnnnnnnnnnnnnnnnnnnnnnnnnnnnnnnnnnnnnnnnnnnnnnnnnnnnnnnnnnnnnnnnnnnnnnnnnnnnnnnnnnnnnnnnnnnnnnnnnnnnnnnnnnnnnnnnnnnnnnnnnnnnnnnnnnnnnnnnnnnnnnnnnnnnnnnnnnnnnnnnnnnnnnnnnnnnnnnnnnnnnnnnnnnnnnnnnnnnnnnnnnnnnnnnnnnnnnnnnnnnnnnnnnnnnnnnnnnnnnnnnnnnnnnnnnnnnnnnnnnnnnnnnnnnnnnnnnnnnnnnnnnnnnnnnnnnnnnnnnnnnnnnnnnnnnnnnnnnnnnnnnnnnnnnnnnnnnnnnnnnnnnnnnnnnnnnnnnnnnnnnnnnnnnnnnnnnnnnnnnnnnnnnnnnnnnnnnnnnnnnnnnnnnnnnnnnnnnnnnnnnnnnnnnnnnnnnnnnnnnnnnnnnnnnnnnnnnnnnnnnnnnnnnnnnnnnnnnnnnnnnnnnnnnnnnnnnnnnnnnnnnnnnnnnnnnnnnnnnnnnnnnnnnnnnnnnnnnnnnnnnnnnnnnnnnnnnnnnnnnnnnnnnnnnnnnnnnnnnnnnnnnnnnnnnnnnnnnnnnnnnnnnnnnnnnnnnnnnnnnnnnnnnnnnnnnnnnnnnnnnnnnnnnnnnnnnnnnnnnnnnnnnnnnnnnnnnnnnnnnnnnnnnnnnnnnnnnnnnnnnnnnnnnnnnnnnnnnnnnnnnnnnnnnnnnnnnnnnnnnnnnnnnnnnnnnnnnnnnnnnnnnnnnnnnnnnnnnnnnnnnnnnnnnnnnnnnnnnnnnnnnnnnnnnnnnnnnnnnnnnnnnnnnnnnnnnnnnnnnnnnnnnnnnnnnnnnnnnnnnnnnnnnnnnnnnnnnnnnnnnnnnnnnnnnnnnnnnnnnnnnnnnnnnnnnnnnnnnnnnnnnnnnnnnnnnnnnnnnnnnnnnnnnnnnnnnnnnnnnnnnnnnnnnnnnnnnnnnnnnnnnnnnnnnnnnnnnnnnnnnnnnnnnnnnnnnnnnnnnnnnnnnnnnnnnnnnnnnnnnnnnnnnnnnnnnnnnnnnnnnnnnnnnnnnnnnnnnnnnnnnnnnnnnnnnnnnnnnnnnnnnnnnnnnnnnnnnnnnnnnnnnnnnnnnnnnnnnnnnnnnnnnnnnnnnnnnnnnnnnnnnnnnnnnnnnnnnnnnnnnnnnnnnnnnnnnnnnnnnnnnnnnnnnnnnnnnnnnnnnnnnnnnnnnnnnnnnnnnnnnnnnnnnnnnnnnnnnnnnnnnnnnnnnnnnnnnnnnnnnnnnnnnnnnnnnnnnnnnnnnnnnnnnnnnnnnnnnnnnnnnnnnnnnnnnnnnnnnnnnnnnnnnnnnnnnnnnnnnnnnnnnnnnnnnnnnnnnnnnnnnnnnnnnnnnnnnnnnnnnnnnnnnnnnnnnnnnnnnnnnnnnnnnnnnnnnnnnnnnnnnnnnnnnnnnnnnnnnnnnnnnnnnnnnnnnnnnnnnnnnnnnnnnnnnnnnnnnnnnnnnnnnnnnnnnnnnnnnnnnnnnnnnnnnnnnnnnnnnnnnnnnnnnnnnnnnnnnnnnnnnnnnnnnnnnnnnnnnnnnnnnnnnnnnnnnnnnnnnnnnnnnnnnnnnnnnnnnnnnnnnnnnnnnnnnnnnnnnnnnnnnnnnnnnnnnnnnnnnnnnnnnnnnnnnnnnnnnnnnnnnnnnnnnnnnnnnnnnnnnnnnnnnnnnnnnnnnnnnnnnnnnnnnnnnnnnnnnnnnnnnnnnnnnnnnnnnnnnnnnnnnnnnnnnnnnnnnnnnnnnnnnnnnnnnnnnnnnnnnnnnnnnnnnnnnnnnnnnnnnnnnnnnnnnnnnnnnnnnnnnnnnnnnnnnnnnnnnnnnnnnnnnnnnnnnnnnnnnnnnnnnnnnnnnnnnnnnnnnnnnnnnnnnnnnnnnnnnnnnnnnnnnnnnnnnnnnnnnnnnnnnnnnnnnnnnnnnnnnnnnnnnnnnnnnnnnnnnnnnnnnnnnnnnnnnnnnnnnnnnnnnnnnnnnnnnnnnnnnnnnnnnnnnnnnnnnnnnnnnnnnnnnnnnnnnnnnnnnnnnnnnnnnnnnnnnnnnnnnnnnnnnnnnnnnnnnnnnnnnnnnnnnnnnnnnnnnnnnnnnnnnnnnnnnnnnnnnnnnnnnnnnnnnnnnnnnnnnnnnnnnnnnnnnnnnnnnnnnnnnnnnnnnnnnnnnnnnnnnnnnnnnnnnnnnnnnnnnnnnnnnnnnnnnnnnnnnnnnnnnnnnnnnnnnnnnnnnnnnnnnnnnnnnnnnnnnnnnnnnnnnnnnnnnnnnnnnnnnnnnnnnnnnnnnnnnnnnnnnnnnnnnnnnnnnnnnnnnnnnnnnnnnnnnnnnnnnnnnnnnnnnnnnnnnnnnnnnnnnnnnnnnnnnnnnnnnnnnnnnnnnnnnnnnnnnnnnnnnnnnnnnnnnnnnnnnnnnnnnnnnnnnnnnnnnnnnnnnnnnnnnnnnnnnnnnnnnnnnnnnnnnnnnnnnnnnnnnnnnnnnnnnnnnnnnnnnnnnnnnnnnnnnnnnnnnnnnnnnnnnnnnnnnnnnnnnnnnnnnnnnnnnnnnnnnnnnnnnnnnnnnnnnnnnnnnnnnnnnnnnnnnnnnnnnnnnnnnnnnnnnnnnnnnnnnnnnnnnnnnnnnnnnnnnnnnnnnnnnnnnnnnnnnnnnnnnnnnnnnnnnnnnnnnnnnnnnnnnnnnnnnnnnnnnnnnnnnnnnnnnnnnnnnnnnnnnnnnnnnnnnnnnnnnnnnnnnnnnnnnnnnnnnnnnnnnnnnnnnnnnnnnnnnnnnnnnnnnnnnnnnnnnnnnnnnnnnnnnnnnnnnnnnnnnnnnnnnnnnnnnnnnnnnnnnnnnnnnnnnnnnnnnnnnnnnnnnnnnnnnnnnnnnnnnnnnnnnnnnnnnnnnnnnnnnnnnnnnnnnnnnnnnnnnnnnnnnnnnnnnnnnnnnnnnnnnnnnnnnnnnnnnnnnnnnnnnnnnnnnnnnnnnnnnnnnnnnnnnnnnnnnnnnnnnnnnnnnnnnnnnnnnnnnnnnnnnnnnnnnnnnnnnnnnnnnnnnnnnnnnnnnnnnnnnnnnnnnnnnnnnnnnnnnnnnnnnnnnnnnnnnnnnnnnnnnnnnnnnnnnnnnnnnnnnnnnnnnnnnnnnnnnnnnnnnnnnnnnnnnnnnnnnnnnnnnnnnnnnnnnnnnnnnnnnnnnnnnnnnnnnnnnnnnnnnnnnnnnnnnnnnnnnnnnnnnnnnnnnnnnnnnnnnnnnnnnnnnnnnnnnnnnnnnnnnnnnnnnnnnnnnnnnnnnnnnnnnnnnnnnnnnnnnnnnnnnnnnnnnnnnnnnnnnnnnnnnnnnnnnnnnnnnnnnnnnnnnnnnnnnnnnnnnnnnnnnnnnnnnnnnnnnnnnnnnnnnnnnnnnnnnnnnnnnnnnnnnnnnnnnnnnnnnnnnnnnnnnnnnnnnnnnnnnnnnnnnnnnnnnnnnnnnnnnnnnnnnnnnnnnnnnnnnnnnnnnnnnnnnnnnnnnnnnnnnnnnnnnnnnnnnnnnnnnnnnnnnnnnnnnnnnnnnnnnnnnnnnnnnnnnnnnnnnnnnnnnnnnnnnnnnnnnnnnnnnnnnnnnnnnnnnnnnnnnnnnnnnnnnnnnnnnnnnnnnnnnnnnnnnnnnnnnnnnnnnnnnnnnnnnnnnnnnnnnnnnnnnnnnnnnnnnnnnnnnnnnnnnnnnnnnnnnnnnnnnnnnnnnnnnnnnnnnnnnnnnnnnnnnnnnnnnnnnnnnnnnnnnnnnnnnnnnnnnnnnnnnnnnnnnnnnnnnnnnnnnnnnnnnnnnnnnnnnnnnnnnnnnnnnnnnnnnnnnnnnnnnnnnnnnnnnnnnnnnnnnnnnnnnnnnnnnnnnnnnnnnnnnnnnnnnnnnnnnnnnnnnnnnnnnnnnnnnnnnnnnnnnnnnnnnnnnnnnnnnnnnnnnnnnnnnnnnnnnnnnnnnnnnnnnnnnnnnnnnnnnnnnnnnnnnnnnnnnnnnnnnnnnnnnnnnnnnnnnnnnnnnnnnnnnnnnnnnnnnnnnnnnnnnnnnnnnnnnnnnnnnnnnnnnnnnnnnnnnnnnnnnnnnnnnnnnngccaccgcgcgcgccgcagtcgccctgccgggagccgctttcagcgcccccgcaatcagcgccgcgccgaataaaaccgcagccgcgccgccgccgagcgcccgcccgaccactatcttcccgaacgcccccatgtccgacgcgggtatgtgcaggtatgaccggaacatcgccgccctctcgaatgccccctcgaatattttccatccgaatatgtccagccccatcgggtagaacgggctgcctgtcaatgaaaggttgcgcgcgtaccagaatatgcctgcggctgctgcggcggcgaaaaatgcgtccgctctggacagaacttttttccatgactcgccgcgcgcgcgcgccgccaccagcggaaccagtagcgccagcatcaccgccccgaaatacttcgagccgacagccagccccgccgctagacctgccatcagcatgtcgcctttcgcgcgcccgccgtccgaccgcgggatcaaaaacgcgactgcggccaagaaaaatgccgtaaaataaaggtctattccgaattgaagggtttgcgcaagaacaattgggactgcggaacccgccgccgccgccgtcgccgcgctcttcggcggcatccccgcccgcagccctattacgtgcgccgcaagcgccgcagtcagcagtcccgccgactccatcagcccgcacagcaggtcgtcgttcagaggcagcatcagccacagatacatcagttcgccgttccccggatagtaggtcgtcgcctgttccgggcttagcgtctgaacgaaaactatctttcccgcgtgcagccactccgccggaaataccagatggtccagaaaagcgtccgtgggggcaggcggcatggtcagcgcaaacgagcacatcatcaagaaaaggacggcggatatgattttcactgcggccatcgccgcgcccgccatcgcgtccggctccgaatgcggcgcttcgccaaaagaaagaacgtcaggggagtaaaccgcccgcgaagatttcgccttgacgcgcgccgccgcgacaacaaccgccagaatcacgatctgcgccgcgaacgcgttcgggtacttaatcgcgcccgccatagacaacaggagcagggtaaaagcgaccgtggagacaaaaacgacgcaggcggcaagcaaccgctcaggcccgcgtcgattccccgtcagcaaccccgacgccacccacgccgccgccgctgctggcagattcagcgcgaacagcctcgcgatgtcgctcagattttccattgttgaattataccaattatttcatccgaacaaacggttttttatatgacattgaacataaactgcggaattccgctatatttcgcttgctggcaaatatgcgcctctgaatctcttcatatctccctttttctttgtttattattccggcggcgctgttaattatttcgcggtttcgtgtaaaccctgaggaatttcggtaatatagtaatgagggacaaaataccggataacatgcggcaagggagttttccctcggaacggaggcggaggctatgaaaaagattgtggcggcggcgatgatagcggcggcgatgatagcggcgtcaacggtcgcgacctttgcggctgaaacatacaacttcggcgtttacatggggccggacgagcgggaccagcagcttaaaaccgttctcggcgcggtggtcaaatacgtcgccgacatcgagaaggtcgatatgcaactcaaatggtacgacgacgaaaaggccttcaccgacgacgccgcgaaaggcgttctcgatttcgcgttcacaaaaaataccgatccgttttttcttctggccactaaactcggctatgagccgatacttggcgtgtcgcttttcgacaagaaaaccgcccggatgtgcctctactcaagctcggacacgaaaatcacgggcatcgacaaaatgaaagacctgcgtctagccacctacaaggaacacgacggctactatccgctccgcaagatgttcggagacaaaattctcgatgggcttttcaaggaagtgaaattgaacagcaacggcatggcctcgctcgacatgcttgcaaaaaaagaggttgacctcgcccttgtgcacgagatgaacgtcttttccctcaagctgttcaaccccgccatgataagcaaactgaacgagcttgtttgctcggaagcgacagttcagccggggataatgaaacacaagaacgcccctaccctgctagtcaacaggctgtccagcgtgatggaaagcgcccacaagtccgaaaccctgaaaccctacagaagccttatgaaaacaacaaaaatacgctttttccccgttaccataaaagacttcgacccgctcatcaagctatacaccgacgcggcaaaaagcggctgggataaagactacaataaatggctggccgccgctaaaaaatagttcgccgatataaacgacttattatttgaaattactcatgaattgttgctgttttcgctcacgcacaaaaaaaacattttgtgcatggcacacaaacgagtgggtaaaatcaattaagaactggcataaacgcgttaaatgaaactgccgtattcatgcttgaacccggctttatttatagacccctgagaaccgggccatttttatagcggcacactgcttctcacgcacaaacgagcttgtgagcgccgcccatgtttgtttttctgtaggggcgcggtttccgcgccctatcatggcgttgttccgggcggggcaaccccgcctctactttgaataacgcgccttgcggtccgcatttcttccgctttgaacattcgctcccgaatcctaatgatggatccgggtttaaatgaaaactccaaatctgcacatggtattatttgtagcgcacataaataatcaaggaaagaagcgggattttcaattagtattccgacacagtcgccgaatttgcctttcattcccagagcggcgaaaagcgggcacaggcatcgctggggcgcgcgctgccagtccccgattttagcgtgtaaatgtttgccgggcgggtggaacatagcctgctttcgctcgcaggacataacaattccaacaagaacaatcccaccccctgccgacattccttttttactgtccgattaaatatttttcaaagacggcaatttgacgcgcaataatgtcacaggcaacgagtagaatgcatgacaaggttgtcgcattctaattgattgacaaaaagggactatgtatctgatataataaggcggctatatcacataacaggaggcaacgctatgtttaatttagtagatgaggaatggattcccgttctatggaacaacggacaagtaagcgccatcggcattaaggaagcgttcacgcgagccggaagcatacgccagatagccgcgagcaaccctatggaccgtttcgccatcatgagatttctattggccgtgctttattggtgcaaaggcaacccgacagaaggtgaaacaaaattgaaaggagattcatttcctgccgaatggtttgaaaaacttgaagcggaaaaagactgtttcaatctgctgggagaaggaaaaagattttttcaaaatcaatcagcgaataggaagaaatcaacaacggaattgctccaagaaatacctaccggcaacaattttcgacatttccgccattcgacagataatatcaacggattgtgcaaggcatgttgcgcaatggggctattgaggctccctctgttttccgtgtccggtctgcccgacctaaaagcaggcattaacgggactccgccaatctatatatttgccatcgggcctaatcttaaggaaaccctcgtttcaaattggatgcatgttgatagtataggcaatccctcatgggtcgcgccgtcgattactaataattctagctcttgcgcgcctttgcttgacggattgacgaccttatcaagaaaggtctttctgcacaatcccgatgacgaaatgtcagactgtataggatgtggcaaacgggactttttgataacaacatgtgaattccagagcgccggagaacttcgaaacgaattatgggatgatcctcatgttttgtacacagacaaagaacctcgcaaatcattaaaagctccggatcccacatcgactgggagattcagaatggatagaccgtggccggaaacggcatctcgaatatcccaatcaaacagattcattggcgcaaatacggacaatatgattctcgtgataggtttctccacagacaaagcgaaaaatatagatgtctgggaacgaacgataagaataccgtcaaaacctgcaagcacagatacggcggccacgcttatcgaattatggaaaaaagaaagttggctgatagaaaaacagcggatcggttcgagatctgataaagaaaattcatcaatggccgcaacgatacgtcctcatgttgagcatgtggtttcgtcgcgacttgacgaattgctaaccggcgaccctgccgcatgggacgacgcctcgcgcgagtaccgaccattaatgagcgcggttgccggagctttatccccggggtttacttcttcggctctcgaaagacgcagacaaatatcccgcgtcatccccgatatgcgtgaaaaaaaatccgccggaaaatcccgcgtgaagaaaggaggaaaaaaagatgagtgaaacgcagcgctttatcgacacgctgacgaaccttaaatccggcgagttaagcctgttgcgcgctcactcaggacaaaaacttgacgagtccgtccccgcatttgatttgttcacaggaatatggtggccgttaagacaacggagtcaacgcgcgccgcgccgcgaagtggcgtggctgatagcgaaactctacgcttttcgtcccgccgtttccaacgaacaaggaaagactctcgcgtctcaacttgggagttctatgccgcgcaatcagacttccgacgagtcaaaccgccttaggcaggctttcgacaacctgcttcttgcatcccttagcgacattgagccgagtttacaatgggctttagacagaatcgagtcaaaaaaactcaatctcgattgggttaagctgaccgacgatctttccatctgggaacgcgagtcaacccgcctgagatgggcggaagaatttctaaaccgaaaaggagaataacatgctaatcgaaatccacatgatacagaaccacagtccggccaacttgaacagagacgaccttggcgcgccgaaaacctgctatttcggcggagtcatccgctcgcgcatttccagccaatgcgtcaaacgaagcataaggatgagcgaggagttcaaatctctatgcggcggcgtccgcacaagacagttggcaaaactgatttcagaaagaatccaaggcaaggcagacgccaaaaagagagctgtcgcaatactcaaaaagtgcggcatcgctcctaaagacgaagaaaaaagcgatatgttggtctacaccacaaaagaagcgatctcgaaaatggcagacctgctggaaaacagttccggcaagtccgacgatgagcttgcatcggaattcggggggcttatttctgaattgaccgctgttcccgacatggccttgaatggaagaatgcttgaaaccggtgttcttaaagacacaacagtcgaggccgcgcttcaagtcgctcacgccatatcaacgcacgaagcccgtccggaagttgattattacgttgccgcagacgacattccgggagccgacgcgggcgccgggtatgttgatgaagctttgttctcgtccgcatgcttttacaaatatttctcaattgattttgaggctttagttaaaaacttgaaaggcaacaaagaactcgccgcacacaccgtaggagctttcatccgcgccgcggcgacagtcaatcccacaggaaaacaaaacagcttcgccgcgcataatcctccagacggcattttgattgaactcaaaaaatcgcccgttagttatgccaatgcattcgcaaggccggtctctatcagcggagggcgcgacatcgtttctcagagcgtcgctcaactcggacaatacatcctcgatctggacgccggctacggtaaaccggaaaaccgattctggttctctccgaacctgcggttcccgttgcagacgatagaggagaataaagaaatcgatctctcagataacaacgtcaaatcacttgacgaactgatccccgccatcgtctccgctatcggatatgactggagcaaagtaaaagaggttgttcttaattcagaggtggcatgatgggcgaaaacacgatgtttctccgtctagaagggccattgcaagcgtggggcggacatgagtccaagtttgtcgtccgcagaacctgcgaagcccccacgaagtccggcgtttccgggattatttgcgccgcgcttggcgttccgcgagcagaagcatcctcattctggttgccgaagcttcgctctttgcttatgggcgtcagaattgacagggccggaatccgctggtgggactaccacactgtgggcgcagaaatgcagatgagcattgcggaagccgagggcaagacaaagaaaggcgcgctgctcacgcgtcgagaatatctttgcgacgcttcttttttagtcgctttgcagggagattcagcagtgatcgatcagatcgaaaccgccgtaataaatccgaaatggacgctctatctgggaaggaagaactgcgttccatcgcggccattgagcgagcgccctccggaatcgcatcctgatctgatctcggcgttgtcatctgttccttggcgcagaaggaacaaggaagatgaagcgccgcagtcaatcgactgcctgattgactggacgcccacgcaagaacagccggaagcgccggatgacgcgttagtgtggcacgatgtccccatactgttcgagccgccatcccatcagcctcggtttgtgatgctgaaaaacctctcagttggaacagaaggagatgtcaggatagcggaagacgcggcgcaaagcagagttcccgatccgccacgttcccgcgcggactattcaaactccgcatacaagaacgcgcgggccgagcggctgaactccgaccacggactttgcgttttctgcaaatctcccgcgacaacagttcagcatgtgacatatcgccgcgctggcggcaatgaatctcaagaagatttgcgctctctttgccgactctgtcacgacgcagtcaccatgatagagtacggacacggaatggggcttgaccggataaaccccgaacaccctcaatggcgcgatgaaattatcaagaaacgagaagaagtagtccgataccggtctctcgaaacccgacggagacgcctgagcgcagaggaggtggaataatcgtcatgtttctttcttgccttttaatcaacaccggcgacaaccccgaccgaccgcgtccgggaagaatatggttgcgcaatctttacagagtccatcagcgcttgtgcatggcgttcccttcgtcttccgcatcgttagccgacccggattttcttttgccattcaagcctgacggcttcgcaaaaggccatgtgcatgtccctcgcaaacctgataccggttttctgttccgcgtcgaccctcttgcgggaaacggagccgcaatcatcgttcagtccgcatcaatgcccgattggcaatatgcgttccacaacgccgggtttcttctctccgccgaaccgcaagtaaaagccttcgagcctgtcttttcccttgatatgcaataccggttcaggctccttgcaaacccgactcgaaaaatctgcaccaagaccggcgaagacggcaaaagacgcaacggaaagcgtgtcccggtggcctcagataaacttgaagaatggctacattcgcgagccgaacgcgcgggtttttccgtcgttaaaaactctctgtccttaactccgtcttatgtctatgtgagcgcgcggaacgaaaaccttaaagggcaaaagcttcgttccgtccggtacgacggcgttattacaataacggacgcggatctattcaaagaggcagtgacaaacggcatcggcggcggcaaaggcttcggtttcggccttgtcagcctcgcccggatatgaccgccatgagggacttgcgtgaactgccgaaattcgaaaatagatggagccatcttttcctcgaacacggaaggctggacgaaaaggccggagccttgctatttcacgggaccgacgggtctatcgagattccgattaaccagctaggactgcttttgctaggccccggcacgaccgtcactcaatcggcaatgcgttttcttgccgacaacaacacgcttgtgtgctggacaggcgaacaaggcgtccgtctttacgcgcacagcacgggaggctctcactcctcaagacgcttgcttcgacaagcggggctttacgtcaacatggattcgcgcatcgccgtcattcgccggatgtacaacatgcgctttccggaaaaacttcccgactccgtttctctcgacaccgtaagaggaatggaagggcacagagtcagggaggcataccgcaagctcgcggaagagaacggcgtgatgtggcgcggcagaatatacaatccgcagaactgggatcaggccgacccgctcaaccgggcgctctcatccgctttcgcctgcctttacggcttgtgccacgctgcaatactttcggcgggatattctcctgccatcggattcattcataccggcaagatgctttccttcgtctatgacgtcgccgacctgtacaagatggaaatagcagttccgctcgcgtttcaaacttgctctgaaagcgatgtcgatgtcgagcgcaatgtaagattggcttgtcgggacgtttttcataaaacaaagctgatgaaacgcgtcttgccggatatcgcggaggtattagatgctggtgatgatattggagaaatccccggcgagcttgaggggagacttgtcacgctggatgatagagccgcgaccgggactctaccttggcaatccgagcgcgaggattagagatattctgtggaacaaagccgtcaagaaaatacgcgacggcggcgtcactcagatatggagcgacacccgctctccgcaaggatatctttaccgctcctgtgggaaaccggcccggccaatgatcgatgtcgatggacttgcccttgttctttctccttacaaaactgaaaggactgacgagactttgatcaatcaaaataataaggagtcttcacaagatgattgatttgacaatactactaaaagtgttttaaaaaaaccggcatacaatatgctggtgtcttccccacgcgtgtgggggtgaaccgccgactgagaacgacggcgaccgaggcgcgccgtcttccccacgcgtgtgggggtgaaccgggggcgatatgaaatccactaaacaggccacagtcttccccacgcgtgtgggggtgaaccgtttgtcaactggaaccagatgtacagctataagtcttccccacgcgtgtgggggtgaaccgtcttcatgctttgatcctttcggtatgtttgtgtcttccccacgcgtgtgggggtgaaccgatactcgaatacccgaatcctgtatctgcgccggtcttccccacgcgtgtgggggtgaaccgtgtttcccatgttgtctataaaattgagagccgtcttccccacgcgtgtgggggtgaaccgggggtgaaatgatgagcgttttttcgcagaaagtcttccccacgcgtgtgggggtgaaccgacgaagctatgcagttgcctaaaatcctgaacgtcttccccacgcgtgtgggggtgaaccggtaaatgccccacgtgcggcgaaccgatgtacgtcttccccacgcgtgtgggggtgaaccgtaaactctaatccgtcgccgctatctgtggcagtcttccccacgcgtgtgggggtgaaccgccatcgttgtcttccaccaggccgcttacgtagtcttccccacgcgtgtgggggtgaaccgcgggtggcgacgcttacggcttcttctttagcgtcttccccacgcgtgtgggggtgaaccgcagcctttgacagatggaatgcccgccgttgggtcttccccacgcgtgtgggggtgaaccgagaagcccatgacacaaacccaactattgatagtcttccccacgcgtgtgggggtgaaccgatggaagaaacaacatctcaaaaacttgcaaagtcttccccacgcgtgtgggggtgaaccgcgggggtcggctgacggggtcggggatggcagtcttccccacgcgtgtgggggtgaaccgcggcgagcagtttgagttgcgaccgccgacgcgtcttccccacgcgtgtgggggtgaaccggagggcgattgaaatggcagaaagcaccgcaggtcttccccacgcgtgtgggggtgaaccgcccggaagctaacaaaggaaatcaacaaacaagtcttccccacgcgtgtgggggtgaaccgccgttgaagataaattgttcccatatgtctgcgtcttccccacgcgtgtgggggtgaaccgtggatcagcacttgattgaccgtgagcggatcgtcttccccacgcgtgtgggggtgaaccgaatcctagagatcatgccgtcgccgccaatatgtcttccccacgcgtgtgggggtgaaccggcttgagcgtggtcgagggcgcgattgccgctgtcttccccacgcgtgtgggggtgaaccggctaatagaattaatagaattaacgtccggaatttcggcgtccggaacaaaattgccgttattctgttttattattgattgtgaaacaaatccatcacggcgaggtttgagatattgtgaacgattccaaagacctgtttgaaaaagttaaacatctattgctcggccagtactttgctgttctttcatcggtacagagggacggcagtccgtattcaaacataatcggttttgcggctacggacgatctcaaacatcttgtttttgcgacgccccgaaacacgaggaaattcgacaatctgctcggagagccgcgcgtttcgcttctggttgacaacaggagcaacagcaaaggcgacgttcatgacgccgcagccgtaaccattctcggagcggtcagggaaatcgaccgcgtcaatgatagcatttactttgagctatacgcggaaaggcatcctcatttagtggatttcttaagggcggacgataccgccgtcatagcggtgagcgttaatgagtactgctatgttagcaagttccagagcgttatgacgttgagcatgaaataaggagacaggccgcaatgaaaatatggaagtttatgaaaagaatcgggacgaccgcggcgacgctggcggcgcttgactccgtctggctgggcgtcattatgagcgactattataaagaacatctcggagaactggccagaagaaacgacgccgggctgacccccgactggaccgccgtgatattggtttacgttgcgctgacggcaggcctgaacatattcgcggtggatacggagtccggcagcgggcgcataaagaattctctcgtcaggggcgcgttattcggattaatcagttatggcatttacgaccttacgaacatggccacgctcaaggggtggtcttgggaaatgacggtggcggacatgctttgggggacattcctgtgttccgtggcaagcgccgcgacggccgccgccgccgcaaagtgagcgtcaaatgaaactgaaccaaatcgttatcatcggagtcgttctcctgttgtcgttcgccggggggcagttcacgtcgtccggcatggactggtaccggactatacaactgccgacatggacaccgccgggttccgtcataggcatagtgtggacgacgatatacatactgacggcggtatcggcgattatagcttggagagttttcgctggggattcccgattctatcttgtggccggactgttcatgatgaacgcggcgttcaacctcgcatggagctacattttttttgcccggcgcatgataggcccggcggttatagattcgatggcgattgaaatcacgctgcttgcgctcattccggttctgtggaagaaatcgcgcgcggcgtcggttctactcctgccatacgcgctgtgggtcgggttcgcgacatatctcaattactgcatctacgcgttgaacaagacgtgaaacaggagacgcccgcaagatgaaaacgatgtttgcgcggataacttgtctgagcctgattatcgccgcttcctccgttatttcggttgcgctcgcttcggattcaggatatgtcgcaacgggcgcaaaggcgaagaatttcaaactgaacgaccagcacatgcagttggtggaactggacaagctgcgcggatcgacggttgtcataatctacaccggcagaaacggattcgacgacgcggctgaaatcatcaagaaactcgacaagaaacatagcgggcgggaagacgggaaaaaagccggcaaggatatccgcatagtcggcgcggcgaacttaaagggcgttcccgctttcgtgaagaagatggtgaaaaaccgcatgaaagagccgcgttatccttcgttcctcatggactggaaaggcgagatagcggcaacctacggttatgatgaaaaagggattgccgcgttcgtagtggatggaaaaggcatagtgcggttttcaggcaatatcaaaaacgccgacgatgacatctctaaagtatccgcagctatcgactcgatatagaatccacccctgagttcatagtagaaacaacggcggagcggcgaaaagcaggcacaggcatcgctgaggcgcgcgctgccagtcccctttttcgctcagagttcacagtagaaacatcgaatgtttattgaacacaaacagacattacgcaaacgataatcaatccccccgccggcattcctctttttgtgccttcattctttatcttttgtttcttaattcattctttcttgccgtcattccttttctcttgtgccgtcattcccgcgaaagcgggaatccattttcacccgcccggatgctatttcgcctatcagcgacattgtaaactgtcaaaagcctcggccttaccatagatgctcccgtttttaaaattgctaatttcaaacctgaccacttcttcttcgcttcttctcgcatttgctatttgtgttgagtcaggcagtcaacagctttgggattgtttgttctgcgcaatactttgattatgtattcctgtatttcttggttgtctgcttcgtcaagaagtttgcacaagagcataattgcagcgtcttttccatattcgccaaggtttcgtatacaagagttctgaaaatcgctgtggtctctgtgaatagattcattgctgggggggttcggcatttttcctctggacaaatctattctttctctgtcacgagtaatatcgttaaagtaactctgtttttcttctccactcgcgatcctttccatcacaaacaatgctttgtcctcataaccccatcttagaagacacccggcagctacgcctctaactctaatgtcattgtcatttatggcgtttgatatcacagcttgagatttgacatccaacctacataattcattggtagcattcattcgcaattctggacttatgtcagatttaattatgtcttcaagcaaggggacgatacgtgggtctcgagaatttgctatgtctactaaaacaagtcccttcgcaaactcggaagtaagatgatttttgtattgatatatttttagcggtagttcacagcaaaacgttcttctatcgtattcatatatcaaccgctgatgctttttttgctcttcttcatccatatcatcgaagtctttccggggatcaatatatgatggtttccgcgaagaccaaacagggcaccactcgtcagctctgaaagaatcagatggattatccagaaacttatttaaaacttcctctcccatctttatctcttcatccggacacgctttcaaacccgtgaaatcatctgcggatgcgctgacaaaagcaatcaatgtccacaccaagcagcacagtatcatcagcaaaaccgcatatggtggagtcaggcggagcctgtttacagaattagagttgatctggttggctgatcttgattttgtataagcacggctgttgtagggatagttgttcggtcgcggatgtgtggtctgtcgcagcttcatggcggttatgttgccattatgaacgaaggagaacgatttggcaacggggggtgggaggttgtgtgttgtggagggcggatggggtggcttaaggagtgggatgctaggaataaattcccggaaaggcaaagcggcaatgaattgccgcactccaaagttccacattaattttggctgatccttaggcataggcagaaacgagtttggggggcgcgcccggagggacaagagcgaagcaggtgtgggcgctaaagctcaaggatgtcggggcgggacaggcgggcgccttggaaatcaacttcgagttcgggccattcgcctgtgcgggtgatgaattcggcgcggtcggcaaacgcgattatggtgtcttctgatttcgtgcctgtaatggaggggttccatgcgaaagcgcaattgggtttgacctcgccgggggtgtcggggctggcgcagaagtatcttgacttgtagccgcacgggccgccctgatggtgaaggagccattcgtggtcgaagccttcgctggagtaaacggcggtggcgtcgcggaaaacggaggaaatcttcgcgccgggtcgggtgagcaagttgaaagccgcatcgacgcggcagcaggcggcgtgtctgcggcggaggtcgtccccggcggggccgaagctgaccatccgagtggcggaagccacaagcccgccccttctggcgcagaggacaagcattgcggctcgctcaaggggctgccgcgtcggcagaggatgcctgtatgccgggagcctgcctccggaagctacgaggacgacgatcggctgcgcgtcccgcgtccagcactcggaggcgagcgcggcggcggcggcgttctcggtcatgcccggacgcaaagccctcgcggcggactcgagcgcggccccggcgtccgctccgagcgccctgaacctgtccatctcgctttccgtcaactccatcatcaggtcggagaaatcctcgcccgccgggacgaagccggaggccggcatgtccgccgccgccacgcccgcccccgcgcacatccgcgctatcttcgcgttcctgtcgtcggcccatggaatctcgacaagctccacgtccagcccgacgagttcctcgtctctgattcttgcggactcgattcggttggtcacgaccgcgcatcggtctggaagcagaacaaaggaggcgacgcccgcttcggcggccatgttcacgtggcaactggctccgcaagcggcccacgcaaagttgtccgaccgcgatagcgccagcgcgccccagccccgctctttcattctctcccgcatcctgtctatctttatgccgaattcttccgctctggtcattgttccggccctcaggttattgtttgtcgcgacgccgccgcgattcggatattatatcagttcttaatcggttttgccgattgagagcgcccgcaacggagttgtggacgccacccgtgatgacagggttgcggatagcgagcgcgctgatagctaattttatttaatcgctgatataatgattcgaggcggttgcggtggggacgccgcgaaacttgcgcggattcgcgtattgaaccggagaatgcggggcgcgaacgccgaggagcgaagtatgttaataggaattatatccgacactcacgacaaccttgaccggttaagagcggcgatatcgacgctgaaatcccgcggcgccgcgcggcttatccactgcggcgacatcgtttccccgttcgttgtgaaagctatcgcggaagccgggttcgaggagtgtttcggagtgttcggaaacaacgacggagaattgatttatctttccgaaacatttaagaagatagggcggatagagaagccgccggctttcatagagatgggcggagcgcgttttgccgtgcttcacgagcctatgccggacgacgcgatggcggcgctgccggtggacgccgtgctgttcgggcacacgcatcagcctgttctcaaggacggcaaacccgtgatagtgaatcccggagagtgttgcggatggctgacaggcaaatcgactatcgccgtttttgacacggcggggatgaaggcagagctaatcgagctgtaggcgcgaaagccgcgaggaggccgcaagccttcggaggaaacagatgaaagttaaaatggcgataatagcggcggttctggcggcggcggtctgcgctccggcgtcggcggttcttccggacgcgcgcgggccaaacgcctctgtagcaggcgaaaactccgcgacgatgaaagaaattttcaggataaaggtggagaacgcggcgggcggagcggtggaagtgagcgaagacggaggcgcttcgtggacggccgccggaaaagtcctgctggccgccgggacgataaatccgcgagcgtacaccgccagcggctgggcgtcttcgggggctgtcgctgcgaccgccgtaaacgccattcacataaaagtgcggcagaacgaagacagaggcgcggtgttcagcatcctgcccaaagatttcttctctccgccggcggattataaatctttctattcccggaacagttcaataataacgaatatcccggctggagggagcattttcggaggagccgaatcgccgttcataggctcgcgggttctcgcggcccgcgccggttccgctcactccccaatcgccgaggattatacgccgtcagaaggcgattccctgctgataatcgtcgaacagccggagaaatatccatcggaaatcgtcttcgaaaacaggttcggagggttcatccttataaagtatcccggagaggaaccgaaactcatcgggcaggtgttgaaaccggtggcgggggttggaaggttcgaaggctcgctgtacacggacgtcgggagaatcagggcgaaccacacgggagtcatctgcgtctcgacgtcgccggtgggagagataggcggttttcagataatccctgaaaaccacgcgatgagcgcggagatggagaacgcgaggctgctgacgcagtggatggtggtcgggccgccgggggcggcggacccgtcgctcgaaggggtggctccgctgttcaggcatttcatcaggccggtacatttcaaaagcgggccgcagggaaaaacgcttgaacaggctttgggggcgttcatagttcaggcgcggatcggcggcggggagtggacgcggatgccgtcggtgtccgggcgggacgacaaagctctgaaagacgtcacgcacatacgcatgctgttcccggtcgaatggaaacattagccgggctatcgcctatgcggggcggccgggctttgcgggttgcgggcgcggggtatacaccggggcgcaaatgcgtataattgagactaggcaaggaaagcgggacgattaaggatgtcggaattaagacgcgaccccgtgttgggtcgatgggtgataatatcctccgagcgcggcgacaggccgagcgatttcatcgcagcgaaacctcttccgaaaacgggcttctgcccgttctgtccggggaacgaagacaagacgccgcctgagatagacgcggtgcgggactcgtgcacggagccgaacaagcccggctggcgcgtgcgcgtggtgtcgaacaagtatcccgcgctctcaatcgagggcgacctcaacaagcgggcgcgcggcatctacgacatcatgaacggcatcggcgcgcacgaggtcttcatcgagacgcccgaccacgacaaaaccatatccaccctagaaccgcaaaacatggaacagctaatgtggatgtacagggaaaggatgatagacctcgagaacgacgaacggttcaaatacatactgatattccggaacgcgggtcagtccgccggggcgtcgctggctcatcctcactcccagctcatcgccacgcctaccgtccccaagagaataaccgaggagcttaacggcgctcaggaatacttcgacttcaaagaccgctgcgtcttctgcgacatgatagacgaagagagggactaccagagaagggtcatcagcgagaacgaccgatttattagtttcgcgccgttcgcgtcccggttcccgttcgagatgtggcttgtgccgaaacatcacgaccccaatttcgcggacttggaagactccgacatcgcgtctctggcgcagtgttttcagaagtcgctcaaatatctggacaaggcgctggacttcccgccgtacaactacatcatccacaccatccccgtgaacaccagccgacagtacacgtaccactggcacatagagataatcccgcgcctgaccaacatagcgggattcgagtggggcaccgggttctacatcaatccggttccgcccgaacaggcggtggagattctgcgctcggcgaacggagacacgcaatgagcgggggcgaactgagccacatagacgaaaaaggccgagcgtcgatggtggacgtgtcggaaaaggaacgtaccgcgcggcgcgcaaccgtccggggcgaagtgcggctcaggcccgacgtgatagacaaaatactgtccggcggaatctccaagggagacgtgttccaagtcgcccgcgtcgccgccgtgtgcgccgcgaaaaaaacatccgaccttatccccctgtgccatcctctcagcctgacgaaagtttccgtcgagttcagcgccgacagagacgctggaataatcgttatcgacgcggaagccaaagcgatggacagaacgggggtggagatggaagcgctaaccgccgcgaccgtggccgccctcactatctacgacatgtgcaaagccgtccagaaagacatctccatcggccctttccgccttatggaaaaagaaggcggcaagagcggcccttataaaaacgaagcttgaacccgaacttgaagaaaaatatttgccggaagaaatcagattaaaaaactgtcgatggttgaccgcgtccggaggcgttcagaatgaaggcaaaaacaatcgcgttggctatagttgcggcggcgtttatggcgggcagtccccgcgcgctcgcggacggaggctccccctcccccgcttcgctgagggttctcaccgcaaacgtcggcaacgcggacatactgaactgcggcccgaaatatttttacaaactgtgtctcgtggaatgggagaagaaggtcgcggaagggatagccaagctgtcgcccgacatagtgtcgctgcaggaagttctggacgttcagtggtgcgaggcggcggccgtggagaaaaacaagaagaatgtgtgcttccggtttgaggacaggaaagagaggcatcaggttcgcaggctgttgggagatgattatacgatagtgtgcgacgggcgcgccaactacgagtgcataggagtgaaaaaaagcgtcgggacgattgaaggttgcgggcgcggagaactgtgccgcgctccgggctggccgctgacaatcgaaacgccggaaggatgctcgacaaagacggtcgtgttcggggcggacgcggagattaatgggaaacggctgaggatagtcaacgggcatccgtcggcggcggacgccggatgccgcgccgaagagttgagaaggttgttcgagggatacgaagggttcccggcgcttgcggccacggacagtcctgcgattatcatgggcgacatgaatatggacccgtttcaatgggacgccgcaaaagacgacgtggcggtttggctgaagcatgttggggatggcaagaaatattactatctgagcggtcctgcggaaaacgacccgccgttcaggacatgctccgggttcacgctggaccacgtgataacgaacgcggcgcgcggctcttgcgtcacgctggggcagtcgcccgggacggaacggctggacgggcatccgaagggggctccgattcaggaagcgcccgaccatttcgctattctttgcgaaatatccctgcctgacggggattgacggcgcggcggcaatcggtttggagcgggatagacgccgttctagggccgatttaaataaagttgcaaaaatatatctcaataacaataataatgcctgttggcggagtgtcgcggaacgaactgcgacgcgcccgtcaaaattcatcaggggagtgccgcgatggataaggaaaaagaaaaagaattagtaaagtcgtatctttaccttaacgccgtccttcctcagcttgaggagataatcgcgtatgacgcggaggcgcgcgagctgacgaaaggctggaactgcacgatccagatgcacgtgcccggcggggcgggagtcaggttcgtcttcaaagacggcaaatgcgaggcgaaactgggcgctgtgagcatgcccacaatctcgctgaggattccgacgccggaagccgccaacaaaatgatagagaacaccggcacggtcattcccatgatatggggcttctggaacatcgggaaactcggaaagttcatgaagctgacgaaactcatggagaagtatctgagaccgtcggaagaagatctcaaaaacaaggacttcttcgagttccatacgcgcgtgaaactcatgatggccgtctatggcatgaaggccgtcggagagcacgacacgtatgtaaaaggaatagtgtcgaaagtgccgaacgggccgatggagataaaggtgctgccggacgggccggtggcgcatatcgtgctggacaacggaaagttcgctgtggccaaagggccggcggcgaacccgatggtcgtcatggaaattaaagacatcaagctggcgtacgatatgctgaacgccaatgtagagttcatggaagagctgggcctgtgccgcataaggctgcgcgggcacgtcggaatggctgaaagcctcgcggtcgttatggagcgcatcggcctgtatatcagttgacgccggacgactatacccaactggagggcttgaaaatggaaacttacaaatttgataaatcatacgagtggttcgagcgggcatgcaaagtcattccgggcggagtgatagggcacaaacaccccgcgttcaccgtccccggctcgtatccgtatttcgcgactcgcggcgagggaagccactactgggacccggacggaaacgagtacatcgactggatgtgcggtttcgggccgatggtgctgggatacaacaacccggtggtggacgcggcggcgcaggaacaggcaaaactgggcgacggcatgagccatccggggccgatcagcatcgagtacgccgagatgatggttaaactcaccaagggcatggactggtgcgtgtacggaaagaacggcgcggacatcaccacatggtgcatgaggctggcgcgcgaatacacggggagaaagaaaatcctgatcgcgcgcggcgcgtatcacggcgctcaggcatggtccaccccaagctacggcggcatcatcgacgaggatcgcacgcacgttcacttcttcgaatggaacaacctagactccttcatggaactgatcaacacatacaaagggcaggtcgcgggcgtgatgatgacgccgtaccaccactgcatatacgcggaccagcagatgcccgctcccggctggtgggaagccatcggcaaagtctgcaaacaggaagaattgattctgatatcggacgacgtgcgcgccgggttcaggctcgacatggctggcagccacgcctacttcggatacgagccggatctggtctgctactccaaagccatagccaacacctacccgatctccgccggtctgggaacgaacaaactgaaagagaccgccgaacacgttctgttcacgggaacgttcttcagcagcatggttccgatggcggcgtccatcgccaccgtgaaagagatgcagaggctggacggagtaaactacatgatgaaaatcggcaaggcgctctgcgacggccttgtcagcgtaggcaaatcccacgggtttgagattatcatgtccggaccgtacgacataccgttcatgcggttcgcgcgcgagaagaacttcatgctcaaacagctcttcagcggcgaggccgccatccggggcgtcatcttccacccgcaccacaactggttcacctcctgcgcgcacacggaagaagacatcaagaaatcgctcgaagtggccgacatcgctttcaagaaagtcaaagacaaatacggaagcgactgaagcgcgacaaacggatagacgcagtaaatccgcctttaaaagcgcctccggcggccaaagagaaacttttgaaaaagtttctctttggaatctcttcaaaacttttcacatgagcgcggcggagcgatggcgcgaacgcgcccgctccgccgcgcgcatagaaatgttttgagggaaaacttttttaaaagttttcccttaaccgcattaaagcgcctccggcggttcaaggaaactttgaaaagtttccttgaaaatccttcaaacttttccttgcgcgtcggtacgggacgctgacgcgtcccgtaccgacgctcctgtggaaatgtttaagaagaagattcctcatgaaacccctttctcaatatcttttcgcatgatacgcgccgatgggaagagcgaagccttcccatcggcgctagcgcgaaaagttttgaaagggtttaagggaatactttttcaacgttccgtcattagtaatacgtatcatatacgaagaactaaatgaaagctcccatttactatttggtaaaaagcatcatgcgcaaaagaaatagttttgcgcatggcacaactcttagcgagtatattctgctataatattagaagtaaaacacgaaaagcttaactctgtttttcacattagaacaactgcgacaggagcgcggctgaaactttgtaagctcgccataatacgcttgttcatgtgttaacaacgattcgcgcgcgcaacgtttaatgatttggagcaaggcaatgaaagaatcaggaatactgcttgggttttatgtggaccgaaaagaagctaatgtggcgtttaggatgttgcgacgccgtcattttcgcagaaccgcgataatttcaaaaaccgcctccggcgtggttcgcaaaaacgccgcggaggatagatattggacatgcgtaggagcggtcgcaggcgtcgcgattggaataataattgcgcatctgtcttttggaacattcgaggcgatagtggcatggcgatgcgtagtcggactattgcttgcggctgccggcggggcgattgtcgcaaggctggcggtttatgtctttcagtcgagcgaggatcgcgattttacgaagaagcgatcccgatggcttgtgaatgaagaaacggccgtcatcgtgaaagctccgttggagtcgctggatcaagctttggcgcaaatgcgcgtcgccggagagacgcaaccctcgatttttgtttttcaccatgaccgggtcacagaggcggaatctggatctgacaagaatgaacacatgacagcctcgcagttggctgtgcacgcgagactgctagccggatatcatcgcgttcagtcatatatgggcgtcaagccccatcttcttgagcttgtggatgtttgtgttaaggagatagacctttgccgccgtgaactcgccggggcgtcgcgtctcgaacagcgcgtttccccttcagcggaatggattcttgacaactatcatctaatcaaagccaattacgacgatgtgcgacgcaacctgcccggaaatttttatcgagaactgcctatgctggccgctgagcaggttcagaacatgccgaggatttactgcatagcgtcggaccttgtatcgcatactgacggccaactggatcgtcacaccatattgaaccatcttaacgaatatcaagcggtcagtcctttgaagatgggcgagttgtgggcgatgccgcttatgcttcgcatcgcgcttatctcattcataagaaacctaaccaatcagatgacagtgtggctgagagagcgcgagaacgccgacttctgggccaatcgacttctggtcgccgcgcggctcgcccccgacagtcttttttttcttctgtccgaactggagcgagaacagcctgagcctagcgaccacttcgcgtttcacctcaccggacatctcttcggggagagcgaggttctcgcgcacgttaagagttggtttgagcgcaagagcggcggcgtcttggccgacagcgcgattcgcgagcaggcgcgacaggccgcgcataacgcttccatcggcagcgcgatagccagtttgcgccaactgtctcttattgattggcgggatgttttcgaagacttgtgcgtggttgagaaaaaactttgcgaggacccgtctggggtgtactgcagcatggattttgccacaaaggacagatatcgccatgcggtcgaggaactggctcgcggcggcggcgtttccgagcaagaggcggcggaggcggcggttctgatggccgacgcggaagacaagccgcttgatccccgaaaaaaccatgtcggatactatctgatcgacgagggccgtccgcgtctggcctcccaactggcaagccgggaaaccctgcggcggcgaattcttcattgggtctatcgcaaccacacggtcatatatatttcatccattctgcttccgacggtcgcggcggtcgccgccgttgcggcggtcagctctttcgcgggagggagcgcggcgctaaccgcgcttgcgtcggctctctcatctctgcctgccagccagatagccgttcaggcgatcaactaccttgtgacgcgttttttgccgcctcgccttctgccgaagatgtcgttcgaaaaggagggcatccccgacgaattccgcacgcttgtcgttgtgcctatgatgctctcaaacatcggcacggcgcgcagggagatcgaaaagctagagatacgctatctagccaatccggaaccaaatctcctgttcagcctgttcagcgacttcaccggctccgacaccgagcgcgacagcggagacgccgaactccttgcggccgccgtcgatggaatcaacgcgttgaacgaacgccacggcgcggggcgttttcttttgtttcaccgcgaacgcgtgtggacggagtcggagcagtcctttatcggatgggaacgcaagcggggaaagcttgagattctaaacaggttgctgaacggcgaagcgcttcccgacggacagcagatcgtccgcgcgggcgaccctgacttgctgaagaacgcgcgcttcgtcatcacgctcgacagcgacactcaactgctaagagacacggcgcgacgaatggtggagacaatcgcccacccgttgaaccgcccgccgttcaaccccgcggacgccgtcggctccagcccgtacactatcattcagcctcgcgtcagctcaagtcttcccagcgcgacggcgaccgccttcagccgcttgttcacagaccccatcggaaccgacccgtacacgaaagcggtttctgacgtttaccaagacctctccggcgaagggtcgtatatcggcaagggcatctacgatccgcgagcgtttcaccatgtcttgaagaaccgttttccgttgcagaggattctcagccacgacctgatagaaggggcgcatcttcgcgtcggctttgtcagcgatatagaactgctcgacgaatttcccggcgactatttttcctatgtcaaaagagagcatcgctggactagaggcgattggcagattgcggactggtgcatgccgaaagcgccctcccctgacggcaaacgcgttgcaaatccgctcagcgctctgaatcgatggaagatttttgacaaccttcgccgaagcgttgcgccggcggcgtccgtgttgtttctcgcttcgtcatggctgatatcttcgggaatgggcgctgcggcaagcttaatagttgggttatcggccttcttcccggtgttttcggagcttgtcacgcgagcgaccggcaagcgcggggcggaccccctgtcatggcgacaactagcgcacaacgcgaaacgttgctgcgcggaactgcttttcctgccgcacagggcagctatgtccatagacgcgataattcgcgtgttctaccgtcgtttcgtaagccatcgcggactgcttgaatgggcgaccgcgcaggcggttcaacagaaagcgtccgaacggcttcgcccgcttctggctcaactgtgcgccgtcagcctgttctctgttgtcttaggaatcgcgatatttctgtcgcgcccggataatctctcgatctctttgccttttcttttgctgtgggcggcttgtcctatagcagggatgcgtctgagcgcgccgcgccgcatcgcgcgcgcgcgccctatcgcccgcgaagatgaaatcatgctcagagtcacagctcggcgctcgtggcgctatttcgaagacttcgtaggcccggaaacatcttggttgcctcctgacaactttcaggtttacgccggaaacaatcttgccatgcgcacaagccccaccaacatcgggttgggcctgctcggcaatctgggcgctctcgatttcggctacctgacctgcgacgaggcgttcgagcggacggcgaagtgcatgaaaaccatagcccgactcgaaaaatacaacggacaccttctcaactggcacgacatcaagacgctcgaccctctcgaacccagatatgtgtcgactgttgacagcggaaatctgcttggcagcctgtggacgctcagcgcgggctttcaggaaatcatcgacgaacccgtcatcgggccgcaggcgttccacggccttctcgacacgctccgcgcgctgcgcgaggcgcttgagaaaagcgacagagcgagagttcataacgaggcgttgaaatttctcgaacaacaactggccgagcctccgaaacgactgtgcgaactcgcgactcggcttttatccttgacaggcgctgtcgcagagttgcgccgggccgtgtgcgaaaacgccgcgccacgcgatgaggccgcgcactgggcgaaccggactgaaacaatgcttgcgtcatggcgcacgctgatagaccgctatctcccgtggatggaagcgattgcggaagagacgaaaaccgccggcgacgagacaagaaacggcgcgattgcggactgtcttgaggctctggaaaaagcgccctccatgcgacagctctccgagggaaattttttactgtcgaagacggcggcaaatgatgaaaacaatttgaacgaaccgcgacgattggaatgcggacagcgagtcgaagacgcttttgcccgcgccaaatggatggccgccgaaatgctcgaccgggtcggcagcctgttgaactccgtcaacgagttgtcagaaagcatgaacatgcgcttcctgtacgataacgagcgacggctcttctctataggatttaatgtgagcgagcaacggcttgactcgtcgcgctacgatttattggcgagcgaggcgcggataggaagccttgtggcgatcgcgcgcggagatgtgccgggcaagcactggctggcaatggcccgtccgtacggctccgcgggggggccgccagttttgctaagttggacaggcacgatgtttgaatacctgatgcctcttctcttccagaagtcttttgaaaattcgctcttggaccacgcatgtcgggaagcggtgcgcctgcaaatcgcttatgcccgccggagaggcgctccgtggggcgtttcggaatcggcgcacagcgccgtggacgcgaatagaacatatcagtatcaggcgttcggcattccggcgctgggactgaagcgcaacttgggagaaaattttgtagtggccccttacgcatccatgctcgcgctggccgtctcgcctcttgaagccatccgcaacctcaagcgtcttgcgcgcatgggaatgtcaggcgactacgggttctatgagtctattgatttcacccgcgaacgaagccgcgaaggcgagcgcggcgtaattgtcgaagtttatatggcgcaccatcaagcgatgagttttctggctatcgacaacctcgtcaacaacagcgcgattcgacggaggtttcaccgcgacccgagagtgcgggcgagcgagccgcttttctatgagcgctctccggcggctccgcctatctaccaaggctcagaccgggagcagacttctttccatgccgcgccggacgaaatcgctccgtcaacaagcgttttcaacacgcctcattccccacaccctaaaacgcagatgctttcgaatggcaactactctctaatggtcacaagcgccggaggcggctatagccgatggcgagacttcgacatcactcgctggcgggccgacacaactagcgacaattggggtttcttctgctatatccgcgaccttaagagcaagcgggtttggagttcagctttccatccggcgggcggcgacattgagaactattcagttagcttcaagcttgatcaggcggagattcgccgctcggacgatggaattgaaacggaaactctcataatcgcggcgcctgaagacgacgtggaaattcgccgcataacactcattaacaggtcaggccgcaagagagagcttgaggcgaccacctacattgagcttgccctcgctccgcacgactctgacaggcagcacccggcgttcagcaagcttttcgcgcagactgaaacggagcctcggttcggcgctctcatagccacgcgccgcgtaaaaaatcccgacgagccgaggatatgggccgcgcatttgatttgtatgccggagcaggacgagcccgccgacgagctggagttcgaaatggatcgcaatcgcttcataggtcgcggtcgctccttgtcggaccctgcggctctcggcaataaattgtccagcgtcgcggactcgtccatggacccgattttcagcttgcggcgaaagataacgctcgaaccgggagcgcgccgcgatttctccctcattctctgcgccgctgaaactcgcgaacaggtcgttttgctcgctgaaaaatacttcgaccccaattcggcgtcccgcgaactagacatctcatggagccattcccagcttgagcttcgccacctgcgcattaacccagacgacgcgcgtcgattccagaaactcgccggctcgatgatatatcccaactcccggctccgtccatggagcgacctgctgaaacagaacaaacttgggcagtctcgcctatggccttatggaatatccggcgaccttccaatcgccgttgtagttattaaacaggacgcggacatcgacttggcgcgccaagcgctgcaggcccacagctattggcggctgcgcggcctcaaggcggacctccttatcataaacgaggaatccgcgggatatgaacagcctctgaacgaacaactgaagcggcttgtcttcagccattcgatgaacacgggcgtggacgtgcggggcggcgttttcctaaggacagcaagtcagattcccccggaagacatcaaccttatgttggcggcgtctcatgtgtcgctcgtcgccgcgcgcgggcctctggcccaacaactcagcattcccgccgagaccctcagaacgctccccccgctcgccgttaaagccatcaaggaagagccctccgcgcaactcccgttcatcgaactgccgtacttcaacggactgggcggcttcacttcagacggcagggaatacgccatcttcctcggccccgaacaacagacgcccgccccatgggtgaacgtaatcgccaacccctctttcggaactcttgtcagcgagtccggctcaggcttcacatggcgcggaaacagccagcagaacaggcttaccggatggtctaacgacccggtttgcgaccctccttcggaagtcgtttacattcgagacgaagacacgggcgcagtctggacgccgactcctctgccgattcgcgaacgcgacgcttaccgctcaagacacggcgcgggctacagcgtctttgagcacaacagccacgcgatagaacaggagcttacgatgtttgtgccggtcaacgacgacggcggggaccccgtctgcgcgcgcaggcttaagctccgcaacgactcgtcccgcgcaaggcggctgtccgtgactttctacgtggaatggacgttgggcgagcatcgagagaatatgcaggcgcatgtcgtcgccgagtatgaccgcggctcaaaaatgatattggcgcgcaatcgctaccgcgcggattacagcgaaggagtcgccttcgccgcgacaatccctgcggcgagcgcgcacacaggcgaccgcgcggaattcataggacggaacggaagcctgtccgcgcccgcggcgctcaagcgagccggattgtccggaagagctggcgccggatttgatccttgcgccgcgcttcaggtgaaaattgagcttgcgcccggcgaaagaggcgaaatcatctgtctgctcggcgaagccgacaacgcgaccgaggcggccgctctggttaataaatatcgcgacggcggctccgtcgcgaaagcgcttgagcaaaccgccgcgtggtgggacaaaacgcttggcgccgtcagcgtcaacacgccatctcattcggtaaacctgttgctcaaccgctggctcctctatcaaaccataagctgccggctgtggggcagatcgggtttctatcagtcgggaggagccttcggattcagagatcagcttcaggatgtcatgtccctgctgtacgccgctcccaagcttgctagggaacatctgcttcgcgccgcaggccggcagttcagagagggagacgttcaacactggtggcacccgcagagcggggcgggcgtcaggacgcgatgctccgacgacctgctgtggctgccgcacgcgacggcgcagtatgtgcgcatcacaggggacgcggaaatactcaaagaaaacatcagattcattgatggccggacgcttgacgaggaagaatacgaagcctttgggaatccggttgagtcgatcgagagcgccacgctgtatgaacattgccgtttggcgattgagcgcggctcgacatccggcccgcgagggcttcctctcatcgggactggagattggaacgacggcatgaatcgcgtcggaataaatggcaaaggcgaaagcgtgtggctcgcatggttccttgtggacgcgctcaaacagttcgccgcgctcacggagatggttaaagacgcgccggttgcggcggagcgataccttgagagagcgaagcgtcttgcgaaggccgtcgagaaacatgcctgggacggcgactggtataagcgcgcgtggttcgacgacggctctcccatcggctcatcgaagaatgaggaagcgatgattgattcgctgccgcagtcgtgggccgcgctgagcggcgcggctgaccctgcgcgcgccctgcgcgcgctcgaatccgccgcagagcgcctcgcgctcaaagacgagaatatggttctgctgtttacccctcctttcgacgccgggccgaaggaccccggatatatcaaggcgtatccgccgggagtcagggaaaacggcgggcaatacactcacgcggcggtgtggctcgccatggcgtttgccagaatcggcgacggaaaccgcgccgcctctatcctcaaaatgttgaacccgatagaacacgctcgcgaaccggaagcggtcgcccgttatgctgtcgaaccttatgttgtcgcggctgatgtctaccgacttcccggtagaacaggacgaggcggttggacgtggtacactggcgccgccggctggatgtaccgggcatggatagaggatgtgctgggaataaaaatcgccgccggcaaactgctctttgatccggttcttccatcagaatgggacagagcaagcgtcataatccggcatgaagaagccgtttatgaaattgaaatcgagaaccccgacggagttaaccgaggcgtcgcatgggtggagatggacggccaacgtctgaagaacacagagattcatctcgatggagaattggtcaaacaccgggtgcgcgttcggatgggggtttcaactcagtgaaaccagcgcgctttgaacatggctttgaagtgattgctaaaagaatcaaatgacgaatttgggagcgatgcgctgagcggatagttcgcgaggcgcgagcctcatttttgaaatagggacgcggtttcctcgccctgtaaaggcgatatttcggcgcccctgcttcaattattcagagagaccgaggcagagcgccgctgtgataattgcccgcgtttcgccttctctatctgcgaatccgagttcatttggccagcgtctcggagattgttttcaacaaaacttcgccgatgaatggtttctgaacaaacgcgcgcgctccgtcgttcattaatcgcatggctttccctgcgacgctgaatcctgaacacaggatgactttgacgtcattccgtatttgccgcaaagccgcaaacgtttcggctccgtccattctcggcatcatcatgtcgagaatcaccagtctgacatcggcttgattcttcttgaacaaatcgagagcctctttgcctccgttggcggcgattgaactgtatccttgctcaataagaaaatccgacatcatatctgtgaagtctttttcatcgtccacgataagtattgtttcttttttgcccttccgcaatgtttcgtccgcttccggcttgtaggccgttggcgcttccttcgcgcatggcagatacaccttcactttcgttccttcgcccggtttgctttccacctctatcagtccgttgtgcgtctcaactatgctcttggtcaccgacagccccagccccgtgcccgcgcccttgtcttttgtggtgaaaaacggctcgaatatttgttcgagcatatccgccggaatcccgccgccttcgtctcgtatgtcgataagacaatattctccgggtttaatccctctgcgagaactgcaaaattcattgtccagataaacaggagccgccccaatctctagtttgccaccctccttcatcgcgtcgcacgcgtttgcgcaaatgttgagaaaagcctgtccgagttgatttgcgtccccgcgaatcaggatatcgcattccggcgtcgttatttcgatattgttgaggacgctgacacgcaatatgtccactgtgtcaatcaggatatcgcgagccgaagcgtcgcttatttccagtttttcctttcttgcgaacgtaaggagtcggcttgttatgtttttcgcccgcattgcggacttaattatgcgtcgcatgcgagcttggttcgggtcttccggcgacatcgagcctaaaacgacttccgatgttccgataataacagcgaggatgttgttaaagtcatgagatatgccccctgcaagccggcctaccgcgtccatcttttgagactgtatcagttgttcttgcgcgcgcaaaagctcttcggtccgttcctctatgacttcttcgaggcattcccggtattgtttaagctcatgctccacgcgcttgcgctcagagatgtcgcggatgttgcactggatcgcataggcttcgctctcaagatatacgttgctgacgaactcaacgtctactgtttcgtatgtgaccgagttcgagtcgatgattcaacgccgtagatcgccctttattcgttttttcggatttttttaatgaaaaatccgggatagatggaagtcgcaagcctagttcaaagcgttctcagaataacgctcttcacgcatttgttccgacaggcgctcttttgctctgtgaattcttgatttgactgtgccggtcggaatcttcatggctgatgatatttctgaatatgtgtatccgttgaaatgaaacattgaaaacaccagcctgtacatctcaggcaacgaataataacgcctcattatctcttcatttatatggttgtgaaaaaacaccgtgtcaggcgagtccatgtgcgatattcgtcgcgcaactttcaatgccaatttgcttttgtcgtgttttctatcgtcaaaagagatttcttgctctttccttctttttactttgttgatatgcgtgttaatcatgattctgctggtccatgcccggaaattcgtgtcaggcgcaaaaccgccgtaaccttcgcaagctttgagaagcgtttcctgcagcaggtcttccgcgtcttccgcattgcttgctatctgcaaggcgcgagaccacagatatgtcttttctttatcaataagtttttccacgtcttcgcggaatgcttccgtcatagtcgctctcctgttcatgccggaaacgctttttaggcgcgggcctcgacatcgttttcatgcgcaaagactcagaatgtattctgcccgtcgcgttgcgcgccattgctcaacattaggctgagatcgcttttattttgcggcggcgacattgcgctgagccagttgcagataaaagaaagcgtgttcgttgtcgggacgtattcgaagagcttcgcgccattcaggaatcgagtccgcgaagcgcccctgttcgaacagtatgcgagccgtccatagatgcgcggccgcaaaatcctcgcttgcggtcatcgcctctctgaacatgtcaagagctccggatatgtcgccaccctgatatcgggcaatgccgctccggtgcgccacatacgcgttgcctccgttctctctatagttcgcggcgtctttccgcatcatcagaagaacttcgtcttccggagcctctttgatccctttatccagaatagccagcgcctcgtcgtacatgccttcattctggtaaatagtggcgagccagacgtacgcgtccgccagtttcggatcaagcaataatgatttctcgagttcttcaaccgccatccagtaatacccgcctgttatatatgtgtttgctccaagccagcggcggcaatctgcggcgcgcttttttacatcttctatcctccagccttcggggtacatcgttatgtaataatcccaccactgagccgctttgccccaccatttcgcgccctcgtacgcccgggccgcttttgttataacgttcccgtctctcggattgctttgcaaatgcgtttcatagtgcgcgatggcggcgcggtaattttcgctcgccatcgccctgtctcctttttccaccgatgcctcagcaaccgcgcttgccagcaatgaaaacgcaagaatcgtcgcggcaacgatgttgcgtcccgccgcgcctcggcttgaaccctttgcgcaacacaagcatctcagaatgttcattgcttctatcttcttgtaatgtttcattatattcctccgcgcttttctgtaataacagcgctatttgcacaaatgcgctttttaacaagtcgtctcttgttcgagcaaaacgcattagctcagcctctttctaattccttgcgtctagcgatgtcggttaagcttcagtctcttgctttttcgtgtgaatcaggtccgccaccgcatcgccggattcatccatcgcctttttcatgctcttggtaatatcgcgcgccgtgtcggcgacatcctcttttcgagcagcgatcttgtctatggctttttcaacgttgtccgacattttatccatagccttgtcaacgcgctcgcctagcgttcccttgtcgctcttgcttttatcgacaacgttgtcgatgtgttcgccgatcgttttcttttcattcatgttttgtttctcctttgtatttgtttgctgcgtcaatgatacgtcgctcgcttaacaatcgctatcggctaaaaagcatatgtttgtaaccatcgcggtttatatatttagccacatcgactaacggatgaacacgaagctgacttgatgacggattgcgccggacactaatgctcgctctgccgtcaagaggcgacaaccgccgccgcaaggctgtctcaggcaacaagattgaacaggaaaacattatttattttagtttgaagcgcaggcttcgcggagacgaggcgtttcgggcgcgttcgcgttcagataatccgttagagacaacaatttaagcattcgcatcacattcgcctgcaagcattgcaattcgaatgagccgctccatctgtcagtaagcgttcttaattgcgccaaaagccccgcgccggcgcagtcaagaaaagtcactcccgccatgtcaaacgaaagggacactccctgacgcatatactcgaacacaaggtctttaagtctttggcatacatcgtaagccagttcaccctcggctaatatcaatgtggtttcattctcattaactatatcgcaactaaacattgtttcgcatgtcctttcaaaacacagtagcctccagttaaacgattcttcgccccttaatgactctcaccaatacaactacgactgcgatgacaagcagaatgtgaatgaagcttcccatcgtatatccgctaactatccccagcaaccacaaaattgcgagtattaatgcaatcgactccagcatgagcaatcccccggtatcaatcgtttctgacgccgcgcgcgccgcgcttagtcaaagcgtcatccggttgaaaacatcattctgtgacagattatgatcgtaacaataaggcgttataacgccttgcaaacagtcataaacaacgtcgaattcgcatggcttttctatatacctgtttgcgcccgctaaaaatgccctcaacctctcatgcatccctgtctttgccgtatgaatgattatcggcatgtatttcgattggtcgttcatttttatcttgcgacagacttcgattccgttcatgtcaggcagcataatatcgagcaaaaccacgttaggttttttttcggtcgcgaaggttacggctgtttcgccgcttcccacatcgaaaaccgcgaaatcatctttcgctaaaaataactctcgcagtttctgtcgataaagcttatcggcgtccgctatcaatattattcttgatgccacggcaaagcctccttttcgcgcttgttttgtttgcgctcaacattaaagggacactgtccgcgcgctttaatgaattaaacagttgagaccttgccgcaatccaagaagttcaaagcgaggccgagcgtcgctttccatgtttcagcgtgagtaacgccgccggcctgctcgtgacatgcccttggagatgacattagattatgcgcgcgtgagccgcttaatcagagcgcgcgcatagccgcgcggaacaacgcgccgtcatttcttcgatttaactaggtctgaaatagcgtcgccggtgtcttccacggctcttttaacgcttttggaaatttctcttccaactttagagacgtctttttttgccgattcaagtttatctttcgtcttgtcgactttgtctgaagccttatccaccgccttgtcaacgcgttccccgattgtctttttgtcgctcataatcttttctccttttgtttttgaatattattctcaggctcaagttaattgcgcctgattgcattcatctatgtcgcagactgaatgagagccgcacattcgtctgttatcctcaatccatcgagggtctggcgaacaacttccaagagcggttctatgtccgacgatttggtcacccatgctttcgcaagatacgccctgaaatctttgcgaaacagcggatatgcggtgttcactatcaccgtcctgccgcctgcgcacaaatcggagagcgcctcaagcccgctcatctccggcatcccgatgtctagaaccactatgtccggctgccattcgcgcgctcgctctatcgccgacgctccgttatccaccacctccactgcgtatccctctgtttcgaattcctcgcggtagagttcggccacgcttgtgttgtcttccgctatcaacaaccttgtcataggcttccccctcagccgcgcaatttcaacttgcgccgcttgtcatcctttgtcattcatgtacttcttggtttttcgttctttcttattgaaatactgtttgaacttgttgatttgtttctttactcccgtcaattcctttggtttctgttctgactgctttttcttggcggccgccgctgaggcgtccttcttctttttatcagaagcggatttggctttagctttgttggcgtctctctgcttctcgatgtccgcccctatcgctttgaagcctttattctgcttgcgcatttccattattttctctgccgggtagttataatgtcctgacataaaccttaaatttactagatttacgatgtcgtcatcggcgagttttatcttgttccaatctttttgcggcttgtttttataatacccgtaggcctttccataaggaggccctgccgccgcgccctctctgagcggcacatgatacgattccgccccgaacccgtatcggtttgatatttgttgccacgtttggccttttagccgatagtctgagacgatcttaggagccacattggctttccgcgaaataaaaaacacaaccggaatatcttcttccgcgatgtttcgttgcctgacattcgcaacttccgtcttcggaacggcaaaatactcgcttatcgaattcataaaactgtcggaggcggcgtccgcggctctgttgaccgcgctccccgctaacgattcgcacatggtctcttttgtcgcgacagtcatcgcgaacaaaaccaatatcagcgccaaaattaatatccttctcatctttacacccctcgttttagaaatattccgttgcatacatcatattgctctcaagcgggttgcgctatcggcaaaaaagcaatctttattagctcatgcggcatatatttgtaactgttttagctaaactcagatgaagctgcgccgcgcaataaatagcgtttgtggctgcgccggaacttatatgctcgccacatttagcgcttcattaagagacagcttatcaaagggagccttaacgcgtttggacatgtttcttatttcaaaggagccattccaagactcagccaacttcttcatgcttaacaaaagcccaacgccggcgctgtcgaggaatgacacttttctcatgttgaacaacaagcgcatgcccggactcatacagcttgtgacaatctctccgaattcatcgcacacatcgtatcccagttctccttcagggcaaaccatgatgtattcatattcattgaatattcgatacgtaaacattgtctcccccttttcttcgcccgcgcgatgcttttctctgactaatgcgcacattcgcttttttcttagaacctatcagagttgaccgcatgttatgagtcgagtcattattgaaggcttttgcgttgcgcggcgcatataaaactccgcgcttttcttatttcggcaatattggcgcattgtttaagctgttggatatctttctttttgcgaaatgcttctttattaatggagcttgcgagccttttgcgtccttgctcataatttgtcgaatttcattgtcaggcatagcaggcaatctatttccagagtctgccttaatttcgaaatacggttgcgcatgttgtcggaatatagatactttcacatcggcgtctgatttgccagcttctaggttatgtgtgttatcgttattcttgctggttttctcgccgctttttgacactttatcaatttcttgttcgacaagctttatgttatctactttttctgtcatgacaatcgtctcctttgagatgcttcgtttatatgctatttgccgataaaaacacgatattcgcgactttgacgtctttattaatcataaacagcaatactttaggcgctatcggcgcgagagcatttactattaactattaagtcttttatttatagctttttcgtctattgcgacatgaataaacatgcaaaacaactttcgcgtcaattcttacgacacaaacgcaatccttcttgttgcggagattgcagatcgcagttgtaagacgacaaataaaaaagccctctataaaagagggttatttgcacatggtcccaaggaggacctattcgccgttttaatttgagcgcctcgtgccgataaagcggatatatgactacagattctttctataactgatgcccacgcttatatcttccacgctcagaatgccgaaatgcaatttggcggattcggacagatcgtatctcatgccgaaattgaagtggtctccgtcatactcttccatgaaagtggtttttttcagggccttcatgaacggcgatttctttgatataaggaatcttgcttcgagtccgtagaacagggagtcgtcgatgtcggaggttctgtatcctacttgatatctcagcgcaattttgtcgatccgatgttttgaacggagctttttaccggaagtaaagttcttgctgaccaccgcgtatttagttctgtttgtggaggcgaggtctaacaatcccgcgcttacagcaggatgctcttgcgcttcaggaacaaaattccatttaaggttcaaagagccttcctgttgaactttttcaacgaatgtcacgcctgcttcaaagcgacgaggtagcccgacgttggctttcacataatccttccatccaaccacgtcaacgctgacgtcgtaatcccacggggcgagcacatacgcgctgggattctttacaagccctgtcggccctgcgatagacggaccgttcggtatcatctcgccgtcaatatatggatcggccatcgtatattcatgcgtttttgaaccgtcttccgcatagcacaatgcggacgccgccagcgttaatgtcgcacaacagaccgcgagaaacatgtaatcttttatcagtcgcatcaactatcccccatgttcgccaatgtttttcatccttaataaatatatagttggggaaatatacgcgctatcggcaaaaaggcattatttcataaccaatgtggcattattttgtagccttttaggctaacgagcggaatgagcaaaattgcgctcaaacaacactttaatatttgctcacatgaaagatagttcggcgtcgcttttttggtgttgcgcgtcgctgctttcgaaaagtatcttcatctcgccgtcggcgctaatcattatcgggatgccgccgtagcggcgcgcggattgggcggctatggtgcgcgctccgagatagcttccgagatcgggatgctgttttatcatagcgcctacggctatcaactcatcgccgtcaaatatcacagccccgtcaagaccggcgatttcaagaaacagatttttcctgctcgtcaaccgcgcgttcatgccgaggcggatatctcgtattaccggggagagcatagcgcgcgccgtgtcgggcgtgggcgcgattcctcctattatcgactgtttattaaccacgtgttcgataactttatggtcaggatcgtacactagcaaagctccgtgacgcatgtaactgaggtcaaacatcagctcgaaaagatttcttccgacgttgatgtcgcccataatgtcgcacacgctgtttttgaacgtttgggcgtcatacacgcgccatcgtcccttcctattcgcggcaagaagtccgcgcgagtccattatgaagatgtctccacgctgtcgcagatgaactgagaattctccgcttttcaggattgaggcgaatggctcaagaaactcgggaataaacttcggctcaaaagactcgctgacatccttccacaagatttcctgatagtctaaaaacctcagttctctgtccacgcgaaaatagacttgcatgctcgacgcaagaggatctacaatcttttgaatcgaagcgtcagacagcgacaacgcgccctctccctccccgatcacgatgttagtcatcacccgattgttctcgtaggttctgaacctgacatcctcgatgtatgcgataaacttgttccagttaacgcccgcgtcgaatatctcaagccatcgcaccgcgatatcctcttcgacctgttgcagtgagcgtggggtcggcacgactggcatccttgctctccagatatcgagattgttctgaatatatgatattagcgatctcaaattcggggttaacggattgtgagagcaaaatacgactgtgtgagcgcccattgtcaattcgaacgcatgattcgcatgctcgcttgaataccagtgcgggaccgtcgagacagcggccttcattatgatgcgttcataagatagcatttttcaatatccaatgttaaatgaatctctgaagaatgcgacctgccggagtttgcgcgataatgtgatgtctaatcattcaagactttgtatatgattgttatatcgcggataaccggcacagcttttttcatgaaaaattccttcaatgtggcttttcgcttaggaacgttgatgacatcgccgggacgcagcgacgggatgtcccccgtcgtccggttcagattccccgcctcgattatctcaggtcgttcagggtagtttcgcgttatcgtcaccccgctgtcggcggcgttcgccgcaaacccgcctgagcgcgttatgatgtctagaatcgtctgcccctcgacataaggataaattccgggagtgttgatatatcccgtcacagttatggactctttcttcgcgggctttacaagcacgacatcgttaggaagaagctcgaatccgtccggaggatttctgactgaaaccgaactcatctcgccttgtcgtatcaatgtcacttccgatgagaatatctgcgcgtcaagggccttcgccgcggctagaagtccgattaagttggctgcgttttccggaatcgggtagaaacccggctccggaacatctcccagcacctacactgaagtcgttccatgatatgaaacataaatggcgtcgccgtctatgagttgaaaagtttccgcgctcggcggcgatatcgagcctcgtttcagcgccaccggcatggacacgccgcttctgacgacgaatactttgcgttcatccattctaggatgcgcgagccgcgcctgcgcgaggagtttgtacatcatatacgggtctgtgagttcgtaaggccccggcgctgtgatttcgccaaggatataaacttgcggcttgtgaaacctcgtcacaagcaacgaaaccttcgggtcttttatgcgcgcggcaatcgtctgttccagttccgcgcgtatttgctccgttgtctttccgagcgcgtacatgtcttctatcagcggaaacgatatcatgccgtcgggcctgccggtcactgtttttaaaaggtcttcattgccgtaaaccgatatctccatctcgtcattcatgtgtatccggtaaacatccatcaccggattctcgccgattgcgccggctcgcgcgagcgtatacgccgccagcacggctgttgccgttaggctagccaacaacataatgcgcgagcgattcattgtcataacctccagaatttctagttgcggactgcggcctgcgcgccgagcggcgccacagtcgcggcgaactatacttgtgatgacaaccctctaaggtctgcgacttgcttgcgaagactgcggttttccgcgcgggcgtccgctctcggtccgagaaatataaaatattcaaccgcgactccgagaataccactgccaataatcagcagaggcagtttcacgctcatagtcgccaccagaagatttatcgtggtgtcggtattgttgacaagcgcgagaatgacgctgattgtcaaaacaaccgtgccgagcatgaaccagatgttttcccagaaacgtctgcgttgcggcgtcgcctcaagcttagcctcggctatggcgttttccgcgtcttgcgcttgctttatgtcgttttttcctgtcatgcgttctccttttttgcggacgcggagcttatccctcaatgtccacaacgactccttcctccgccgcaagcgaattaatgattttattcaggtcttccccggtcacgtccagaaacggaatgtcttctgtttgcttgataacaatcccttttttctcgccgataagctgtatgcgaaatccgctgttctttgcccacactctgacagagaaaggctgtttgcgctcgatcatgctttcattgaacttcgacactgcgtccagcgccgtgttccagagcgctgattttggccgggctggcagcggcaagcctgtattgcgatacagaaaactgtcgccgtcggcggcgattccggttttgcgccccactttttttcccactacgcgcgagaccgggctgacggtcgaagtctgatcgattctatctacgctgtcgattgaatcagagccgagcgtgcgggtgaactgatctcccataggattctccttttttcgaacgtcaagcggccggtctcgatcaaggcccgcggctgctattgtttaagtagaagccccgcagttgtagcttccgtcttttcgccgactgtcacggcttcgttcttagcgcttgctttaggcggccgaaaaacgaaatcgtctctcgaacatgccgccatgtgcatcagggccgcgccttcgctcagtatgattccgccggatttcacggaagcgaagaaaccggctccttcgcctttgcccccggtcgatttaatcggattgattttaatcagttttatctttgcgaacgcgtcttgcgcaagcgtcagttcgggcggtcgccgtctatcctgttcctcgtctaggacgaccctcgtcaacaccgcttccatcgcgtaagatttaagcagattcggaaagatatccgcaaacacgccgtgattgtaaaataaatcaagataccaccatgtgcggtcgatgaaaacaacccagccgacctgcgcctccgtaaactctatgcgcgagacgtactcatcgtgaaggatatccctctccgcgtatagcgcgcagatatcgtagttttcggtctttatagacgaccgctcaaaaaggccttcgatatgcttccataccatattttgatccaccctcgacgcgccttctttgatcatcgtcggaaacgacttctcaaggcgctctcgccggaggctcgccggagcgaaatccgagcggtaaaaagcggggtcggtcgccgttattctcgaagctcccccagagagcgcctcgcattcccagcggctcgcctcgacgctgacagcgggtaaaacaacgctttcacccggtcgaataaccgcgctcgccgtcagcattctgttagccgctcctccgatcaggattgccccgtccagcgccagcgcgggcgtgtcgccgctgttctctatgcttaccgaattcattttgcctgtttccatcgcttttatgccgtcgccgagttctcccgcgcctatgacggtgaaaagctctttcgcctcgaaggcgggcgaaaccaacgtcagagggaatacggcaagtcctccgtattccctcatgtcttgcactttgaggtagtccatgaatattgaaggcgtcggcatgattttctccttcagcccgagtttcgcgttgccgttcagtctttttctgaagcgtctttttttgcggcaaaccgctctttagcattgccgacagcggcggctgttttatcgtgcgcatgcgagaccatgctttttgcttcgccgcaaacgtcgcagaccttgtcagacacatcgtcccattattccctgatggcggcagtagtttctttgccgcttgcaggcgctagaagaagcgccgctccggcccccgctatcgctcccgctccgaagcctatcaaagcgcgccacacattagtcctcttctgcgcgttaatatcgttctgtttggatgttcatttcttttctccctttttgatttctaaagcacatgcctataatgaatatttctatcattattctaaattgttcaaccatagcatcctcctgatatcccgccgcgcagagcatatttgttattgcgcaacaaataccttgccgaaagaaacacgacgacaattcgtcccatgaagatgtatgtcaacacattaatgatacgattgattggaatccgggagtatcggcaaaaaagcaatctttattaactattacggcattcatttatagccattccggctaataaacgccgcgcccctctgagccgtaaatgtggttcgaaaaaaggcgttgatattttcaaatgtcagatcgggcgccactcacaaccttgtgcttgagcatcgttaatattcagggattgttaaaaaacttgacactttattcccggaacggcgaaaagcggggacaggcagccgcaaaagacgcgttgcctgtccccgtttttcgctcgaatactcagccagtgaaaaggcacaatttggagtgcggcgatggttctgggtgccaccctgcatacttgagtgaatggcagcaagttggtatcagtcataagaaacgcgtgatttggaatgcgcgattcatcgcctgtttcctgatgaaagcgacatttcgagcggggcaaccccgcccatacataggaataaatgcggcgccaacgaagcagttcgcctatgtgataaagcgttccgactcgccagttcttcagcgaatccttttattgcaatcgagcgattaatacagacgcgcgcgcgcgcctgatattatgatttttcgattagtcctttattaatggcgaaaaacgtcatgtccgaatcttttttcatgtcaagcttccccatgatgcgatacttgaaggttttcaccgtgctgtaggacacgtcaagttcgtcggcgacttcgctcattgtcattccgcgcgccatcctgatgaatatctgatactctctctttgaaagctgggaaagcaggtcgccttctttgtcatggtcgttttgattcgttacggctccatttgaagccgagaaatagatgtctcccgccgcgatttttcttatggccgcgcatagttccatggctgagattttcttgcacaaatagccggccgctccgctcttaataaaacttattgcaaactcttttctgtcgtatatcgtaagaattagaatttttgtgttcagtttcaactcgacgatctgttttgtggcttccagtccgtcaacaaccggcatttcgtaatccagcacaaccacatcgggtttcagctcgccgcacttctgaacagcctcgcgcccgtccgaggcttctccgacaatctccatgtctttttctccgtcaatcagcctgcacaatccggcgcgcaccactccgtggtcgtccgcaaccaaaactcttatcatctttttagcccctccaacgggcttgtgaaccttaattgtttctaccgccgcgtttgcgggttttgatttcttttttgcttttttgccgggcatatcgcttcctccctctttttcctctcatatcggaccgccaatctctttcttcacattgaaaggaatagccacttttatgtgtgttcctcttccgggcgcggaacatatttcaaaccgcccccccatcatgttcgcccgctccctcattccaaggatgccgaaattgtatctgccctgctcgctgtcttcttcaattccgcaaccgctgtccttcacctgaagaacgatttcagaatcagtttccttcaaagatatcaacgcggttttggagcctgaatggcggacaatattcgccagagcctcttgaagtatcctgtacagattgatggcgttgtcaggactgacgcgagactcgtcgacgggcgttatcctagattctatgaagatatcgctggcgttttccaaatccgcaatcaatgttttcatagcggcgttaaaccccattctatccataatcaaagggcgaagaccgagacatatctgttgaagttcttccgacgcttctatcgtctgcttaatcaaattattgtaaacactcacatccgagcatgcgcattcgcggttcctcagccattcgatctcaagttgcatggagatgattttctgtccgatggagtcgtgaagttcgcgcgccacttgtttgcgctcttcttcctgcgattgaatcattctgcgggatagaaacatcaactcccttttcgcaaggctggcttgcgccttcttgcggtctgttatgtcgctcaaaacagcccgataaacaacgggcgtttgcgcgtcgcgcgtcacggaggtttctacttgcgcccacaacagggaaccgtccgcccgcttcgccattatctcgtacgcctgcggctcttttgtctccagtagtttcttgcggcgaaggtagtgcgcgtcctgatattctttagaaataaacgccgaaaacggttttcccaccagttcgcttctagcgacttgtagcagatttgaaacggcgaggttcgcctgaagaattattcccttttcgctgactgataaatatccgaccggggccatgtcgtaaaggtcgtaatattgcgcctgcgacatctctaattcatcctgcgcgcgacgcagttcctcgttctgcatctcgagttcaatctggtgaacgcgcaactcatggagcagttttcttatttcgtcggtggacattaattccagacgctcatgagcgcgctcagcgtttttatcggcttcgacctcggcttttttgcgaagaacagctaacttctcctcttcgcgtttgttatcgttcataatcatttctccttatgcaattcagccgccgctgcggctatcctccgcgcgcttgcgcaggtcatccgccggggcggccctcttgtcttctctgtcagacattattgtcgataccctgtttcaatcgcttacaattgaattgcatcgtttatgtcagccacttttgaatcatgcttatgtattccatattgctgaaaggtttggccaagtgatccattttcggatccctcgtctctaattccatcatggactgcaaatactcgaagttcccagacacgaaaattatcgggatttcggagtctgtttccctgattctttcgtacacctccattccgttcatatccggcaggacgaaatcaaggctgatggcgtcgaaagaattcatgccgtgtcgctccagagccgttttcgcgtcaacagctagggtcggataatgaccgagtttttcaagaagcaaacatagaattcttcccagttgcggttcgtcttcaacaacaagcacgtttttccctttcgcatctttattttcgctggcaaccgccttcctgtcgccgcgggcagcttctgtgattatcggcagcgttattctgaaaatcgcgcccttgtccgcttcgctttcgcactcgacggttcccccgtgcttgtccatgcaacgcttaacatttgaaaggccgtatccggtgccttttacgtccggcgggtaagctccggtcatatccccgctgcctttcaacgagaacaagggatcaaacatcttgtctttccattcacgaggaatgccgcagccattgtcggcaagttcgattcggatgatgttgttttccgcgcgcgtttttatgcgcaacaccggtttttcggttttgctcatagcttgtgtcgcattattgataaggttgatcaaggcgttttcgagaagcccggcgtccgcaatcacgccatccaaacccgctccgtaatcgacgaccacatcgatattcttcaaattgcctctcagcgtcttgataatcatgtctatcttgtcgttaaggctaaatcggcttagtttaagctgctgatccttggcaaagaacaataagttccttgccagcccgcctcctctgtttgcggtttccagaatggtttcgacatctgatttcacgtccggcggcaagtcttgggtcaggagcaattcgctcgttcccaagatgatggttagaacgttgttgaaatcgtgcgccatccgtcccgcaagctggccgatggccgccattttatcctgttcgagatactttctccttgcgtcttcgtgattcttttgttccgtgatgtcgctgagcgcggctcggcacacctgcgcgccatccgcttcgtgcgccacaatcgcatggattcgcgcccagaagaagtcgcggtttttccccgctattcttatttcgcatacctgcgggtcgcctgtttcaaacaattccttgcggtgtctgtagtaaatatcctgatcttcggagagaatgaatccagtcagcggctttttcaacagcgagcttcgagacatgcccagcagtccggcggcggtgagattcgcctccagaataagccccttctcgctgattgtaacgtagccgacaggagcaaggtcgtacaggtcgaaataccgcgcccgcgacgcttcaagttccgcctgcgcgcggcgcagctcttcgttctgcatctcaagctcaatttgatgcacgcgcagttcgtggagcaggcgttttgtttcaccgggggacaactcgtcaagattaacaggagcgccggatgcggcgttttcaagcgctttattctcggcccgcgcgcgaaggtctgcgtccgcttttccccggctattgtcatcgcacattgtcgcccccgttctttttcggcgatgttttttcttcgccggattcagaccggacacatttcccgcgcgcggttattctgacaaatgtgacaaccacgccctcgataacattttccatggttcggtacggcatgattcgcatggtgtacgaatcgcccttcagggtcttcacttcgcgctcttttgggatcagcgtgttcaacacatctcgcgcgtcggcgaccagcccgtcgtatccctcaaggttcgagacgatatgcccgacgggacgccccacatcgctgggtatcaggttgataatctgggtggcggtcggagtgaatcgcatgattcgcagttggtcgtcaacgaatactgtgccgattcccgtgcctgccagcaggttgttcatgtcgttgttggctctcgaaaggtcgatgactttctgctggagttcggcgttgactgtcgcaagttcctcgttcaccgattgcagttcttctttggacgtctcgagttcttcgtttgttgactgaagctcctcatttatcgactgcatttcttcgttcgaagaccttagctcttcgttggatgtctgaagttgctcggtggtggtctgaagatactcatccttggcgcgcaattctttcctcatcgcctccaagcgcgagccgatgtctgttgcgttgtcgaaagcgccgtctgtgtcggcggcgatttctcgcttttcactgtctgatatccgaggctcttcaatgatgacaatgaaaagctcttgcgctgtttccgcgccagtgggcgccggaatgggttttaccgtcagatttaccgtcgtgaagtcgccgtttgttttgacgcgcaggccgtcatggcgcacggcttcctttgagacggcggttttgtgcaaagccgttgttagttcgcggcccaatccctcgcgggccatcttcaacacattggcgacgcctgcgacgccgggcgaaggttccagaaaatggccggctcgtccatgtatgtacaagatgtcgccgccgctgttgactattatgccggtcattgccgcgtgttgaagcagcgccttctcagccaactctcgaagaggcattttatattcatccgttgtttttcttttttggcgggacgaggcttcttccgtcgccgaactcggaagaaagcggctgagggacgcgcgctgcgcgccttgaatgtcatctttgcgccgatatagttttgctttgtggtccacggaggcaaaaaggctcgcgaaatcgccgattgtctcggatgtgccgagaaaaagaaatccgttcggattcaacgcgtaatggaagaggggaatgagctttttctgaaggtctccgcccatatagattagcaggttgcggcaactgatgaggtcgatttttgaaaagggagggtctttgattacattctgttcggagaaaatcaaaatatcgcgaaggcttttgcgaatccgataggagccgccgccgggttcggcctcaaaaaaacgctccagcctctcaggcgagacgtcggcggcgatgctggccggatataggcctgttctggcagtgtcgatggcgtggccatcaatatctgtggcgaacacctgcaatttgaaattttgtttctgttcctcaagtcgctcctgcagcaacatggcgatggaataagcctcttcgccggttgagcatcccagcgaccagacgcgcagcgcggcgcctgcgggcttgcctgcgaagagaagcggcagagcctgtttctccagcgctttgaacgcctcttggtctcggaaaaaactggtaactccaatcagcaggtctcgaaacagggcgtccacctcgtcctttgaccgctgaagatattttatgtattcctctatcttgtctatctggttgacggccatccggcgctcgatccgccgatggatggtattgggcttatattgggaaaagtcatgtccggtctggttgcgcaacaggattaaaacctttttcagcatatcttccggtttagggagagagcctgcggccgggcgcgttgttttgccgaacgcatgggcggcgtaagcgattagttgcggcggcatttcggcgggcggcagaacataatccaccagaccggttgcgatggcgtttctaggcattccgtcgtattcagtggattccgggttctgcgccataaccatgccgccctcgcccttgatcgcccgcactcccagagcgccgtcgctgcccgtgccggagagcactatgcagatagctcgctcgcgctgatcctgcgcaagagagcggaaaaaaaaatcaatgggaagccgctggcctcgcggcgcggccggctccaacagttcaagcgtgccgccgataaaagccatgtcgcgaccgggagggatgatgtatgcgcagtttggctccaccaccatcccgtctttaacttctaataccttcattcgagtatagcgtttgaccaactcggtgaggatgctcttgtgatccggagcaagatgctgcacgaggacaaaagccatatccgggttggcgttcgcgggcatgcctgaaaaaaaagcctcgaacgccgcaagccctcctgccgacgcgccgattccgacgatggggaaatcctttgggaggtcttgttttccattgtctgcggaaacctcatccacaagcgtcttcttgggcgattcagcgggggccttaacatcggtttttatctttctaggcataaaacagtctcctgactagtcggattggccgatagagccggcaaatcttcggcaaatttcataacggcgagatgctttgttgacgtcgcattttttaagcgagaaccttagcctgatttttcctgtgaaaaatccgagttaagtctcttttgctgcaaattgcgcctcgagattcagccgtagaataaccgcgccttaatcccagaaaaggattcggtttgacagaagtgaatcctgtggcgctttccatgttgcgcaaagatgtggttctcagactcaacgaagaggctcttttctttaattgtaactcacttgaaactaactcgcgcgtgaattggaaaatatacttcgccggaatgtgaaagacgcccgtttaatctgcggaagagattgaaatatgccgctttatttcgtcgcgtaaagcggcgccataatttgccttttgcgagtgggctgggttcttgtcggtggaagcgattgccgggggcatagccgagcaggctagctgaaaaaccataaccagtagtcggaaataacacaaatttgtcgaagttacgcattagattcacggaatacatgcgcttgatgcaggccgagtctgtcgttgagcattttctgtatatgatcgtggagaccgtcaacgagggagcgtacgcgctccgtatcgggctcgacgtcgtggcaatcttcgtaataatgtattggcgtgtcgaagtgcaagtcgaactttgacggaaacggcaaaagtccgagcaagcccagccacggaaatatcggcgttatcggcagatgtttgaaccccatcactttcatgtcgagtttgccaattgtcatagcggattcctccgagccggtgacgcatgccgggatgattggagcgcggtactcaatcgcgtattccatgaatccgggggggaacgcgtccactttgtatttgttgaagatggtgtggaagtcgctctccgcgccggtgggaaacacaacaatgaggttttcgttctcgaagattttcattacgttttcgtcgcagccgactatctggccgcaccggttcaagaggatggagccgccggggatgcctgaaagcgccctgtggattattgttctgatgaatcgtggcttctcaagctccaccagcccggcggtccatatcatcacggcgtcgaatgggagtatcggcgcgtggttggacactatcaggccgactccttcggcggggatgttctgcgcgccgtgcgcgtccacgcgaaagtaattcatgtacatgaacagcgccgccgctcccgctttggatgtgacattcaggctggttccgaactcgtcgtatccgcttgggtcaaactgtatgtccgacatcagtatgcggtttctcatatattcggtcgctgtgccgtcgaagaaatgcttgaatttaagttttctgtagtcgtccattgtgttcacaagtcgatttcccctgattgcgatagtttaatcatcctcatcctagctctgggcgcggcgaagtctgattcgatgcgccgcagcgcctttctttttcctttccgcgcggattttctcaaatccggaggggtcgtatcccagttcctcgaacgcgcgcgcgccgtccactgtgaacggatactttatgtaattgagatcgaatttcagattgttcgaccacatgaacctgcctaaacggcgcgcgagaaattcaggaagcggcgccggcgtctttccgaacgagcggataacctcgcttaacggcaggtgtgcgcgccctctgatgttgtacgcgccgtgagcgttcgggctgcgcagaactcgaatgaaagcgtccagcatttcgtcctcgtaaataatctggaacatggggtcgaacccaagaagcgtgggaacaagtttgcctttcatataagcgcctagaatgctggctcctgaatctcgccagatgggaaccatccgcaggatgatcactctgaggctgtcggagctttccgcgtgcgtttggcaaatcatgtccgcctcgatgcggtctctgatgctgaggatgtctcggttgccaagcagaggacggctttcgagaataaccgccgggttgtcctgccttgcgccgtaaacgatggtggagcttggatatatgaactgcttgaccccgtatttgcgcgcaaggccgatcatgtggaacgtcccgtaaacgttcgtcatcatccgttcatcagtagtcaggctctcgccatggccgagggcgagatgcgccacggcgtctatggttccctcgtttttaaacacatcctcgatgcgcttttttcgcgcgtctccgtaaatgcgctttacacccagccacttctcctgtctgtcgtcgtccacgcagatgtcaacgttgacaatgttaatgtcttcgccccactcctcgcgcatcctcacggccagaagttttcctagatatcccgaaccgcctatcatgagcactttcatccgtcgctcccaatgttaacctgcgttggcgaaaaatgccggttaatagagttcttgtttccgaatatctcgttccgcctgtccccagtcctgaacagataggccctcttgtcggcctcgcagttcgtatagttcataggcgcgctttgcaatctgtgggctcaaatcgaccgcattctcgtctctttctgaaatgtcatgcaaaatcccagagagattctctttttctgtgtcgatcttacccttgcttcttgcaacctttttcgacacattacccgcgcgtttttcgatggttcttttgtcactcatgctttttcgtctcctttaatttcgaaatatcgcaatactccaacacgctcccaaaccaaacatattaaacaaactatgagggctgttgctcttttgagattattcgtattagcttaacaataccccaagccacaacagagtacacaataattgcgactaccgttgacggctcaaaaaccgaagtcgtttctatgccttctgaaagccccctgcggaatatgttttcaaaaggcacaatgaaaaatccggttaatccataaatgaatttcacaaagccgctagaaaggttggctcccatcaacttaagaacgaggcggaaaaccaaaagtatttccaaagcgccaaagaagtaatagactgaatatccgcccgtctgataaccggttgccttcttttcagttggagtcgtcacagcgcttgcgtcgccgatttgtgttgtttcagtctcttttacaacattttccatattcgtatcctccgattattattgatgcgtcggcccgcgttggcgaaaatgcggttagcaatccgattgaatactaaagcacaaagacagacgacgcatgcgtctgaaaaccgctgcatagacaacatgttgcatgcgccgtcgtttttgtgtggcccaaatctaaagcggcctcgccagaatcacttgacagctttcttcacgttctttttaatgtcgtgcgctgtgtcaactacggcttcctttactttatcagcctttttcgacactttattcacagctttgtcaacacgttccccgatgcttttcttgttgctcatagttttccgtctccttttattttggtttatcattatcggttcgtaatattctttccttatgcgctatgacttcctcgcccgggaattagctccatcagcctacgggagaggaacgatgatagtgtttgtgtccaaagtaaccgcgccggtgtcgctcgtcgctccggccaatactctgccgtctattctggagccggaaacacaagtgacgcttacgccggccagtatgtttccagtgaagttagcgccggctccaatagtcgcggatgcggaggcaacccaaaacacgttcccggcctgcgcgctgttggtcaccgaaacatttccagcgtttgcagtcagcgaggagccgatcaagaatacccagacggcattcgggtcgcccccgccgtcgagaacaaggtctgtgcttatgttcattgtgctggcggagctatagacgcccggtggaagtgtcagcgcgcccaaatccgcagttccaacgtctgcgtctggcgtcatacctatagcgaagttatacgcgtccaataagtcttgttttgctagaactgacaccgcatcgttaatgtgcgtcgtgccggtcactgtcggacttccggttattgatgcgcccggactcaatgaaacatttccatctatagtggttgcgccggtgttggtgatggtggcggctgccatgactccgaaagcgcaggtcgaaccaagcggaactgcgcccggagtgagttgcatggcaatcgtaaccgtgtcggtggcgctgtttattattccgtcattaactatcaggtcgaaagcgtatattccagtggaagtcggagtgaatgtaggcgtctgcactgtgccgctcgacaatgcaaccgccgggccgccggactgcgtccactcgtaagtgagggggttgccatccgcatccgcgctggcgcttccgtcgagagcgaccgcggcgggaacgcacggcagaatgagcgtttgatccgcccccgcatcggcgaccggcgctatgttgataagataattcacatgcgtattcgttgcgatgtcgtccgcgttgagcgatgtgtcgcggcaggcaatatagacagttacagcgcccgatgcgagacccgacgttgcgcagctctggctcattgtgccgtcgccgtcgcagtcgtcggccatgtctccgtatgcctgatcggcaagcgaccatttgcaatcagcgttctcattcgtgttgaacgtaatcgtcggcgagtgggttgcaagcgtcgaatctttcgcaggatcccaagcgctctgaacaggcggcgttatatccgcggttgtaaattcccacgtgtaatcagacgccgacgcaaccacggatgcgaactgagcgaccacggcaaacatcgctatgaaaatgagggctttgacggcgccgcagcgcccggccttgcggctgcccctgtgaacggaattgattattcttctaatagaatgtttcataatattcttccatgttttgtgtattgcaaacatttcactttatcaaagacacatagacgatgtttctaaacttctgactccctgttgcccgcatcgggcaatataagaaatcctttagttgccgaccaactcattgccggccacatccttggctccggcggggcctgttttgatcgtggcggtgtaagtggtcaattcatcgagagcgctgtcaggcgtaaaagtcgctgttacatcgacgtacgccacagaacccggaatttccgttactccctgcatcagggtaaatgttgccgtggtgattgtggcgggatccatcgcctcgctgaaggcggcggtgattactttcgtattgattgccacgccggaggcgttgtttaatggaacaacggcagtcacagcgggcgcggcggtgtctgttacaggcggcgggttccattttccggttcctccgcatcccgcaattactataccgatcagaattaaactaaacaaaagataagcacgtcgactcttaaagatattgatgataaacattttcatgaaatctttcataattgtcggcgatacatatcccttcgccttttgttattctctatgcataaattatctgaaatatcagaagccaatgatatcggcggaaaagcattcttgattaactcttatggcttgttgttgtaaccatattggctagcgagagtcgaatgttgtattgattagttgatcctactgtccgatatttgcaacctcaaatatttcaacaggaaacgactttcctttgagttgaaccggcgctaatgcgcgtaacgttatttttccttcaacccgcagcaaagcattctttgtgattaggatttgtccggcgcgcgctattgactctaccctctgtgcggtgttcacgacgtcgcctatgatcgtgtaatccattgtttcttcagttcctatgtttccgacaaccgcctcgccgtagtttatccctatgccgattcccagttttttcaactccggcggccagtcgcgttttaattcttcgaaagctctttgcatttccaaagcggcccgaattgcccatagcgtttcattttcgacaaaaaatgtattttttacgttcctctcgatgtctttggaggaccctatgcagcgggatgtttcaagtaaacgcggaaaagacttcagataatacggtccgaacggaaaaggcggtgcgaaaaaagcgcgataaacaaaaggttgttgacgggcgcggcagggcgtaactgcggataatacgcattatctgaagttcgaacgcaatcataaacatcattatataaaggcatatttgagcatttgcgcggcagcgcgggaggcgttctgcggtgtcgtttcattcaaattgacataaattaattcttgtcaaacgcgcttgaaacggggcgtttccggcatggttttcagtcgttttttaaccccgaaaagggccgcaaaaggggcgtttttcgtttgtttttacaaacgcggttttaacaggttttttaacgtgttttaacgggattcacactggtttcaatagcgtttacaccgttgtgactgtcacggtgtgaaaagactgattcaggcgacagcgatggccgctttggcgttttggagagcgatttgggacatgaattaatttatgtcatacgaaacgactcatgcggaaatgggtcggtcgcgcgctttatgctgacaaatgaggcgcgcaacccgacagttattaatgacccgccttctgacagtaatggtttctgtaaaaacaatcaagctgtctgtgaaataaataagctttataataaagcctataatcgttagcggcttcttctatgcatactcgtgacgaaacgtttcaaaagttttccctttttcttccccgcaagaatctttcgctcatgccgcttccgcgcgcgtgagcggcgcgcctgcgctataatattcaacgcgggcggcgggcagccgcgcctcgcggggagacgccgggattatgaccaaagacaaattgttgttgattgacacgttcggccttatatacaggttctatcacaccatgcccaagatgaagacggcggagggaattcccaccggggcggtgttcggcatggcgcgcgcgctgctgaagatttttaaagataataagcccgactatctggtggtggcgatggagtccgagacacccactttcaggcatgccgaatatgccgcctacaaagctcacagggacagaatgccggacgagttgcgggaacagattccggccatcaacgagcttatctccgctttcggtataactccggccaagctcgacgggtacgaggcggacgatgtgatcggcactctggcgcgggcgggcgcggaacacggccttgaggtcgatattcttacaggcgatagagatatgttccagttggtgaacgacagcgtatcagtgctgatgtcgctgaaaggctcctcagagcttgagaagttcgaccgcgaggcggttaaagaaaaaatgggcgtttatccggaacgcatacccgacctcaaagggcttgaaggcgacagttcggacaacatccccggagtgccgggcgtcggccccaaaacagcggtgtctctgctcgaacaattcggagatatggacgccgtgttcgactctcttgaacagattgacaagaaagggctgcgggaaaaactggcggctaacagggaacttgcggaactgagcagaaggctcggcacgatagagaaacacgcgccgctcccatttgaaatcggcgcgtacaaactcccggcggtcgacaacgaaaagcttgcggcgttcttcgagaaatatgaaatgagaagtttcatatcggagcttggaatgaaagaggaggcggccgccccgccccgccccgccgccgttcagttcgactcggtttataaggctgtcttcgacgaagccgaagtcatcgaagcgcttgagcgcgccgcctcgcgcggcaggctttgcgtagacctcgaaaccgacgggctggacaccttcgccgaccccatagtgggcatcgctctggcttccgaggccggcgacgccatctacatccccattcgacacggctccaccgtgaaacgcggcggcggcgaccttttcggcggcggcgacggctcggacgatgaagacgactccgacccggacgctgaaaaacagatagacccggaccgcgcaatcgctttgttgaaaccgtatctggaaaaccctgacatagaaaaaatcggccacaacctcaaattcgacgcgcagatgcttcgcgcggctggcgtgtctcttgccaacatcgcttacgactcattcatcgccgcttaccttatagacccggacggccgcagatacgggctgaaaacggtcgcggcgaacctgctgggagcgggcctgaaaacatacgaggatatggtcggcaagggaaaatctcagaagaaattctctgaggtcaagataagggacgcggtggattacgcctgcgctgacgtggacgccgcgttgaggatcgagccggagctttcgaggcggctggccgcagacggcctcgaccgcgtgttcaggaaaatcgagatgccccttatcccggtattggccgagatggagtggaacggagtggctctggacgcgtccgcgctcgcggggatgtccgaagacttcgccgcaagagagcgggcgctgagcgcggcggtggcggagcttgccggggcggatgtcaacctgaattccccgaaacaggtggccgagttgctgttcgtaaaactcggcctcagaaaagtcaagaaagaatccaccgacatagccgtcctcgaacagcttaaatgcgaccacccggcggtcccgctgataataaagttccggcaggcgagcaagcttcgcggcacatacatagacgctctgcccgcgctgataaacccgcgcacgggcagagtccacacgagcttcaaccagacgctggccgcgtcaggcagattgtcaagcagcaaccctaacatgcagaacatcccggtgcgctccgaggatgggcgcgagatcaggcgcgcgttcatccccggctccaaaggcctcgcccttgtctccgccgactactcccagatcgagatacggctcctcgccgagatgtccggcgacccttccctgctcgaagcgttccgcaaccgggaagacattcacgcgtccgtcgccgctcaggtgttcggagtccccgtctcggaagtgacgcaggaccagcgcagatacgcgaagacaatcaacttcggcctcatatacgggatgcgcgagttcaggctttcacaggagcttggcatctcccggcagcaggccgccgacttcatagaaacttatttctcgcggttccccggcgttcgcgacttcatagagaaaacaaacgaaaaactcctcgaagacggtttcgcagagacgctgttcggacgccgccgccgcgtgccggaactgaggtcttccaaccggcaggagcgcgaagcgggattgcgcgcggctttcaacacccgcattcaaggctctgcggcggacattatgaaactcgccatgatcgacgttcacaagatgatactcgcgggcgagatggacgctaaaatgctccttcaggttcatgacgaaatcgtgcttgaaacgcctgccgaaaaagtggcggacacggcggagaaaacccgcagagcaatggaagcagcgggccgcgattggggcgctctatccgtcgaacttccggcagacgtcaaagccgggccgaactggctcgacatggaaacggtttatacatgttattagatgattctacccactaccaagtgtgccatgcgcaaaactttttcttttgcgcatgatgcttttcaccaaatagtaaatggg

SEQ ID NO: 966 - DNA, 103780 bp, Artificial Sequence
  Synthetic Oligonucleotide
  misc_feature (1)..(40481): n is a, c, g, or t
nnnnnnnnnnnnnnnnnnnnnnnnnnnnnnnnnnnnnnnnnnnnnnnnnnnnnnnnnnnnnnnnnnnnnnnnnnnnnnnnnnnnnnnnnnnnnnnnnnnnnnnnnnnnnnnnnnnnnnnnnnnnnnnnnnnnnnnnnnnnnnnnnnnnnnnnnnnnnnnnnnnnnnnnnnnnnnnnnnnnnnnnnnnnnnnnnnnnnnnnnnnnnnnnnnnnnnnnnnnnnnnnnnnnnnnnnnnnnnnnnnnnnnnnnnnnnnnnnnnnnnnnnnnnnnnnnnnnnnnnnnnnnnnnnnnnnnnnnnnnnnnnnnnnnnnnnnnnnnnnnnnnnnnnnnnnnnnnnnnnnnnnnnnnnnnnnnnnnnnnnnnnnnnnnnnnnnnnnnnnnnnnnnnnnnnnnnnnnnnnnnnnnnnnnnnnnnnnnnnnnnnnnnnnnnnnnnnnnnnnnnnnnnnnnnnnnnnnnnnnnnnnnnnnnnnnnnnnnnnnnnnnnnnnnnnnnnnnnnnnnnnnnnnnnnnnnnnnnnnnnnnnnnnnnnnnnnnnnnnnnnnnnnnnnnnnnnnnnnnnnnnnnnnnnnnnnnnnnnnnnnnnnnnnnnnnnnnnnnnnnnnnnnnnnnnnnnnnnnnnnnnnnnnnnnnnnnnnnnnnnnnnnnnnnnnnnnnnnnnnnnnnnnnnnnnnnnnnnnnnnnnnnnnnnnnnnnnnnnnnnnnnnnnnnnnnnnnnnnnnnnnnnnnnnnnnnnnnnnnnnnnnnnnnnnnnnnnnnnnnnnnnnnnnnnnnnnnnnnnnnnnnnnnnnnnnnnnnnnnnnnnnnnnnnnnnnnnnnnnnnnnnnnnnnnnnnnnnnnnnnnnnnnnnnnnnnnnnnnnnnnnnnnnnnnnnnnnnnnnnnnnnnnnnnnnnnnnnnnnnnnnnnnnnnnnnnnnnnnnnnnnnnnnnnnnnnnnnnnnnnnnnnnnnnnnnnnnnnnnnnnnnnnnnnnnnnnnnnnnnnnnnnnnnnnnnnnnnnnnnnnnnnnnnnnnnnnnnnnnnnnnnnnnnnnnnnnnnnnnnnnnnnnnnnnnnnnnnnnnnnnnnnnnnnnnnnnnnnnnnnnnnnnnnnnnnnnnnnnnnnnnnnnnnnnnnnnnnnnnnnnnnnnnnnnnnnnnnnnnnnnnnnnnnnnnnnnnnnnnnnnnnnnnnnnnnnnnnnnnnnnnnnnnnnnnnnnnnnnnnnnnnnnnnnnnnnnnnnnnnnnnnnnnnnnnnnnnnnnnnnnnnnnnnnnnnnnnnnnnnnnnnnnnnnnnnnnnnnnnnnnnnnnnnnnnnnnnnnnnnnnnnnnnnnnnnnnnnnnnnnnnnnnnnnnnnnnnnnnnnnnnnnnnnnnnnnnnnnnnnnnnnnnnnnnnnnnnnnnnnnnnnnnnnnnnnnnnnnnnnnnnnnnnnnnnnnnnnnnnnnnnnnnnnnnnnnnnnnnnnnnnnnnnnnnnnnnnnnnnnnnnnnnnnnnnnnnnnnnnnnnnnnnnnnnnnnnnnnnnnnnnnnnnnnnnnnnnnnnnnnnnnnnnnnnnnnnnnnnnnnnnnnnnnnnnnnnnnnnnnnnnnnnnnnnnnnnnnnnnnnnnnnnnnnnnnnnnnnnnnnnnnnnnnnnnnnnnnnnnnnnnnnnnnnnnnnnnnnnnnnnnnnnnnnnnnnnnnnnnnnnnnnnnnnnnnnnnnnnnnnnnnnnnnnnnnnnnnnnnnnnnnnnnnnnnnnnnnnnnnnnnnnnnnnnnnnnnnnnnnnnnnnnnnnnnnnnnnnnnnnnnnnnnnnnnnnnnnnnnnnnnnnnnnnnnnnnnnnnnnnnnnnnnnnnnnnnnnnnnnnnnnnnnnnnnnnnnnnnnnnnnnnnnnnnnnnnnnnnnnnnnnnnnnnnnnnnnnnnnnnnnnnnnnnnnnnnnnnnnnnnnnnnnnnnnnnnnnnnnnnnnnnnnnnnnnnnnnnnnnnnnnnnnnnnnnnnnnnnnnnnnnnnnnnnnnnnnnnnnnnnnnnnnnnnnnnnnnnnnnnnnnnnnnnnnnnnnnnnnnnnnnnnnnnnnnnnnnnnnnnnnnnnnnnnnnnnnnnnnnnnnnnnnnnnnnnnnnnnnnnnnnnnnnnnnnnnnnnnnnnnnnnnnnnnnnnnnnnnnnnnnnnnnnnnnnnnnnnnnnnnnnnnnnnnnnnnnnnnnnnnnnnnnnnnnnnnnnnnnnnnnnnnnnnnnnnnnnnnnnnnnnnnnnnnnnnnnnnnnnnnnnnnnnnnnnnnnnnnnnnnnnnnnnnnnnnnnnnnnnnnnnnnnnnnnnnnnnnnnnnnnnnnnnnnnnnnnnnnnnnnnnnnnnnnnnnnnnnnnnnnnnnnnnnnnnnnnnnnnnnnnnnnnnnnnnnnnnnnnnnnnnnnnnnnnnnnnnnnnnnnnnnnnnnnnnnnnnnnnnnnnnnnnnnnnnnnnnnnnnnnnnnnnnnnnnnnnnnnnnnnnnnnnnnnnnnnnnnnnnnnnnnnnnnnnnnnnnnnnnnnnnnnnnnnnnnnnnnnnnnnnnnnnnnnnnnnnnnnnnnnnnnnnnnnnnnnnnnnnnnnnnnnnnnnnnnnnnnnnnnnnnnnnnnnnnnnnnnnnnnnnnnnnnnnnnnnnnnnnnnnnnnnnnnnnnnnnnnnnnnnnnnnnnnnnnnnnnnnnnnnnnnnnnnnnnnnnnnnnnnnnnnnnnnnnnnnnnnnnnnnnnnnnnnnnnnnnnnnnnnnnnnnnnnnnnnnnnnnnnnnnnnnnnnnnnnnnnnnnnnnnnnnnnnnnnnnnnnnnnnnnnnnnnnnnnnnnnnnnnnnnnnnnnnnnnnnnnnnnnnnnnnnnnnnnnnnnnnnnnnnnnnnnnnnnnnnnnnnnnnnnnnnnnnnnnnnnnnnnnnnnnnnnnnnnnnnnnnnnnnnnnnnnnnnnnnnnnnnnnnnnnnnnnnnnnnnnnnnnnnnnnnnnnnnnnnnnnnnnnnnnnnnnnnnnnnnnnnnnnnnnnnnnnnnnnnnnnnnnnnnnnnnnnnnnnnnnnnnnnnnnnnnnnnnnnnnnnnnnnnnnnnnnnnnnnnnnnnnnnnnnnnnnnnnnnnnnnnnnnnnnnnnnnnnnnnnnnnnnnnnnnnnnnnnnnnnnnnnnnnnnnnnnnnnnnnnnnnnnnnnnnnnnnnnnnnnnnnnnnnnnnnnnnnnnnnnnnnnnnnnnnnnnnnnnnnnnnnnnnnnnnnnnnnnnnnnnnnnnnnnnnnnnnnnnnnnnnnnnnnnnnnnnnnnnnnnnnnnnnnnnnnnnnnnnnnnnnnnnnnnnnnnnnnnnnnnnnnnnnnnnnnnnnnnnnnnnnnnnnnnnnnnnnnnnnnnnnnnnnnnnnnnnnnnnnnnnnnnnnnnnnnnnnnnnnnnnnnnnnnnnnnnnnnnnnnnnnnnnnnnnnnnnnnnnnnnnnnnnnnnnnnnnnnnnnnnnnnnnnnnnnnnnnnnnnnnnnnnnnnnnnnnnnnnnnnnnnnnnnnnnnnnnnnnnnnnnnnnnnnnnnnnnnnnnnnnnnnnnnnnnnnnnnnnnnnnnnnnnnnnnnnnnnnnnnnnnnnnnnnnnnnnnnnnnnnnnnnnnnnnnnnnnnnnnnnnnnnnnnnnnnnnnnnnnnnnnnnnnnnnnnnnnnnnnnnnnnnnnnnnnnnnnnnnnnnnnnnnnnnnnnnnnnnnnnnnnnnnnnnnnnnnnnnnnnnnnnnnnnnnnnnnnnnnnnnnnnnnnnnnnnnnnnnnnnnnnnnnnnnnnnnnnnnnnnnnnnnnnnnnnnnnnnnnnnnnnnnnnnnnnnnnnnnnnnnnnnnnnnnnnnnnnnnnnnnnnnnnnnnnnnnnnnnnnnnnnnnnnnnnnnnnnnnnnnnnnnnnnnnnnnnnnnnnnnnnnnnnnnnnnnnnnnnnnnnnnnnnnnnnnnnnnnnnnnnnnnnnnnnnnnnnnnnnnnnnnnnnnnnnnnnnnnnnnnnnnnnnnnnnnnnnnnnnnnnnnnnnnnnnnnnnnnnnnnnnnnnnnnnnnnnnnnnnnnnnnnnnnnnnnnnnnnnnnnnnnnnnnnnnnnnnnnnnnnnnnnnnnnnnnnnnnnnnnnnnnnnnnnnnnnnnnnnnnnnnnnnnnnnnnnnnnnnnnnnnnnnnnnnnnnnnnnnnnnnnnnnnnnnnnnnnnnnnnnnnnnnnnnnnnnnnnnnnnnnnnnnnnnnnnnnnnnnnnnnnnnnnnnnnnnnnnnnnnnnnnnnnnnnnnnnnnnnnnnnnnnnnnnnnnnnnnnnnnnnnnnnnnnnnnnnnnnnnnnnnnnnnnnnnnnnnnnnnnnnnnnnnnnnnnnnnnnnnnnnnnnnnnnnnnnnnnnnnnnnnnnnnnnnnnnnnnnnnnnnnnnnnnnnnnnnnnnnnnnnnnnnnnnnnnnnnnnnnnnnnnnnnnnnnnnnnnnnnnnnnnnnnnnnnnnnnnnnnnnnnnnnnnnnnnnnnnnnnnnnnnnnnnnnnnnnnnnnnnnnnnnnnnnnnnnnnnnnnnnnnnnnnnnnnnnnnnnnnnnnnnnnnnnnnnnnnnnnnnnnnnnnnnnnnnnnnnnnnnnnnnnnnnnnnnnnnnnnnnnnnnnnnnnnnnnnnnnnnnnnnnnnnnnnnnnnnnnnnnnnnnnnnnnnnnnnnnnnnnnnnnnnnnnnnnnnnnnnnnnnnnnnnnnnnnnnnnnnnnnnnnnnnnnnnnnnnnnnnnnnnnnnnnnnnnnnnnnnnnnnnnnnnnnnnnnnnnnnnnnnnnnnnnnnnnnnnnnnnnnnnnnnnnnnnnnnnnnnnnnnnnnnnnnnnnnnnnnnnnnnnnnnnnnnnnnnnnnnnnnnnnnnnnnnnnnnnnnnnnnnnnnnnnnnnnnnnnnnnnnnnnnnnnnnnnnnnnnnnnnnnnnnnnnnnnnnnnnnnnnnnnnnnnnnnnnnnnnnnnnnnnnnnnnnnnnnnnnnnnnnnnnnnnnnnnnnnnnnnnnnnnnnnnnnnnnnnnnnnnnnnnnnnnnnnnnnnnnnnnnnnnnnnnnnnnnnnnnnnnnnnnnnnnnnnnnnnnnnnnnnnnnnnnnnnnnnnnnnnnnnnnnnnnnnnnnnnnnnnnnnnnnnnnnnnnnnnnnnnnnnnnnnnnnnnnnnnnnnnnnnnnnnnnnnnnnnnnnnnnnnnnnnnnnnnnnnnnnnnnnnnnnnnnnnnnnnnnnnnnnnnnnnnnnnnnnnnnnnnnnnnnnnnnnnnnnnnnnnnnnnnnnnnnnnnnnnnnnnnnnnnnnnnnnnnnnnnnnnnnnnnnnnnnnnnnnnnnnnnnnnnnnnnnnnnnnnnnnnnnnnnnnnnnnnnnnnnnnnnnnnnnnnnnnnnnnnnnnnnnnnnnnnnnnnnnnnnnnnnnnnnnnnnnnnnnnnnnnnnnnnnnnnnnnnnnnnnnnnnnnnnnnnnnnnnnnnnnnnnnnnnnnnnnnnnnnnnnnnnnnnnnnnnnnnnnnnnnnnnnnnnnnnnnnnnnnnnnnnnnnnnnnnnnnnnnnnnnnnnnnnnnnnnnnnnnnnnnnnnnnnnnnnnnnnnnnnnnnnnnnnnnnnnnnnnnnnnnnnnnnnnnnnnnnnnnnnnnnnnnnnnnnnnnnnnnnnnnnnnnnnnnnnnnnnnnnnnnnnnnnnnnnnnnnnnnnnnnnnnnnnnnnnnnnnnnnnnnnnnnnnnnnnnnnnnnnnnnnnnnnnnnnnnnnnnnnnnnnnnnnnnnnnnnnnnnnnnnnnnnnnnnnnnnnnnnnnnnnnnnnnnnnnnnnnnnnnnnnnnnnnnnnnnnnnnnnnnnnnnnnnnnnnnnnnnnnnnnnnnnnnnnnnnnnnnnnnnnnnnnnnnnnnnnnnnnnnnnnnnnnnnnnnnnnnnnnnnnnnnnnnnnnnnnnnnnnnnnnnnnnnnnnnnnnnnnnnnnnnnnnnnnnnnnnnnnnnnnnnnnnnnnnnnnnnnnnnnnnnnnnnnnnnnnnnnnnnnnnnnnnnnnnnnnnnnnnnnnnnnnnnnnnnnnnnnnnnnnnnnnnnnnnnnnnnnnnnnnnnnnnnnnnnnnnnnnnnnnnnnnnnnnnnnnnnnnnnnnnnnnnnnnnnnnnnnnnnnnnnnnnnnnnnnnnnnnnnnnnnnnnnnnnnnnnnnnnnnnnnnnnnnnnnnnnnnnnnnnnnnnnnnnnnnnnnnnnnnnnnnnnnnnnnnnnnnnnnnnnnnnnnnnnnnnnnnnnnnnnnnnnnnnnnnnnnnnnnnnnnnnnnnnnnnnnnnnnnnnnnnnnnnnnnnnnnnnnnnnnnnnnnnnnnnnnnnnnnnnnnnnnnnnnnnnnnnnnnnnnnnnnnnnnnnnnnnnnnnnnnnnnnnnnnnnnnnnnnnnnnnnnnnnnnnnnnnnnnnnnnnnnnnnnnnnnnnnnnnnnnnnnnnnnnnnnnnnnnnnnnnnnnnnnnnnnnnnnnnnnnnnnnnnnnnnnnnnnnnnnnnnnnnnnnnnnnnnnnnnnnnnnnnnnnnnnnnnnnnnnnnnnnnnnnnnnnnnnnnnnnnnnnnnnnnnnnnnnnnnnnnnnnnnnnnnnnnnnnnnnnnnnnnnnnnnnnnnnnnnnnnnnnnnnnnnnnnnnnnnnnnnnnnnnnnnnnnnnnnnnnnnnnnnnnnnnnnnnnnnnnnnnnnnnnnnnnnnnnnnnnnnnnnnnnnnnnnnnnnnnnnnnnnnnnnnnnnnnnnnnnnnnnnnnnnnnnnnnnnnnnnnnnnnnnnnnnnnnnnnnnnnnnnnnnnnnnnnnnnnnnnnnnnnnnnnnnnnnnnnnnnnnnnnnnnnnnnnnnnnnnnnnnnnnnnnnnnnnnnnnnnnnnnnnnnnnnnnnnnnnnnnnnnnnnnnnnnnnnnnnnnnnnnnnnnnnnnnnnnnnnnnnnnnnnnnnnnnnnnnnnnnnnnnnnnnnnnnnnnnnnnnnnnnnnnnnnnnnnnnnnnnnnnnnnnnnnnnnnnnnnnnnnnnnnnnnnnnnnnnnnnnnnnnnnnnnnnnnnnnnnnnnnnnnnnnnnnnnnnnnnnnnnnnnnnnnnnnnnnnnnnnnnnnnnnnnnnnnnnnnnnnnnnnnnnnnnnnnnnnnnnnnnnnnnnnnnnnnnnnnnnnnnnnnnnnnnnnnnnnnnnnnnnnnnnnnnnnnnnnnnnnnnnnnnnnnnnnnnnnnnnnnnnnnnnnnnnnnnnnnnnnnnnnnnnnnnnnnnnnnnnnnnnnnnnnnnnnnnnnnnnnnnnnnnnnnnnnnnnnnnnnnnnnnnnnnnnnnnnnnnnnnnnnnnnnnnnnnnnnnnnnnnnnnnnnnnnnnnnnnnnnnnnnnnnnnnnnnnnnnnnnnnnnnnnnnnnnnnnnnnnnnnnnnnnnnnnnnnnnnnnnnnnnnnnnnnnnnnnnnnnnnnnnnnnnnnnnnnnnnnnnnnnnnnnnnnnnnnnnnnnnnnnnnnnnnnnnnnnnnnnnnnnnnnnnnnnnnnnnnnnnnnnnnnnnnnnnnnnnnnnnnnnnnnnnnnnnnnnnnnnnnnnnnnnnnnnnnnnnnnnnnnnnnnnnnnnnnnnnnnnnnnnnnnnnnnnnnnnnnnnnnnnnnnnnnnnnnnnnnnnnnnnnnnnnnnnnnnnnnnnnnnnnnnnnnnnnnnnnnnnnnnnnnnnnnnnnnnnnnnnnnnnnnnnnnnnnnnnnnnnnnnnnnnnnnnnnnnnnnnnnnnnnnnnnnnnnnnnnnnnnnnnnnnnnnnnnnnnnnnnnnnnnnnnnnnnnnnnnnnnnnnnnnnnnnnnnnnnnnnnnnnnnnnnnnnnnnnnnnnnnnnnnnnnnnnnnnnnnnnnnnnnnnnnnnnnnnnnnnnnnnnnnnnnnnnnnnnnnnnnnnnnnnnnnnnnnnnnnnnnnnnnnnnnnnnnnnnnnnnnnnnnnnnnnnnnnnnnnnnnnnnnnnnnnnnnnnnnnnnnnnnnnnnnnnnnnnnnnnnnnnnnnnnnnnnnnnnnnnnnnnnnnnnnnnnnnnnnnnnnnnnnnnnnnnnnnnnnnnnnnnnnnnnnnnnnnnnnnnnnnnnnnnnnnnnnnnnnnnnnnnnnnnnnnnnnnnnnnnnnnnnnnnnnnnnnnnnnnnnnnnnnnnnnnnnnnnnnnnnnnnnnnnnnnnnnnnnnnnnnnnnnnnnnnnnnnnnnnnnnnnnnnnnnnnnnnnnnnnnnnnnnnnnnnnnnnnnnnnnnnnnnnnnnnnnnnnnnnnnnnnnnnnnnnnnnnnnnnnnnnnnnnnnnnnnnnnnnnnnnnnnnnnnnnnnnnnnnnnnnnnnnnnnnnnnnnnnnnnnnnnnnnnnnnnnnnnnnnnnnnnnnnnnnnnnnnnnnnnnnnnnnnnnnnnnnnnnnnnnnnnnnnnnnnnnnnnnnnnnnnnnnnnnnnnnnnnnnnnnnnnnnnnnnnnnnnnnnnnnnnnnnnnnnnnnnnnnnnnnnnnnnnnnnnnnnnnnnnnnnnnnnnnnnnnnnnnnnnnnnnnnnnnnnnnnnnnnnnnnnnnnnnnnnnnnnnnnnnnnnnnnnnnnnnnnnnnnnnnnnnnnnnnnnnnnnnnnnnnnnnnnnnnnnnnnnnnnnnnnnnnnnnnnnnnnnnnnnnnnnnnnnnnnnnnnnnnnnnnnnnnnnnnnnnnnnnnnnnnnnnnnnnnnnnnnnnnnnnnnnnnnnnnnnnnnnnnnnnnnnnnnnnnnnnnnnnnnnnnnnnnnnnnnnnnnnnnnnnnnnnnnnnnnnnnnnnnnnnnnnnnnnnnnnnnnnnnnnnnnnnnnnnnnnnnnnnnnnnnnnnnnnnnnnnnnnnnnnnnnnnnnnnnnnnnnnnnnnnnnnnnnnnnnnnnnnnnnnnnnnnnnnnnnnnnnnnnnnnnnnnnnnnnnnnnnnnnnnnnnnnnnnnnnnnnnnnnnnnnnnnnnnnnnnnnnnnnnnnnnnnnnnnnnnnnnnnnnnnnnnnnnnnnnnnnnnnnnnnnnnnnnnnnnnnnnnnnnnnnnnnnnnnnnnnnnnnnnnnnnnnnnnnnnnnnnnnnnnnnnnnnnnnnnnnnnnnnnnnnnnnnnnnnnnnnnnnnnnnnnnnnnnnnnnnnnnnnnnnnnnnnnnnnnnnnnnnnnnnnnnnnnnnnnnnnnnnnnnnnnnnnnnnnnnnnnnnnnnnnnnnnnnnnnnnnnnnnnnnnnnnnnnnnnnnnnnnnnnnnnnnnnnnnnnnnnnnnnnnnnnnnnnnnnnnnnnnnnnnnnnnnnnnnnnnnnnnnnnnnnnnnnnnnnnnnnnnnnnnnnnnnnnnnnnnnnnnnnnnnnnnnnnnnnnnnnnnnnnnnnnnnnnnnnnnnnnnnnnnnnnnnnnnnnnnnnnnnnnnnnnnnnnnnnnnnnnnnnnnnnnnnnnnnnnnnnnnnnnnnnnnnnnnnnnnnnnnnnnnnnnnnnnnnnnnnnnnnnnnnnnnnnnnnnnnnnnnnnnnnnnnnnnnnnnnnnnnnnnnnnnnnnnnnnnnnnnnnnnnnnnnnnnnnnnnnnnnnnnnnnnnnnnnnnnnnnnnnnnnnnnnnnnnnnnnnnnnnnnnnnnnnnnnnnnnnnnnnnnnnnnnnnnnnnnnnnnnnnnnnnnnnnnnnnnnnnnnnnnnnnnnnnnnnnnnnnnnnnnnnnnnnnnnnnnnnnnnnnnnnnnnnnnnnnnnnnnnnnnnnnnnnnnnnnnnnnnnnnnnnnnnnnnnnnnnnnnnnnnnnnnnnnnnnnnnnnnnnnnnnnnnnnnnnnnnnnnnnnnnnnnnnnnnnnnnnnnnnnnnnnnnnnnnnnnnnnnnnnnnnnnnnnnnnnnnnnnnnnnnnnnnnnnnnnnnnnnnnnnnnnnnnnnnnnnnnnnnnnnnnnnnnnnnnnnnnnnnnnnnnnnnnnnnnnnnnnnnnnnnnnnnnnnnnnnnnnnnnnnnnnnnnnnnnnnnnnnnnnnnnnnnnnnnnnnnnnnnnnnnnnnnnnnnnnnnnnnnnnnnnnnnnnnnnnnnnnnnnnnnnnnnnnnnnnnnnnnnnnnnnnnnnnnnnnnnnnnnnnnnnnnnnnnnnnnnnnnnnnnnnnnnnnnnnnnnnnnnnnnnnnnnnnnnnnnnnnnnnnnnnnnnnnnnnnnnnnnnnnnnnnnnnnnnnnnnnnnnnnnnnnnnnnnnnnnnnnnnnnnnnnnnnnnnnnnnnnnnnnnnnnnnnnnnnnnnnnnnnnnnnnnnnnnnnnnnnnnnnnnnnnnnnnnnnnnnnnnnnnnnnnnnnnnnnnnnnnnnnnnnnnnnnnnnnnnnnnnnnnnnnnnnnnnnnnnnnnnnnnnnnnnnnnnnnnnnnnnnnnnnnnnnnnnnnnnnnnnnnnnnnnnnnnnnnnnnnnnnnnnnnnnnnnnnnnnnnnnnnnnnnnnnnnnnnnnnnnnnnnnnnnnnnnnnnnnnnnnnnnnnnnnnnnnnnnnnnnnnnnnnnnnnnnnnnnnnnnnnnnnnnnnnnnnnnnnnnnnnnnnnnnnnnnnnnnnnnnnnnnnnnnnnnnnnnnnnnnnnnnnnnnnnnnnnnnnnnnnnnnnnnnnnnnnnnnnnnnnnnnnnnnnnnnnnnnnnnnnnnnnnnnnnnnnnnnnnnnnnnnnnnnnnnnnnnnnnnnnnnnnnnnnnnnnnnnnnnnnnnnnnnnnnnnnnnnnnnnnnnnnnnnnnnnnnnnnnnnnnnnnnnnnnnnnnnnnnnnnnnnnnnnnnnnnnnnnnnnnnnnnnnnnnnnnnnnnnnnnnnnnnnnnnnnnnnnnnnnnnnnnnnnnnnnnnnnnnnnnnnnnnnnnnnnnnnnnnnnnnnnnnnnnnnnnnnnnnnnnnnnnnnnnnnnnnnnnnnnnnnnnnnnnnnnnnnnnnnnnnnnnnnnnnnnnnnnnnnnnnnnnnnnnnnnnnnnnnnnnnnnnnnnnnnnnnnnnnnnnnnnnnnnnnnnnnnnnnnnnnnnnnnnnnnnnnnnnnnnnnnnnnnnnnnnnnnnnnnnnnnnnnnnnnnnnnnnnnnnnnnnnnnnnnnnnnnnnnnnnnnnnnnnnnnnnnnnnnnnnnnnnnnnnnnnnnnnnnnnnnnnnnnnnnnnnnnnnnnnnnnnnnnnnnnnnnnnnnnnnnnnnnnnnnnnnnnnnnnnnnnnnnnnnnnnnnnnnnnnnnnnnnnnnnnnnnnnnnnnnnnnnnnnnnnnnnnnnnnnnnnnnnnnnnnnnnnnnnnnnnnnnnnnnnnnnnnnnnnnnnnnnnnnnnnnnnnnnnnnnnnnnnnnnnnnnnnnnnnnnnnnnnnnnnnnnnnnnnnnnnnnnnnnnnnnnnnnnnnnnnnnnnnnnnnnnnnnnnnnnnnnnnnnnnnnnnnnnnnnnnnnnnnnnnnnnnnnnnnnnnnnnnnnnnnnnnnnnnnnnnnnnnnnnnnnnnnnnnnnnnnnnnnnnnnnnnnnnnnnnnnnnnnnnnnnnnnnnnnnnnnnnnnnnnnnnnnnnnnnnnnnnnnnnnnnnnnnnnnnnnnnnnnnnnnnnnnnnnnnnnnnnnnnnnnnnnnnnnnnnnnnnnnnnnnnnnnnnnnnnnnnnnnnnnnnnnnnnnnnnnnnnnnnnnnnnnnnnnnnnnnnnnnnnnnnnnnnnnnnnnnnnnnnnnnnnnnnnnnnnnnnnnnnnnnnnnnnnnnnnnnnnnnnnnnnnnnnnnnnnnnnnnnnnnnnnnnnnnnnnnnnnnnnnnnnnnnnnnnnnnnnnnnnnnnnnnnnnnnnnnnnnnnnnnnnnnnnnnnnnnnnnnnnnnnnnnnnnnnnnnnnnnnnnnnnnnnnnnnnnnnnnnnnnnnnnnnnnnnnnnnnnnnnnnnnnnnnnnnnnnnnnnnnnnnnnnnnnnnnnnnnnnnnnnnnnnnnnnnnnnnnnnnnnnnnnnnnnnnnnnnnnnnnnnnnnnnnnnnnnnnnnnnnnnnnnnnnnnnnnnnnnnnnnnnnnnnnnnnnnnnnnnnnnnnnnnnnnnnnnnnnnnnnnnnnnnnnnnnnnnnnnnnnnnnnnnnnnnnnnnnnnnnnnnnnnnnnnnnnnnnnnnnnnnnnnnnnnnnnnnnnnnnnnnnnnnnnnnnnnnnnnnnnnnnnnnnnnnnnnnnnnnnnnnnnnnnnnnnnnnnnnnnnnnnnnnnnnnnnnnnnnnnnnnnnnnnnnnnnnnnnnnnnnnnnnnnnnnnnnnnnnnnnnnnnnnnnnnnnnnnnnnnnnnnnnnnnnnnnnnnnnnnnnnnnnnnnnnnnnnnnnnnnnnnnnnnnnnnnnnnnnnnnnnnnnnnnnnnnnnnnnnnnnnnnnnnnnnnnnnnnnnnnnnnnnnnnnnnnnnnnnnnnnnnnnnnnnnnnnnnnnnnnnnnnnnnnnnnnnnnnnnnnnnnnnnnnnnnnnnnnnnnnnnnnnnnnnnnnnnnnnnnnnnnnnnnnnnnnnnnnnnnnnnnnnnnnnnnnnnnnnnnnnnnnnnnnnnnnnnnnnnnnnnnnnnnnnnnnnnnnnnnnnnnnnnnnnnnnnnnnnnnnnnnnnnnnnnnnnnnnnnnnnnnnnnnnnnnnnnnnnnnnnnnnnnnnnnnnnnnnnnnnnnnnnnnnnnnnnnnnnnnnnnnnnnnnnnnnnnnnnnnnnnnnnnnnnnnnnnnnnnnnnnnnnnnnnnnnnnnnnnnnnnnnnnnnnnnnnnnnnnnnnnnnnnnnnnnnnnnnnnnnnnnnnnnnnnnnnnnnnnnnnnnnnnnnnnnnnnnnnnnnnnnnnnnnnnnnnnnnnnnnnnnnnnnnnnnnnnnnnnnnnnnnnnnnnnnnnnnnnnnnnnnnnnnnnnnnnnnnnnnnnnnnnnnnnnnnnnnnnnnnnnnnnnnnnnnnnnnnnnnnnnnnnnnnnnnnnnnnnnnnnnnnnnnnnnnnnnnnnnnnnnnnnnnnnnnnnnnnnnnnnnnnnnnnnnnnnnnnnnnnnnnnnnnnnnnnnnnnnnnnnnnnnnnnnnnnnnnnnnnnnnnnnnnnnnnnnnnnnnnnnnnnnnnnnnnnnnnnnnnnnnnnnnnnnnnnnnnnnnnnnnnnnnnnnnnnnnnnnnnnnnnnnnnnnnnnnnnnnnnnnnnnnnnnnnnnnnnnnnnnnnnnnnnnnnnnnnnnnnnnnnnnnnnnnnnnnnnnnnnnnnnnnnnnnnnnnnnnnnnnnnnnnnnnnnnnnnnnnnnnnnnnnnnnnnnnnnnnnnnnnnnnnnnnnnnnnnnnnnnnnnnnnnnnnnnnnnnnnnnnnnnnnnnnnnnnnnnnnnnnnnnnnnnnnnnnnnnnnnnnnnnnnnnnnnnnnnnnnnnnnnnnnnnnnnnnnnnnnnnnnnnnnnnnnnnnnnnnnnnnnnnnnnnnnnnnnnnnnnnnnnnnnnnnnnnnnnnnnnnnnnnnnnnnnnnnnnnnnnnnnnnnnnnnnnnnnnnnnnnnnnnnnnnnnnnnnnnnnnnnnnnnnnnnnnnnnnnnnnnnnnnnnnnnnnnnnnnnnnnnnnnnnnnnnnnnnnnnnnnnnnnnnnnnnnnnnnnnnnnnnnnnnnnnnnnnnnnnnnnnnnnnnnnnnnnnnnnnnnnnnnnnnnnnnnnnnnnnnnnnnnnnnnnnnnnnnnnnnnnnnnnnnnnnnnnnnnnnnnnnnnnnnnnnnnnnnnnnnnnnnnnnnnnnnnnnnnnnnnnnnnnnnnnnnnnnnnnnnnnnnnnnnnnnnnnnnnnnnnnnnnnnnnnnnnnnnnnnnnnnnnnnnnnnnnnnnnnnnnnnnnnnnnnnnnnnnnnnnnnnnnnnnnnnnnnnnnnnnnnnnnnnnnnnnnnnnnnnnnnnnnnnnnnnnnnnnnnnnnnnnnnnnnnnnnnnnnnnnnnnnnnnnnnnnnnnnnnnnnnnnnnnnnnnnnnnnnnnnnnnnnnnnnnnnnnnnnnnnnnnnnnnnnnnnnnnnnnnnnnnnnnnnnnnnnnnnnnnnnnnnnnnnnnnnnnnnnnnnnnnnnnnnnnnnnnnnnnnnnnnnnnnnnnnnnnnnnnnnnnnnnnnnnnnnnnnnnnnnnnnnnnnnnnnnnnnnnnnnnnnnnnnnnnnnnnnnnnnnnnnnnnnnnnnnnnnnnnnnnnnnnnnnnnnnnnnnnnnnnnnnnnnnnnnnnnnnnnnnnnnnnnnnnnnnnnnnnnnnnnnnnnnnnnnnnnnnnnnnnnnnnnnnnnnnnnnnnnnnnnnnnnnnnnnnnnnnnnnnnnnnnnnnnnnnnnnnnnnnnnnnnnnnnnnnnnnnnnnnnnnnnnnnnnnnnnnnnnnnnnnnnnnnnnnnnnnnnnnnnnnnnnnnnnnnnnnnnnnnnnnnnnnnnnnnnnnnnnnnnnnnnnnnnnnnnnnnnnnnnnnnnnnnnnnnnnnnnnnnnnnnnnnnnnnnnnnnnnnnnnnnnnnnnnnnnnnnnnnnnnnnnnnnnnnnnnnnnnnnnnnnnnnnnnnnnnnnnnnnnnnnnnnnnnnnnnnnnnnnnnnnnnnnnnnnnnnnnnnnnnnnnnnnnnnnnnnnnnnnnnnnnnnnnnnnnnnnnnnnnnnnnnnnnnnnnnnnnnnnnnnnnnnnnnnnnnnnnnnnnnnnnnnnnnnnnnnnnnnnnnnnnnnnnnnnnnnnnnnnnnnnnnnnnnnnnnnnnnnnnnnnnnnnnnnnnnnnnnnnnnnnnnnnnnnnnnnnnnnnnnnnnnnnnnnnnnnnnnnnnnnnnnnnnnnnnnnnnnnnnnnnnnnnnnnnnnnnnnnnnnnnnnnnnnnnnnnnnnnnnnnnnnnnnnnnnnnnnnnnnnnnnnnnnnnnnnnnnnnnnnnnnnnnnnnnnnnnnnnnnnnnnnnnnnnnnnnnnnnnnnnnnnnnnnnnnnnnnnnnnnnnnnnnnnnnnnnnnnnnnnnnnnnnnnnnnnnnnnnnnnnnnnnnnnnnnnnnnnnnnnnnnnnnnnnnnnnnnnnnnnnnnnnnnnnnnnnnnnnnnnnnnnnnnnnnnnnnnnnnnnnnnnnnnnnnnnnnnnnnnnnnnnnnnnnnnnnnnnnnnnnnnnnnnnnnnnnnnnnnnnnnnnnnnnnnnnnnnnnnnnnnnnnnnnnnnnnnnnnnnnnnnnnnnnnnnnnnnnnnnnnnnnnnnnnnnnnnnnnnnnnnnnnnnnnnnnnnnnnnnnnnnnnnnnnnnnnnnnnnnnnnnnnnnnnnnnnnnnnnnnnnnnnnnnnnnnnnnnnnnnnnnnnnnnnnnnnnnnnnnnnnnnnnnnnnnnnnnnnnnnnnnnnnnnnnnnnnnnnnnnnnnnnnnnnnnnnnnnnnnnnnnnnnnnnnnnnnnnnnnnnnnnnnnnnnnnnnnnnnnnnnnnnnnnnnnnnnnnnnnnnnnnnnnnnnnnnnnnnnnnnnnnnnnnnnnnnnnnnnnnnnnnnnnnnnnnnnnnnnnnnnnnnnnnnnnnnnnnnnnnnnnnnnnnnnnnnnnnnnnnnnnnnnnnnnnnnnnnnnnnnnnnnnnnnnnnnnnnnnnnnnnnnnnnnnnnnnnnnnnnnnnnnnnnnnnnnnnnnnnnnnnnnnnnnnnnnnnnnnnnnnnnnnnnnnnnnnnnnnnnnnnnnnnnnnnnnnnnnnnnnnnnnnnnnnnnnnnnnnnnnnnnnnnnnnnnnnnnnnnnnnnnnnnnnnnnnnnnnnnnnnnnnnnnnnnnnnnnnnnnnnnnnnnnnnnnnnnnnnnnnnnnnnnnnnnnnnnnnnnnnnnnnnnnnnnnnnnnnnnnnnnnnnnnnnnnnnnnnnnnnnnnnnnnnnnnnnnnnnnnnnnnnnnnnnnnnnnnnnnnnnnnnnnnnnnnnnnnnnnnnnnnnnnnnnnnnnnnnnnnnnnnnnnnnnnnnnnnnnnnnnnnnnnnnnnnnnnnnnnnnnnnnnnnnnnnnnnnnnnnnnnnnnnnnnnnnnnnnnnnnnnnnnnnnnnnnnnnnnnnnnnnnnnnnnnnnnnnnnnnnnnnnnnnnnnnnnnnnnnnnnnnnnnnnnnnnnnnnnnnnnnnnnnnnnnnnnnnnnnnnnnnnnnnnnnnnnnnnnnnnnnnnnnnnnnnnnnnnnnnnnnnnnnnnnnnnnnnnnnnnnnnnnnnnnnnnnnnnnnnnnnnnnnnnnnnnnnnnnnnnnnnnnnnnnnnnnnnnnnnnnnnnnnnnnnnnnnnnnnnnnnnnnnnnnnnnnnnnnnnnnnnnnnnnnnnnnnnnnnnnnnnnnnnnnnnnnnnnnnnnnnnnnnnnnnnnnnnnnnnnnnnnnnnnnnnnnnnnnnnnnnnnnnnnnnnnnnnnnnnnnnnnnnnnnnnnnnnnnnnnnnnnnnnnnnnnnnnnnnnnnnnnnnnnnnnnnnnnnnnnnnnnnnnnnnnnnnnnnnnnnnnnnnnnnnnnnnnnnnnnnnnnnnnnnnnnnnnnnnnnnnnnnnnnnnnnnnnnnnnnnnnnnnnnnnnnnnnnnnnnnnnnnnnnnnnnnnnnnnnnnnnnnnnnnnnnnnnnnnnnnnnnnnnnnnnnnnnnnnnnnnnnnnnnnnnnnnnnnnnnnnnnnnnnnnnnnnnnnnnnnnnnnnnnnnnnnnnnnnnnnnnnnnnnnnnnnnnnnnnnnnnnnnnnnnnnnnnnnnnnnnnnnnnnnnnnnnnnnnnnnnnnnnnnnnnnnnnnnnnnnnnnnnnnnnnnnnnnnnnnnnnnnnnnnnnnnnnnnnnnnnnnnnnnnnnnnnnnnnnnnnnnnnnnnnnnnnnnnnnnnnnnnnnnnnnnnnnnnnnnnnnnnnnnnnnnnnnnnnnnnnnnnnnnnnnnnnnnnnnnnnnnnnnnnnnnnnnnnnnnnnnnnnnnnnnnnnnnnnnnnnnnnnnnnnnnnnnnnnnnnnnnnnnnnnnnnnnnnnnnnnnnnnnnnnnnnnnnnnnnnnnnnnnnnnnnnnnnnnnnnnnnnnnnnnnnnnnnnnnnnnnnnnnnnnnnnnnnnnnnnnnnnnnnnnnnnnnnnnnnnnnnnnnnnnnnnnnnnnnnnnnnnnnnnnnnnnnnnnnnnnnnnnnnnnnnnnnnnnnnnnnnnnnnnnnnnnnnnnnnnnnnnnnnnnnnnnnnnnnnnnnnnnnnnnnnnnnnnnnnnnnnnnnnnnnnnnnnnnnnnnnnnnnnnnnnnnnnnnnnnnnnnnnnnnnnnnnnnnnnnnnnnnnnnnnnnnnnnnnnnnnnnnnnnnnnnnnnnnnnnnnnnnnnnnnnnnnnnnnnnnnnnnnnnnnnnnnnnnnnnnnnnnnnnnnnnnnnnnnnnnnnnnnnnnnnnnnnnnnnnnnnnnnnnnnnnnnnnnnnnnnnnnnnnnnnnnnnnnnnnnnnnnnnnnnnnnnnnnnnnnnnnnnnnnnnnnnnnnnnnnnnnnnnnnnnnnnnnnnnnnnnnnnnnnnnnnnnnnnnnnnnnnnnnnnnnnnnnnnnnnnnnnnnnnnnnnnnnnnnnnnnnnnnnnnnnnnnnnnnnnnnnnnnnnnnnnnnnnnnnnnnnnnnnnnnnnnnnnnnnnnnnnnnnnnnnnnnnnnnnnnnnnnnnnnnnnnnnnnnnnnnnnnnnnnnnnnnnnnnnnnnnnnnnnnnnnnnnnnnnnnnnnnnnnnnnnnnnnnnnnnnnnnnnnnnnnnnnnnnnnnnnnnnnnnnnnnnnnnnnnnnnnnnnnnnnnnnnnnnnnnnnnnnnnnnnnnnnnnnnnnnnnnnnnnnnnnnnnnnnnnnnnnnnnnnnnnnnnnnnnnnnnnnnnnnnnnnnnnnnnnnnnnnnnnnnnnnnnnnnnnnnnnnnnnnnnnnnnnnnnnnnnnnnnnnnnnnnnnnnnnnnnnnnnnnnnnnnnnnnnnnnnnnnnnnnnnnnnnnnnnnnnnnnnnnnnnnnnnnnnnnnnnnnnnnnnnnnnnnnnnnnnnnnnnnnnnnnnnnnnnnnnnnnnnnnnnnnnnnnnnnnnnnnnnnnnnnnnnnnnnnnnnnnnnnnnnnnnnnnnnnnnnnnnnnnnnnnnnnnnnnnnnnnnnnnnnnnnnnnnnnnnnnnnnnnnnnnnnnnnnnnnnnnnnnnnnnnnnnnnnnnnnnnnnnnnnnnnnnnnnnnnnnnnnnnnnnnnnnnnnnnnnnnnnnnnnnnnnnnnnnnnnnnnnnnnnnnnnnnnnnnnnnnnnnnnnnnnnnnnnnnnnnnnnnnnnnnnnnnnnnnnnnnnnnnnnnnnnnnnnnnnnnnnnnnnnnnnnnnnnnnnnnnnnnnnnnnnnnnnnnnnnnnnnnnnnnnnnnnnnnnnnnnnnnnnnnnnnnnnnnnnnnnnnnnnnnnnnnnnnnnnnnnnnnnnnnnnnnnnnnnnnnnnnnnnnnnnnnnnnnnnnnnnnnnnnnnnnnnnnnnnnnnnnnnnnnnnnnnnnnnnnnnnnnnnnnnnnnnnnnnnnnnnnnnnnnnnnnnnnnnnnnnnnnnnnnnnnnnnnnnnnnnnnnnnnnnnnnnnnnnnnnnnnnnnnnnnnnnnnnnnnnnnnnnnnnnnnnnnnnnnnnnnnnnnnnnnnnnnnnnnnnnnnnnnnnnnnnnnnnnnnnnnnnnnnnnnnnnnnnnnnnnnnnnnnnnnnnnnnnnnnnnnnnnnnnnnnnnnnnnnnnnnnnnnnnnnnnnnnnnnnnnnnnnnnnnnnnnnnnnnnnnnnnnnnnnnnnnnnnnnnnnnnnnnnnnnnnnnnnnnnnnnnnnnnnnnnnnnnnnnnnnnnnnnnnnnnnnnnnnnnnnnnnnnnnnnnnnnnnnnnnnnnnnnnnnnnnnnnnnnnnnnnnnnnnnnnnnnnnnnnnnnnnnnnnnnnnnnnnnnnnnnnnnnnnnnnnnnnnnnnnnnnnnnnnnnnnnnnnnnnnnnnnnnnnnnnnnnnnnnnnnnnnnnnnnnnnnnnnnnnnnnnnnnnnnnnnnnnnnnnnnnnnnnnnnnnnnnnnnnnnnnnnnnnnnnnnnnnnnnnnnnnnnnnnnnnnnnnnnnnnnnnnnnnnnnnnnnnnnnnnnnnnnnnnnnnnnnnnnnnnnnnnnnnnnnnnnnnnnnnnnnnnnnnnnnnnnnnnnnnnnnnnnnnnnnnnnnnnnnnnnnnnnnnnnnnnnnnnnnnnnnnnnnnnnnnnnnnnnnnnnnnnnnnnnnnnnnnnnnnnnnnnnnnnnnnnnnnnnnnnnnnnnnnnnnnnnnnnnnnnnnnnnnnnnnnnnnnnnnnnnnnnnnnnnnnnnnnnnnnnnnnnnnnnnnnnnnnnnnnnnnnnnnnnnnnnnnnnnnnnnnnnnnnnnnnnnnnnnnnnnnnnnnnnnnnnnnnnnnnnnnnnnnnnnnnnnnnnnnnnnnnnnnnnnnnnnnnnnnnnnnnnnnnnnnnnnnnnnnnnnnnnnnnnnnnnnnnnnnnnnnnnnnnnnnnnnnnnnnnnnnnnnnnnnnnnnnnnnnnnnnnnnnnnnnnnnnnnnnnnnnnnnnnnnnnnnnnnnnnnnnnnnnnnnnnnnnnnnnnnnnnnnnnnnnnnnnnnnnnnnnnnnnnnnnnnnnnnnnnnnnnnnnnnnnnnnnnnnnnnnnnnnnnnnnnnnnnnnnnnnnnnnnnnnnnnnnnnnnnnnnnnnnnnnnnnnnnnnnnnnnnnnnnnnnnnnnnnnnnnnnnnnnnnnnnnnnnnnnnnnnnnnnnnnnnnnnnnnnnnnnnnnnnnnnnnnnnnnnnnnnnnnnnnnnnnnnnnnnnnnnnnnnnnnnnnnnnnnnnnnnnnnnnnnnnnnnnnnnnnnnnnnnnnnnnnnnnnnnnnnnnnnnnnnnnnnnnnnnnnnnnnnnnnnnnnnnnnnnnnnnnnnnnnnnnnnnnnnnnnnnnnnnnnnnnnnnnnnnnnnnnnnnnnnnnnnnnnnnnnnnnnnnnnnnnnnnnnnnnnnnnnnnnnnnnnnnnnnnnnnnnnnnnnnnnnnnnnnnnnnnnnnnnnnnnnnnnnnnnnnnnnnnnnnnnnnnnnnnnnnnnnnnnnnnnnnnnnnnnnnnnnnnnnnnnnnnnnnnnnnnnnnnnnnnnnnnnnnnnnnnnnnnnnnnnnnnnnnnnnnnnnnnnnnnnnnnnnnnnnnnnnnnnnnnnnnnnnnnnnnnnnnnnnnnnnnnnnnnnnnnnnnnnnnnnnnnnnnnnnnnnnnnnnnnnnnnnnnnnnnnnnnnnnnnnnnnnnnnnnnnnnnnnnnnnnnnnnnnnnnnnnnnnnnnnnnnnnnnnnnnnnnnnnnnnnnnnnnnnnnnnnnnnnnnnnnnnnnnnnnnnnnnnnnnnnnnnnnnnnnnnnnnnnnnnnnnnnnnnnnnnnnnnnnnnnnnnnnnnnnnnnnnnnnnnnnnnnnnnnnnnnnnnnnnnnnnnnnnnnnnnnnnnnnnnnnnnnnnnnnnnnnnnnnnnnnnnnnnnnnnnnnnnnnnnnnnnnnnnnnnnnnnnnnnnnnnnnnnnnnnnnnnnnnnnnnnnnnnnnnnnnnnnnnnnnnnnnnnnnnnnnnnnnnnnnnnnnnnnnnnnnnnnnnnnnnnnnnnnnnnnnnnnnnnnnnnnnnnnnnnnnnnnnnnnnnnnnnnnnnnnnnnnnnnnnnnnnnnnnnnnnnnnnnnnnnnnnnnnnnnnnnnnnnnnnnnnnnnnnnnnnnnnnnnnnnnnnnnnnnnnnnnnnnnnnnnnnnnnnnnnnnnnnnnnnnnnnnnnnnnnnnnnnnnnnnnnnnnnnnnnnnnnnnnnnnnnnnnnnnnnnnnnnnnnnnnnnnnnnnnnnnnnnnnnnnnnnnnnnnnnnnnnnnnnnnnnnnnnnnnnnnnnnnnnnnnnnnnnnnnnnnnnnnnnnnnnnnnnnnnnnnnnnnnnnnnnnnnnnnnnnnnnnnnnnnnnnnnnnnnnnnnnnnnnnnnnnnnnnnnnnnnnnnnnnnnnnnnnnnnnnnnnnnnnnnnnnnnnnnnnnnnnnnnnnnnnnnnnnnnnnnnnnnnnnnnnnnnnnnnnnnnnnnnnnnnnnnnnnnnnnnnnnnnnnnnnnnnnnnnnnnnnnnnnnnnnnnnnnnnnnnnnnnnnnnnnnnnnnnnnnnnnnnnnnnnnnnnnnnnnnnnnnnnnnnnnnnnnnnnnnnnnnnnnnnnnnnnnnnnnnnnnnnnnnnnnnnnnnnnnnnnnnnnnnnnnnnnnnnnnnnnnnnnnnnnnnnnnnnnnnnnnnnnnnnnnnnnnnnnnnnnnnnnnnnnnnnnnnnnnnnnnnnnnnnnnnnnnnnnnnnnnnnnnnnnnnnnnnnnnnnnnnnnnnnnnnnnnnnnnnnnnnnnnnnnnnnnnnnnnnnnnnnnnnnnnnnnnnnnnnnnnnnnnnnnnnnnnnnnnnnnnnnnnnnnnnnnnnnnnnnnnnnnnnnnnnnnnnnnnnnnnnnnnnnnnnnnnnnnnnnnnnnnnnnnnnnnnnnnnnnnnnnnnnnnnnnnnnnnnnnnnnnnnnnnnnnnnnnnnnnnnnnnnnnnnnnnnnnnnnnnnnnnnnnnnnnnnnnnnnnnnnnnnnnnnnnnnnnnnnnnnnnnnnnnnnnnnnnnnnnnnnnnnnnnnnnnnnnnnnnnnnnnnnnnnnnnnnnnnnnnnnnnnnnnnnnnnnnnnnnnnnnnnnnnnnnnnnnnnnnnnnnnnnnnnnnnnnnnnnnnnnnnnnnnnnnnnnnnnnnnnnnnnnnnnnnnnnnnnnnnnnnnnnnnnnnnnnnnnnnnnnnnnnnnnnnnnnnnnnnnnnnnnnnnnnnnnnnnnnnnnnnnnnnnnnnnnnnnnnnnnnnnnnnnnnnnnnnnnnnnnnnnnnnnnnnnnnnnnnnnnnnnnnnnnnnnnnnnnnnnnnnnnnnnnnnnnnnnnnnnnnnnnnnnnnnnnnnnnnnnnnnnnnnnnnnnnnnnnnnnnnnnnnnnnnnnnnnnnnnnnnnnnnnnnnnnnnnnnnnnnnnnnnnnnnnnnnnnnnnnnnnnnnnnnnnnnnnnnnnnnnnnnnnnnnnnnnnnnnnnnnnnnnnnnnnnnnnnnnnnnnnnnnnnnnnnnnnnnnnnnnnnnnnnnnnnnnnnnnnnnnnnnnnnnnnnnnnnnnnnnnnnnnnnnnnnnnnnnnnnnnnnnnnnnnnnnnnnnnnnnnnnnnnnnnnnnnnnnnnnnnnnnnnnnnnnnnnnnnnnnnnnnnnnnnnnnnnnnnnnnnnnnnnnnnnnnnnnnnnnnnnnnnnnnnnnnnnnnnnnnnnnnnnnnnnnnnnnnnnnnnnnnnnnnnnnnnnnnnnnnnnnnnnnnnnnnnnnnnnnnnnnnnnnnnnnnnnnnnnnnnnnnnnnnnnnnnnnnnnnnnnnnnnnnnnnnnnnnnnnnnnnnnnnnnnnnnnnnnnnnnnnnnnnnnnnnnnnnnnnnnnnnnnnnnnnnnnnnnnnnnnnnnnnnnnnnnnnnnnnnnnnnnnnnnnnnnnnnnnnnnnnnnnnnnnnnnnnnnnnnnnnnnnnnnnnnnnnnnnnnnnnnnnnnnnnnnnnnnnnnnnnnnnnnnnnnnnnnnnnnnnnnnnnnnnnnnnnnnnnnnnnnnnnnnnnnnnnnnnnnnnnnnnnnnnnnnnnnnnnnnnnnnnnnnnnnnnnnnnnnnnnnnnnnnnnnnnnnnnnnnnnnnnnnnnnnnnnnnnnnnnnnnnnnnnnnnnnnnnnnnnnnnnnnnnnnnnnnnnnnnnnnnnnnnnnnnnnnnnnnnnnnnnnnnnnnnnnnnnnnnnnnnnnnnnnnnnnnnnnnnnnnnnnnnnnnnnnnnnnnnnnnnnnnnnnnnnnnnnnnnnnnnnnnnnnnnnnnnnnnnnnnnnnnnnnnnnnnnnnnnnnnnnnnnnnnnnnnnnnnnnnnnnnnnnnnnnnnnnnnnnnnnnnnnnnnnnnnnnnnnnnnnnnnnnnnnnnnnnnnnnnnnnnnnnnnnnnnnnnnnnnnnnnnnnnnnnnnnnnnnnnnnnnnnnnnnnnnnnnnnnnnnnnnnnnnnnnnnnnnnnnnnnnnnnnnnnnnnnnnnnnnnnnnnnnnnnnnnnnnnnnnnnnnnnnnnnnnnnnnnnnnnnnnnnnnnnnnnnnnnnnnnnnnnnnnnnnnnnnnnnnnnnnnnnnnnnnnnnnnnnnnnnnnnnnnnnnnnnnnnnnnnnnnnnnnnnnnnnnnnnnnnnnnnnnnnnnnnnnnnnnnnnnnnnnnnnnnnnnnnnnnnnnnnnnnnnnnnnnnnnnnnnnnnnnnnnnnnnnnnnnnnnnnnnnnnnnnnnnnnnnnnnnnnnnnnnnnnnnnnnnnnnnnnnnnnnnnnnnnnnnnnnnnnnnnnnnnnnnnnnnnnnnnnnnnnnnnnnnnnnnnnnnnnnnnnnnnnnnnnnnnnnnnnnnnnnnnnnnnnnnnnnnnnnnnnnnnnnnnnnnnnnnnnnnnnnnnnnnnnnnnnnnnnnnnnnnnnnnnnnnnnnnnnnnnnnnnnnnnnnnnnnnnnnnnnnnnnnnnnnnnnnnnnnnnnnnnnnnnnnnnnnnnnnnnnnnnnnnnnnnnnnnnnnnnnnnnnnnnnnnnnnnnnnnnnnnnnnnnnnnnnnnnnnnnnnnnnnnnnnnnnnnnnnnnnnnnnnnnnnnnnnnnnnnnnnnnnnnnnnnnnnnnnnnnnnnnnnnnnnnnnnnnnnnnnnnnnnnnnnnnnnnnnnnnnnnnnnnnnnnnnnnnnnnnnnnnnnnnnnnnnnnnnnnnnnnnnnnnnnnnnnnnnnnnnnnnnnnnnnnnnnnnnnnnnnnnnnnnnnnnnnnnnnnnnnnnnnnnnnnnnnnnnnnnnnnnnnnnnnnnnnnnnnnnnnnnnnnnnnnnnnnnnnnnnnnnnnnnnnnnnnnnnnnnnnnnnnnnnnnnnnnnnnnnnnnnnnnnnnnnnnnnnnnnnnnnnnnnnnnnnnnnnnnnnnnnnnnnnnnnnnnnnnnnnnnnnnnnnnnnnnnnnnnnnnnnnnnnnnnnnnnnnnnnnnnnnnnnnnnnnnnnnnnnnnnnnnnnnnnnnnnnnnnnnnnnnnnnnnnnnnnnnnnnnnnnnnnnnnnnnnnnnnnnnnnnnnnnnnnnnnnnnnnnnnnnnnnnnnnnnnnnnnnnnnnnnnnnnnnnnnnnnnnnnnnnnnnnnnnnnnnnnnnnnnnnnnnnnnnnnnnnnnnnnnnnnnnnnnnnnnnnnnnnnnnnnnnnnnnnnnnnnnnnnnnnnnnnnnnnnnnnnnnnnnnnnnnnnnnnnnnnnnnnnnnnnnnnnnnnnnnnnnnnnnnnnnnnnnnnnnnnnnnnnnnnnnnnnnnnnnnnnnnnnnnnnnnnnnnnnnnnnnnnnnnnnnnnnnnnnnnnnnnnnnnnnnnnnnnnnnnnnnnnnnnnnnnnnnnnnnnnnnnnnnnnnnnnnnnnnnnnnnnnnnnnnnnnnnnnnnnnnnnnnnnnnnnnnnnnnnnnnnnnnnnnnnnnnnnnnnnnnnnnnnnnnnnnnnnnnnnnnnnnnnnnnnnnnnnnnnnnnnnnnnnnnnnnnnnnnnnnnnnnnnnnnnnnnnnnnnnnnnnnnnnnnnnnnnnnnnnnnnnnnnnnnnnnnnnnnnnnnnnnnnnnnnnnnnnnnnnnnnnnnnnnnnnnnnnnnnnnnnnnnnnnnnnnnnnnnnnnnnnnnnnnnnnnnnnnnnnnnnnnnnnnnnnnnnnnnnnnnnnnnnnnnnnnnnnnnnnnnnnnnnnnnnnnnnnnnnnnnnnnnnnnnnnnnnnnnnnnnnnnnnnnnnnnnnnnnnnnnnnnnnnnnnnnnnnnnnnnnnnnnnnnnnnnnnnnnnnnnnnnnnnnnnnnnnnnnnnnnnnnnnnnnnnnnnnnnnnnnnnnnnnnnnnnnnnnnnnnnnnnnnnnnnnnnnnnnnnnnnnnnnnnnnnnnnnnnnnnnnnnnnnnnnnnnnnnnnnnnnnnnnnnnnnnnnnnnnnnnnnnnnnnnnnnnnnnnnnnnnnnnnnnnnnnnnnnnnnnnnnnnnnnnnnnnnnnnnnnnnnnnnnnnnnnnnnnnnnnnnnnnnnnnnnnnnnnnnnnnnnnnnnnnnnnnnnnnnnnnnnnnnnnnnnnnnnnnnnnnnnnnnnnnnnnnnnnnnnnnnnnnnnnnnnnnnnnnnnnnnnnnnnnnnnnnnnnnnnnnnnnnnnnnnnnnnnnnnnnnnnnnnnnnnnnnnnnnnnnnnnnnnnnnnnnnnnnnnnnnnnnnnnnnnnnnnnnnnnnnnnnnnnnnnnnnnnnnnnnnnnnnnnnnnnnnnnnnnnnnnnnnnnnnnnnnnnnnnnnnnnnnnnnnnnnnnnnnnnnnnnnnnnnnnnnnnnnnnnnnnnnnnnnnnnnnnnnnnnnnnnnnnnnnnnnnnnnnnnnnnnnnnnnnnnnnnnnnnnnnnnnnnnnnnnnnnnnnnnnnnnnnnnnnnnnnnnnnnnnnnnnnnnnnnnnnnnnnnnnnnnnnnnnnnnnnnnnnnnnnnnnnnnnnnnnnnnnnnnnnnnnnnnnnnnnnnnnnnnnnnnnnnnnnnnnnnnnnnnnnnnnnnnnnnnnnnnnnnnnnnnnnnnnnnnnnnnnnnnnnnnnnnnnnnnnnnnnnnnnnnnnnnnnnnnnnnnnnnnnnnnnnnnnnnnnnnnnnnnnnnnnnnnnnnnnnnnnnnnnnnnnnnnnnnnnnnnnnnnnnnnnnnnnnnnnnnnnnnnnnnnnnnnnnnnnnnnnnnnnnnnnnnnnnnnnnnnnnnnnnnnnnnnnnnnnnnnnnnnnnnnnnnnnnnnnnnnnnnnnnnnnnnnnnnnnnnnnnnnnnnnnnnnnnnnnnnnnnnnnnnnnnnnnnnnnnnnnnnnnnnnnnnnnnnnnnnnnnnnnnnnnnnnnnnnnnnnnnnnnnnnnnnnnnnnnnnnnnnnnnnnnnnnnnnnnnnnnnnnnnnnnnnnnnnnnnnnnnnnnnnnnnnnnnnnnnnnnnnnnnnnnnnnnnnnnnnnnnnnnnnnnnnnnnnnnnnnnnnnnnnnnnnnnnnnnnnnnnnnnnnnnnnnnnnnnnnnnnnnnnnnnnnnnnnnnnnnnnnnnnnnnnnnnnnnnnnnnnnnnnnnnnnnnnnnnnnnnnnnnnnnnnnnnnnnnnnnnnnnnnnnnnnnnnnnnnnnnnnnnnnnnnnnnnnnnnnnnnnnnnnnnnnnnnnnnnnnnnnnnnnnnnnnnnnnnnnnnnnnnnnnnnnnnnnnnnnnnnnnnnnnnnnnnnnnnnnnnnnnnnnnnnnnnnnnnnnnnnnnnnnnnnnnnnnnnnnnnnnnnnnnnnnnnnnnnnnnnnnnnnnnnnnnnnnnnnnnnnnnnnnnnnnnnnnnnnnnnnnnnnnnnnnnnnnnnnnnnnnnnnnnnnnnnnnnnnnnnnnnnnnnnnnnnnnnnnnnnnnnnnnnnnnnnnnnnnnnnnnnnnnnnnnnnnnnnnnnnnnnnnnnnnnnnnnnnnnnnnnnnnnnnnnnnnnnnnnnnnnnnnnnnnnnnnnnnnnnnnnnnnnnnnnnnnnnnnnnnnnnnnnnnnnnnnnnnnnnnnnnnnnnnnnnnnnnnnnnnnnnnnnnnnnnnnnnnnnnnnnnnnnnnnnnnnnnnnnnnnnnnnnnnnnnnnnnnnnnnnnnnnnnnnnnnnnnnnnnnnnnnnnnnnnnnnnnnnnnnnnnnnnnnnnnnnnnnnnnnnnnnnnnnnnnnnnnnnnnnnnnnnnnnnnnnnnnnnnnnnnnnnnnnnnnnnnnnnnnnnnnnnnnnnnnnnnnnnnnnnnnnnnnnnnnnnnnnnnnnnnnnnnnnnnnnnnnnnnnnnnnnnnnnnnnnnnnnnnnnnnnnnnnnnnnnnnnnnnnnnnnnnnnnnnnnnnnnnnnnnnnnnnnnnnnnnnnnnnnnnnnnnnnnnnnnnnnnnnnnnnnnnnnnnnnnnnnnnnnnnnnnnnnnnnnnnnnnnnnnnnnnnnnnnnnnnnnnnnnnnnnnnnnnnnnnnnnnnnnnnnnnnnnnnnnnnnnnnnnnnnnnnnnnnnnnnnnnnnnnnnnnnnnnnnnnnnnnnnnnnnnnnnnnnnnnnnnnnnnnnnnnnnnnnnnnnnnnnnnnnnnnnnnnnnnnnnnnnnnnnnnnnnnnnnnnnnnnnnnnnnnnnnnnnnnnnnnnnnnnnnnnnnnnnnnnnnnnnnnnnnnnnnnnnnnnnnnnnnnnnnnnnnnnnnnnnnnnnnnnnnnnnnnnnnnnnnnnnnnnnnnnnnnnnnnnnnnnnnnnnnnnnnnnnnnnnnnnnnnnnnnnnnnnnnnnnnnnnnnnnnnnnnnnnnnnnnnnnnnnnnnnnnnnnnnnnnnnnnnnnnnnnnnnnnnnnnnnnnnnnnnnnnnnnnnnnnnnnnnnnnnnnnnnnnnnnnnnnnnnnnnnnnnnnnnnnnnnnnnnnnnnnnnnnnnnnnnnnnnnnnnnnnnnnnnnnnnnnnnnnnnnnnnnnnnnnnnnnnnnnnnnnnnnnnnnnnnnnnnnnnnnnnnnnnnnnnnnnnnnnnnnnnnnnnnnnnnnnnnnnnnnnnnnnnnnnnnnnnnnnnnnnnnnnnnnnnnnnnnnnnnnnnnnnnnnnnnnnnnnnnnnnnnnnnnnnnnnnnnnnnnnnnnnnnnnnnnnnnnnnnnnnnnnnnnnnnnnnnnnnnnnnnnnnnnnnnnnnnnnnnnnnnnnnnnnnnnnnnnnnnnnnnnnnnnnnnnnnnnnnnnnnnnnnnnnnnnnnnnnnnnnnnnnnnnnnnnnnnnnnnnnnnnnnnnnnnnnnnnnnnnnnnnnnnnnnnnnnnnnnnnnnnnnnnnnnnnnnnnnnnnnnnnnnnnnnnnnnnnnnnnnnnnnnnnnnnnnnnnnnnnnnnnnnnnnnnnnnnnnnnnnnnnnnnnnnnnnnnnnnnnnnnnnnnnnnnnnnnnnnnnnnnnnnnnnnnnnnnnnnnnnnnnnnnnnnnnnnnnnnnnnnnnnnnnnnnnnnnnnnnnnnnnnnnnnnnnnnnnnnnnnnnnnnnnnnnnnnnnnnnnnnnnnnnnnnnnnnnnnnnnnnnnnnnnnnnnnnnnnnnnnnnnnnnnnnnnnnnnnnnnnnnnnnnnnnnnnnnnnnnnnnnnnnnnnnnnnnnnnnnnnnnnnnnnnnnnnnnnnnnnnnnnnnnnnnnnnnnnnnnnnnnnnnnnnnnnnnnnnnnnnnnnnnnnnnnnnnnnnnnnnnnnnnnnnnnnnnnnnnnnnnnnnnnnnnnnnnnnnnnnnnnnnnnnnnnnnnnnnnnnnnnnnnnnnnnnnnnnnnnnnnnnnnnnnnnnnnnnnnnnnnnnnnnnnnnnnnnnnnnnnnnnnnnnnnnnnnnnnnnnnnnnnnnnnnnnnnnnnnnnnnnnnnnnnnnnnnnnnnnnnnnnnnnnnnnnnnnnnnnnnnnnnnnnnnnnnnnnnnnnnnnnnnnnnnnnnnnnnnnnnnnnnnnnnnnnnnnnnnnnnnnnnnnnnnnnnnnnnnnnnnnnnnnnnnnnnnnnnnnnnnnnnnnnnnnnnnnnnnnnnnnnnnnnnnnnnnnnnnnnnnnnnnnnnnnnnnnnnnnnnnnnnnnnnnnnnnnnnnnnnnnnnnnnnnnnnnnnnnnnnnnnnnnnnnnnnnnnnnnnnnnnnnnnnnnnnnnnnnnnnnnnnnnnnnnnnnnnnnnnnnnnnnnnnnnnnnnnnnnnnnnnnnnnnnnnnnnnnnnnnnnnnnnnnnnnnnnnnnnnnnnnnnnnnnnnnnnnnnnnnnnnnnnnnnnnnnnnnnnnnnnnnnnnnnnnnnnnnnnnnnnnnnnnnnnnnnnnnnnnnnnnnnnnnnnnnnnnnnnnnnnnnnnnnnnnnnnnnnnnnnnnnnnnnnnnnnnnnnnnnnnnnnnnnnnnnnnnnnnnnnnnnnnnnnnnnnnnnnnnnnnnnnnnnnnnnnnnnnnnnnnnnnnnnnnnnnnnnnnnnnnnnnnnnnnnnnnnnnnnnnnnnnnnnnnnnnnnnnnnnnnnnnnnnnnnnnnnnnnnnnnnnnnnnnnnnnnnnnnnnnnnnnnnnnnnnnnnnnnnnnnnnnnnnnnnnnnnnnnnnnnnnnnnnnnnnnnnnnnnnnnnnnnnnnnnnnnnnnnnnnnnnnnnnnnnnnnnnnnnnnnnnnnnnnnnnnnnnnnnnnnnnnnnnnnnnnnnnnnnnnnnnnnnnnnnnnnnnnnnnnnnnnnnnnnnnnnnnnnnnnnnnnnnnnnnnnnnnnnnnnnnnnnnnnnnnnnnnnnnnnnnnnnnnnnnnnnnnnnnnnnnnnnnnnnnnnnnnnnnnnnnnnnnnnnnnnnnnnnnnnnnnnnnnnnnnnnnnnnnnnnnnnnnnnnnnnnnnnnnnnnnnnnnnnnnnnnnnnnnnnnnnnnnnnnnnnnnnnnnnnnnnnnnnnnnnnnnnnnnnnnnnnnnnnnnnnnnnnnnnnnnnnnnnnnnnnnnnnnnnnnnnnnnnnnnnnnnnnnnnnnnnnnnnnnnnnnnnnnnnnnnnnnnnnnnnnnnnnnnnnnnnnnnnnnnnnnnnnnnnnnnnnnnnnnnnnnnnnnnnnnnnnnnnnnnnnnnnnnnnnnnnnnnnnnnnnnnnnnnnnnnnnnnnnnnnnnnnnnnnnnnnnnnnnnnnnnnnnnnnnnnnnnnnnnnnnnnnnnnnnnnnnnnnnnnnnnnnnnnnnnnnnnnnnnnnnnnnnnnnnnnnnnnnnnnnnnnnnnnnnnnnnnnnnnnnnnnnnnnnnnnnnnnnnnnnnnnnnnnnnnnnnnnnnnnnnnnnnnnnnnnnnnnnnnnnnnnnnnnnnnnnnnnnnnnnnnnnnnnnnnnnnnnnnnnnnnnnnnnnnnnnnnnnnnnnnnnnnnnnnnnnnnnnnnnnnnnnnnnnnnnnnnnnnnnnnnnnnnnnnnnnnnnnnnnnnnnnnnnnnnnnnnnnnnnnnnnnnnnnnnnnnnnnnnnnnnnnnnnnnnnnnnnnnnnnnnnnnnnnnnnnnnnnnnnnnnnnnnnnnnnnnnnnnnnnnnnnnnnnnnnnnnnnnnnnnnnnnnnnnnnnnnnnnnnnnnnnnnnnnnnnnnnnnnnnnnnnnnnnnnnnnnnnnnnnnnnnnnnnnnnnnnnnnnnnnnnnnnnnnnnnnnnnnnnnnnnnnnnnnnnnnnnnnnnnnnnnnnnnnnnnnnnnnnnnnnnnnnnnnnnnnnnnnnnnnnnnnnnnnnnnnnnnnnnnnnnnnnnnnnnnnnnnnnnnnnnnnnnnnnnnnnnnnnnnnnnnnnnnnnnnnnnnnnnnnnnnnnnnnnnnnnnnnnnnnnnnnnnnnnnnnnnnnnnnnnnnnnnnnnnnnnnnnnnnnnnnnnnnnnnnnnnnnnnnnnnnnnnnnnnnnnnnnnnnnnnnnnnnnnnnnnnnnnnnnnnnnnnnnnnnnnnnnnnnnnnnnnnnnnnnnnnnnnnnnnnnnnnnnnnnnnnnnnnnnnnnnnnnnnnnnnnnnnnnnnnnnnnnnnnnnnnnnnnnnnnnnnnnnnnnnnnnnnnnnnnnnnnnnnnnnnnnnnnnnnnnnnnnnnnnnnnnnnnnnnnnnnnnnnnnnnnnnnnnnnnnnnnnnnnnnnnnnnnnnnnnnnnnnnnnnnnnnnnnnnnnnnnnnnnnnnnnnnnnnnnnnnnnnnnnnnnnnnnnnnnnnnnnnnnnnnnnnnnnnnnnnnnnnnnnnnnnnnnnnnnnnnnnnnnnnnnnnnnnnnnnnnnnnnnnnnnnnnnnnnnnnnnnnnnnnnnnnnnnnnnnnnnnnnnnnnnnnnnnnnnnnnnnnnnnnnnnnnnnnnnnnnnnnnnnnnnnnnnnnnnnnnnnnnnnnnnnnnnnnnnnnnnnnnnnnnnnnnnnnnnnnnnnnnnnnnnnnnnnnnnnnnnnnnnnnnnnnnnnnnnnnnnnnnnnnnnnnnnnnnnnnnnnnnnnnnnnnnnnnnnnnnnnnnnnnnnnnnnnnnnnnnnnnnnnnnnnnnnnnnnnnnnnnnnnnnnnnnnnnnnnnnnnnnnnnnnnnnnnnnnnnnnnnnnnnnnnnnnnnnnnnnnnnnnnnnnnnnnnnnnnnnnnnnnnnnnnnnnnnnnnnnnnnnnnnnnnnnnnnnnnnnnnnnnnnnnnnnnnnnnnnnnnnnnnnnnnnnnnnnnnnnnnnnnnnnnnnnnnnnnnnnnnnnnnnnnnnnnnnnnnnnnnnnnnnnnnnnnnnnnnnnnnnnnnnnnnnnnnnnnnnnnnnnnnnnnnnnnnnnnnnnnnnnnnnnnnnnnnnnnnnnnnnnnnnnnnnnnnnnnnnnnnnnnnnnnnnnnnnnnnnnnnnnnnnnnnnnnnnnnnnnnnnnnnnnnnnnnnnnnnnnnnnnnnnnnnnnnnnnnnnnnnnnnnnnnnnnnnnnnnnnnnnnnnnnnnnnnnnnnnnnnnnnnnnnnnnnnnnnnnnnnnnnnnnnnnnnnnnnnnnnnnnnnnnnnnnnnnnnnnnnnnnnnnnnnnnnnnnnnnnnnnnnnnnnnnnnnnnnnnnnnnnnnnnnnnnnnnnnnnnnnnnnnnnnnnnnnnnnnnnnnnnnnnnnnnnnnnnnnnnnnnnnnnnnnnnnnnnnnnnnnnnnnnnnnnnnnnnnnnnnnnnnnnnnnnnnnnnnnnnnnnnnnnnnnnnnnnnnnnnnnnnnnnnnnnnnnnnnnnnnnnnnnnnnnnnnnnnnnnnnnnnnnnnnnnnnnnnnnnnnnnnnnnnnnnnnnnnnnnnnnnnnnnnnnnnnnnnnnnnnnnnnnnnnnnnnnnnnnnnnnnnnnnnnnnnnnnnnnnnnnnnnnnnnnnnnnnnnnnnnnnnnnnnnnnnnnnnnnnnnnnnnnnnnnnnnnnnnnnnnnnnnnnnnnnnnnnnnnnnnnnnnnnnnnnnnnnnnnnnnnnnnnnnnnnnnnnnnnnnnnnnnnnnnnnnnnnnnnnnnnnnnnnnnnnnnnnnnnnnnnnnnnnnnnnnnnnnnnnnnnnnnnnnnnnnnnnnnnnnnnnnnnnnnnnnnnnnnnnnnnnnnnnnnnnnnnnnnnnnnnnnnnnnnnnnnnnnnnnnnnnnnnnnnnnnnnnnnnnnnnnnnnnnnnnnnnnnnnnnnnnnnnnnnnnnnnnnnnnnnnnnnnnnnnnnnnnnnnnnnnnnnnnnnnnnnnnnnnnnnnnnnnnnnnnnnnnnnnnnnnnnnnnnnnnnnnnnnnnnnnnnnnnnnnnnnnnnnnnnnnnnnnnnnnnnnnnnnnnnnnnnnnnnnnnnnnnnnnnnnnnnnnnnnnnnnnnnnnnnnnnnnnnnnnnnnnnnnnnnnnnnnnnnnnnnnnnnnnnnnnnnnnnnnnnnnnnnnnnnnnnnnnnnnnnnnnnnnnnnnnnnnnnnnnnnnnnnnnnnnnnnnnnnnnnnnnnnnnnnnnnnnnnnnnnnnnnnnnnnnnnnnnnnnnnnnnnnnnnnnnnnnnnnnnnnnnnnnnnnnnnnnnnnnnnnnnnnnnnnnnnnnnnnnnnnnnnnnnnnnnnnnnnnnnnnnnnnnnnnnnnnnnnnnnnnnnnnnnnnnnnnnnnnnnnnnnnnnnnnnnnnnnnnnnnnnnnnnnnnnnnnnnnnnnnnnnnnnnnnnnnnnnnnnnnnnnnnnnnnnnnnnnnnnnnnnnnnnnnnnnnnnnnnnnnnnnnnnnnnnnnnnnnnnnnnnnnnnnnnnnnnnnnnnnnnnnnnnnnnnnnnnnnnnnnnnnnnnnnnnnnnnnnnnnnnnnnnnnnnnnnnnnnnnnnnnnnnnnnnnnnnnnnnnnnnnnnnnnnnnnnnnnnnnnnnnnnnnnnnnnnnnnnnnnnnnnnnnnnnnnnnnnnnnnnnnnnnnnnnnnnnnnnnnnnnnnnnnnnnnnnnnnnnnnnnnnnnnnnnnnnnnnnnnnnnnnnnnnnnnnnnnnnnnnnnnnnnnnnnnnnnnnnnnnnnnnnnnnnnnnnnnnnnnnnnnnnnnnnnnnnnnnnnnnnnnnnnnnnnnnnnnnnnnnnnnnnnnnnnnnnnnnnnnnnnnnnnnnnnnnnnnnnnnnnnnnnnnnnnnnnnnnnnnnnnnnnnnnnnnnnnnnnnnnnnnnnnnnnnnnnnnnnnnnnnnnnnnnnnnnnnnnnnnnnnnnnnnnnnnnnnnnnnnnnnnnnnnnnnnnnnnnnnnnnnnnnnnnnnnnnnnnnnnnnnnnnnnnnnnnnnnnnnnnnnnnnnnnnnnnnnnnnnnnnnnnnnnnnnnnnnnnnnnnnnnnnnnnnnnnnnnnnnnnnnnnnnnnnnnnnnnnnnnnnnnnnnnnnnnnnnnnnnnnnnnnnnnnnnnnnnnnnnnnnnnnnnnnnnnnnnnnnnnnnnnnnnnnnnnnnnnnnnnnnnnnnnnnnnnnnnnnnnnnnnnnnnnnnnnnnnnnnnnnnnnnnnnnnnnnnnnnnnnnnnnnnnnnnnnnnnnnnnnnnnnnnnnnnnnnnnnnnnnnnnnnnnnnnnnnnnnnnnnnnnnnnnnnnnnnnnnnnnnnnnnnnnnnnnnnnnnnnnnnnnnnnnnnnnnnnnnnnnnnnnnnnnnnnnnnnnnnnnnnnnnnnnnnnnnnnnnnnnnnnnnnnnnnnnnnnnnnnnnnnnnnnnnnnnnnnnnnnnnnnnnnnnnnnnnnnnnnnnnnnnnnnnnnnnnnnnnnnnnnnnnnnnnnnnnnnnnnnnnnnnnnnnnnnnnnnnnnnnnnnnnnnnnnnnnnnnnnnnnnnnnnnnnnnnnnnnnnnnnnnnnnnnnnnnnnnnnnnnnnnnnnnnnnnnnnnnnnnnnnnnnnnnnnnnnnnnnnnnnnnnnnnnnnnnnnnnnnnnnnnnnnnnnnnnnnnnnnnnnnnnnnnnnnnnnnnnnnnnnnnnnnnnnnnnnnnnnnnnnnnnnnnnnnnnnnnnnnnnnnnnnnnnnnnnnnnnnnnnnnnnnnnnnnnnnnnnnnnnnnnnnnnnnnnnnnnnnnnnnnnnnnnnnnnnnnnnnnnnnnnnnnnnnnnnnnnnnnnnnnnnnnnnnnnnnnnnnnnnnnnnnnnnnnnnnnnnnnnnnnnnnnnnnnnnnnnnnnnnnnnnnnnnnnnnnnnnnnnnnnnnnnnnnnnnnnnnnnnnnnnnnnnnnnnnnnnnnnnnnnnnnnnnnnnnnnnnnnnnnnnnnnnnnnnnnnnnnnnnnnnnnnnnnnnnnnnnnnnnnnnnnnnnnnnnnnnnnnnnnnnnnnnnnnnnnnnnnnnnnnnnnnnnnnnnnnnnnnnnnnnnnnnnnnnnnnnnnnnnnnnnnnnnnnnnnnnnnnnnnnnnnnnnnnnnnnnnnnnnnnnnnnnnnnnnnnnnnnnnnnnnnnnnnnnnnnnnnnnnnnnnnnnnnnnnnnnnnnnnnnnnnnnnnnnnnnnnnnnnnnnnnnnnnnnnnnnnnnnnnnnnnnnnnnnnnnnnnnnnnnnnnnnnnnnnnnnnnnnnnnnnnnnnnnnnnnnnnnnnnnnnnnnnnnnnnnnnnnnnnnnnnnnnnnnnnnnnnnnnnnnnnnnnnnnnnnnnnnnnnnnnnnnnnnnnnnnnnnnnnnnnnnnnnnnnnnnnnnnnnnnnnnnnnnnnnnnnnnnnnnnnnnnnnnnnnnnnnnnnnnnnnnnnnnnnnnnnnnnnnnnnnnnnnnnnnnnnnnnnnnnnnnnnnnnnnnnnnnnnnnnnnnnnnnnnnnnnnnnnnnnnnnnnnnnnnnnnnnnnnnnnnnnnnnnnnnnnnnnnnnnnnnnnnnnnnnnnnnnnnnnnnnnnnnnnnnnnnnnnnnnnnnnnnnnnnnnnnnnnnnnnnnnnnnnnnnnnnnnnnnnnnnnnnnnnnnnnnnnnnnnnnnnnnnnnnnnnnnnnnnnnnnnnnnnnnnnnnnnnnnnnnnnnnnnnnnnnnnnnnnnnnnnnnnnnnnnnnnnnnnnnnnnnnnnnnnnnnnnnnnnnnnnnnnnnnnnnnnnnnnnnnnnnnnnnnnnnnnnnnnnnnnnnnnnnnnnnnnnnnnnnnnnnnnnnnnnnnnnnnnnnnnnnnnnnnnnnnnnnnnnnnnnnnnnnnnnnnnnnnnnnnnnnnnnnnnnnnnnnnnnnnnnnnnnnnnnnnnnnnnnnnnnnnnnnnnnnnnnnnnnnnnnnnnnnnnnnnnnnnnnnnnnnnnnnnnnnnnnnnnnnnnnnnnnnnnnnnnnnnnnnnnnnnnnnnnnnnnnnnnnnnnnnnnnnnnnnnnnnnnnnnnnnnnnnnnnnnnnnnnnnnnnnnnnnnnnnnnnnnnnnnnnnnnnnnnnnnnnnnnnnnnnnnnnnnnnnnnnnnnnnnnnnnnnnnnnnnnnnnnnnnnnnnnnnnnnnnnnnnnnnnnnnnnnnnnnnnnnnnnnnnnnnnnnnnnnnnnnnnnnnnnnnnnnnnnnnnnnnnnnnnnnnnnnnnnnnnnnnnnnnnnnnnnnnnnnnnnnnnnnnnnnnnnnnnnnnnnnnnnnnnnnnnnnnnnnnnnnnnnnnnnnnnnnnnnnnnnnnnnnnnnnnnnnnnnnnnnnnnnnnnnnnnnnnnnnnnnnnnnnnnnnnnnnnnnnnnnnnnnnnnnnnnnnnnnnnnnnnnnnnnnnnnnnnnnnnnnnnnnnnnnnnnnnnnnnnnnnnnnnnnnnnnnnnnnnnnnnnnnnnnnnnnnnnnnnnnnnnnnnnnnnnnnnnnnnnnnnnnnnnnnnnnnnnnnnnnnnnnnnnnnnnnnnnnnnnnnnnnnnnnnnnnnnnnnnnnnnnnnnnnnnnnnnnnnnnnnnnnnnnnnnnnnnnnnnnnnnnnnnnnnnnnnnnnnnnnnnnnnnnnnnnnnnnnnnnnnnnnnnnnnnnnnnnnnnnnnnnnnnnnnnnnnnnnnnnnnnnnnnnnnnnnnnnnnnnnnnnnnnnnnnnnnnnnnnnnnnnnnnnnnnnnnnnnnnnnnnnnnnnnnnnnnnnnnnnnnnnnnnnnnnnnnnnnnnnnnnnnnnnnnnnnnnnnnnnnnnnnnnnnnnnnnnnnnnnnnnnnnnnnnnnnnnnnnnnnnnnnnnnnnnnnnnnnnnnnnnnnnnnnnnnnnnnnnnnnnnnnnnnnnnnnnnnnnnnnnnnnnnnnnnnnnnnnnnnnnnnnnnnnnnnnnnnnnnnnnnnnnnnnnnnnnnnnnnnnnnnnnnnnnnnnnnnnnnnnnnnnnnnnnnnnnnnnnnnnnnnnnnnnnnnnnnnnnnnnnnnnnnnnnnnnnnnnnnnnnnnnnnnnnnnnnnnnnnnnnnnnnnnnnnnnnnnnnnnnnnnnnnnnnnnnnnnnnnnnnnnnnnnnnnnnnnnnnnnnnnnnnnnnnnnnnnnnnnnnnnnnnnnnnnnnnnnnnnnnnnnnnnnnnnnnnnnnnnnnnnnnnnnnnnnnnnnnnnnnnnnnnnnnnnnnnnnnnnnnnnnnnnnnnnnnnnnnnnnnnnnnnnnnnnnnnnnnnnnnnnnnnnnnnnnnnnnnnnnnnnnnnnnnnnnnnnnnnnnnnnnnnnnnnnnnnnnnnnnnnnnnnnnnnnnnnnnnnnnnnnnnnnnnnnnnnnnnnnnnnnnnnnnnnnnnnnnnnnnnnnnnnnnnnnnnnnnnnnnnnnnnnnnnnnnnnnnnnnnnnnnnnnnnnnnnnnnnnnnnnnnnnnnnnnnnnnnnnnnnnnnnnnnnnnnnnnnnnnnnnnnnnnnnnnnnnnnnnnnnnnnnnnnnnnnnnnnnnnnnnnnnnnnnnnnnnnnnnnnnnnnnnnnnnnnnnnnnnnnnnnnnnnnnnnnnnnnnnnnnnnnnnnnnnnnnnnnnnnnnnnnnnnnnnnnnnnnnnnnnnnnnnnnnnnnnnnnnnnnnnnnnnnnnnnnnnnnnnnnnnnnnnnnnnnnnnnnnnnnnnnnnnnnnnnnnnnnnnnnnnnnnnnnnnnnnnnnnnnnnnnnnnnnnnnnnnnnnnnnnnnnnnnnnnnnnnnnnnnnnnnnnnnnnnnnnnnnnnnnnnnnnnnnnnnnnnnnnnnnnnnnnnnnnnnnnnnnnnnnnnnnnnnnnnnnnnnnnnnnnnnnnnnnnnnnnnnnnnnnnnnnnnnnnnnnnnnnnnnnnnnnnnnnnnnnnnnnnnnnnnnnnnnnnnnnnnnnnnnnnnnnnnnnnnnnnnnnnnnnnnnnnnnnnnnnnnnnnnnnnnnnnnnnnnnnnnnnnnnnnnnnnnnnnnnnnnnnnnnnnnnnnnnnnnnnnnnnnnnnnnnnnnnnnnnnnnnnnnnnnnnnnnnnnnnnnnnnnnnnnnnnnnnnnnnnnnnnnnnnnnnnnnnnnnnnnnnnnnnnnnnnnnnnnnnnnnnnnnnnnnnnnnnnnnnnnnnnnnnnnnnnnnnnnnnnnnnnnnnnnnnnnnnnnnnnnnnnnnnnnnnnnnnnnnnnnnnnnnnnnnnnnnnnnnnnnnnnnnnnnnnnnnnnnnnnnnnnnnnnnnnnnnnnnnnnnnnnnnnnnnnnnnnnnnnnnnnnnnnnnnnnnnnnnnnnnnnnnnnnnnnnnnnnnnnnnnnnnnnnnnnnnnnnnnnnnnnnnnnnnnnnnnnnnnnnnnnnnnnnnnnnnnnnnnnnnnnnnnnnnnnnnnnnnnnnnnnnnnnnnnnnnnnnnnnnnnnnnnnnnnnnnnnnnnnnnnnnnnnnnnnnnnnnnnnnnnnnnnnnnnnnnnnnnnnnnnnnnnnnnnnnnnnnnnnnnnnnnnnnnnnnnnnnnnnnnnnnnnnnnnnnnnnnnnnnnnnnnnnnnnnnnnnnnnnnnnnnnnnnnnnnnnnnnnnnnnnnnnnnnnnnnnnnnnnnnnnnnnnnnnnnnnnnnnnnnnnnnnnnnnnnnnnnnnnnnnnnnnnnnnnnnnnnnnnnnnnnnnnnnnnnnnnnnnnnnnnnnnnnnnnnnnnnnnnnnnnnnnnnnnnnnnnnnnnnnnnnnnnnnnnnnnnnnnnnnnnnnnnnnnnnnnnnnnnnnnnnnnnnnnnnnnnnnnnnnnnnnnnnnnnnnnnnnnnnnnnnnnnnnnnnnnnnnnnnnnnnnnnnnnnnnnnnnnnnnnnnnnnnnnnnnnnnnnnnnnnnnnnnnnnnnnnnnnnnnnnnnnnnnnnnnnnnnnnnnnnnnnnnnnnnnnnnnnnnnnnnnnnnnnnnnnnnnnnnnnnnnnnnnnnnnnnnnnnnnnnnnnnnnnnnnnnnnnnnnnnnnnnnnnnnnnnnnnnnnnnnnnnnnnnnnnnnnnnnnnnnnnnnnnnnnnnnnnnnnnnnnnnnnnnnnnnnnnnnnnnnnnnnnnnnnnnnnnnnnnnnnnnnnnnnnnnnnnnnnnnnnnnnnnnnnnnnnnnnnnnnnnnnnnnnnnnnnnnnnnnnnnnnnnnnnnnnnnnnnnnnnnnnnnnnnnnnnnnnnnnnnnnnnnnnnnnnnnnnnnnnnnnnnnnnnnnnnnnnnnnnnnnnnnnnnnnnnnnnnnnnnnnnnnnnnnnnnnnnnnnnnnnnnnnnnnnnnnnnnnnnnnnnnnnnnnnnnnnnnnnnnnnnnnnnnnnnnnnnnnnnnnnnnnnnnnnnnnnnnnnnnnnnnnnnnnnnnnnnnnnnnnnnnnnnnnnnnnnnnnnnnnnnnnnnnnnnnnnnnnnnnnnnnnnnnnnnnnnnnnnnnnnnnnnnnnnnnnnnnnnnnnnnnnnnnnnnnnnnnnnnnnnnnnnnnnnnnnnnnnnnnnnnnnnnnnnnnnnnnnnnnnnnnnnnnnnnnnnnnnnnnnnnnnnnnnnnnnnnnnnnnnnnnnnnnnnnnnnnnnnnnnnnnnnnnnnnnnnnnnnnnnnnnnnnnnnnnnnnnnnnnnnnnnnnnnnnnnnnnnnnnnnnnnnnnnnnnnnnnnnnnnnnnnnnnnnnnnnnnnnnnnnnnnnnnnnnnnnnnnnnnnnnnnnnnnnnnnnnnnnnnnnnnnnnnnnnnnnnnnnnnnnnnnnnnnnnnnnnnnnnnnnnnnnnnnnnnnnnnnnnnnnnnnnnnnnnnnnnnnnnnnnnnnnnnnnnnnnnnnnnnnnnnnnnnnnnnnnnnnnnnnnnnnnnnnnnnnnnnnnnnnnnnnnnnnnnnnnnnnnnnnnnnnnnnnnnnnnnnnnnnnnnnnnnnnnnnnnnnnnnnnnnnnnnnnnnnnnnnnnnnnnnnnnnnnnnnnnnnnnnnnnnnnnnnnnnnnnnnnnnnnnnnnnnnnnnnnnnnnnnnnnnnnnnnnnnnnnnnnnnnnnnnnnnnnnnnnnnnnnnnnnnnnnnnnnnnnnnnnnnnnnnnnnnnnnnnnnnnnnnnnnnnnnnnnnnnnnnnnnnnnnnnnnnnnnnnnnnnnnnnnnnnnnnnnnnnnnnnnnnnnnnnnnnnnnnnnnnnnnnnnnnnnnnnnnnnnnnnnnnnnnnnnnnnnnnnnnnnnnnnnnnnnnnnnnnnnnnnnnnnnnnnnnnnnnnnnnnnnnnnnnnnnnnnnnnnnnnnnnnnnnnnnnnnnnnnnnnnnnnnnnnnnnnnnnnnnnnnnnnnnnnnnnnnnnnnnnnnnnnnnnnnnnnnnnnnnnnnnnnnnnnnnnnnnnnnnnnnnnnnnnnnnnnnnnnnnnnnnnnnnnnnnnnnnnnnnnnnnnnnnnnnnnnnnnnnnnnnnnnnnnnnnnnnnnnnnnnnnnnnnnnnnnnnnnnnnnnnnnnnnnnnnnnnnnnnnnnnnnnnnnnnnnnnnnnnnnnnnnnnnnnnnnnnnnnnnnnnnnnnnnnnnnnnnnnnnnnnnnnnnnnnnnnnnnnnnnnnnnnnnnnnnnnnnnnnnnnnnnnnnnnnnnnnnnnnnnnnnnnnnnnnnnnnnnnnnnnnnnnnnnnnnnnnnnnnnnnnnnnnnnnnnnnnnnnnnnnnnnnnnnnnnnnnnnnnnnnnnnnnnnnnnnnnnnnnnnnnnnnnnnnnnnnnnnnnnnnnnnnnnnnnnnnnnnnnnnnnnnnnnnnnnnnnnnnnnnnnnnnnnnnnnnnnnnnnnnnnnnnnnnnnnnnnnnnnnnnnnnnnnnnnnnnnnnnnnnnnnnnnnnnnnnnnnnnnnnnnnnnnnnnnnnnnnnnnnnnnnnnnnnnnnnnnnnnnnnnnnnnnnnnnnnnnnnnnnnnnnnnnnnnnnnnnnnnnnnnnnnnnnnnnnnnnnnnnnnnnnnnnnnnnnnnnnnnnnnnnnnnnnnnnnnnnnnnnnnnnnnnnnnnnnnnnnnnnnnnnnnnnnnnnnnnnnnnnnnnnnnnnnnnnnnnnnnnnnnnnnnnnnnnnnnnnnnnnnnnnnnnnnnnnnnnnnnnnnnnnnnnnnnnnnnnnnnnnnnnnnnnnnnnnnnnnnnnnnnnnnnnnnnnnnnnnnnnnnnnnnnnnnnnnnnnnnnnnnnnnnnnnnnnnnnnnnnnnnnnnnnnnnnnnnnnnnnnnnnnnnnnnnnnnnnnnnnnnnnnnnnnnnnnnnnnnnnnnnnnnnnnnnnnnnnnnnnnnnnnnnnnnnnnnnnnnnnnnnnnnnnnnnnnnnnnnnnnnnnnnnnnnnnnnnnnnnnnnnnnnnnnnnnnnnnnnnnnnnnnnnnnnnnnnnnnnnnnnnnnnnnnnnnnnnnnnnnnnnnnnnnnnnnnnnnnnnnnnnnnnnnnnnnnnnnnnnnnnnnnnnnnnnnnnnnnnnnnnnnnnnnnnnnnnnnnnnnnnnnnnnnnnnnnnnnnnnnnnnnnnnnnnnnnnnnnnnnnnnnnnnnnnnnnnnnnnnnnnnnnnnnnnnnnnnnnnnnnnnnnnnnnnnnnnnnnnnnnnnnnnnnnnnnnnnnnnnnnnnnnnnnnnnnnnnnnnnnnnnnnnnnnnnnnnnnnnnnnnnnnnnnnnnnnnnnnnnnnnnnnnnnnnnnnnnnnnnnnnnnnnnnnnnnnnnnnnnnnnnnnnnnnnnnnnnnnnnnnnnnnnnnnnnnnnnnnnnnnnnnnnnnnnnnnnnnnnnnnnnnnnnnnnnnnnnnnnnnnggtggaagaatcatggcctctagactgcgccgaattgaaatcgatatcgcccaaactcatttgtaagaccttgttaaaatatgctttacagcaacaacagcagtttttaacgggacagtactgattgtcgattgcggattgaagattagccggaggacgggaaggtaatcggttttggttaacgcagtttttgctgtcgttgtgttgttgggtgggttgccgggggcggattcgtacctcgccggacataatgctgaacgcaccggaaagttcaaagaagccatcggcgcctatacggccagtgcatccgcggatccgttgctggcgccctacgcccggatcagtgcggccaggtgcctgggcgcgaccggcagccgcacacaggcggtgcaggcgttacgcagcgtgctcgccgaggtgccggaggggccgtgggttcttccagcgaaactcgatctggcgggcctgctggcgctggactcgcagtttcccgcggccgcggccctttatgccgaatcgctcgactttgcgccgaagacggcggcgccgaagacggcggccccgaagacgtggagcccgaaaacgtggatcgtcgatcagtatgattgggcggcggcggaggtgtacgtccgcgtgccggaatttgaacagcgggcctatgcctacttccgcgataacgtggcaaccaccgtgctccgtcagcggcgcatcgatgcggcgcgttacctcgagaagtcgcctgatatggccgaccggtttgtggcgctcgatgggctgatcaagtcagccgaatgcaccgatgcgtggaaactggcgttgcggctcctgcccgaggcggttggcggcggtagcccggtgaacattaacgtgctcgcgcccctgctgacgtcgaacaaacgggccctgacggacgcgcagcgcgaagcgttccagaaactcgtcaacgagcacggcgacagcgacgcgcgcgcgcgctggatgcgcctggttctggcctgcgtcgcccgcagccattcgagcgttggcaagccggaggtcgcggcgttggcgtgcgacctgctcctcaagcatttcgaaaaatcggatcaggccggggatgcgctgtattggctggcaagccgttttgcccgagacgaaaaagacaagagcgccgtcgagcagtacctgcgcctggccaaacattgtcccgatcatgcgcgggccgatttcgccctgctcgccgccgccggactccagaagaaaaccggcgacctcaagggctgcgtccactcgctcgaacaactggtcggccgctatccccaggggcgccatgccgccaacgcatggtattggctgggaaaacaccacgaggccgcggggcataaaaaagacgccgctaaagcctttcagaacgcagcccaattcgggccgggcaactattacgcccattgcgccgcataccgtctggccaaggcgcgcgcgcgcgacgacgacagcccatccaatggccaaaacctccgggtggacggcaccggctcgtacatagcgccgctggaaatcgccgcggaagaacgtgtaaacgttcctgaccccgccatggacccgcagttcgagcggctgatgttttttggcaagaacgggctcgaagagggcgagtgggaagcgttgtacctcggcaagcggctcggcaacggggccgaagacgcccccgtttaccgggtcatgtgtgaagccgggtatgccaaggcggcgatggatttcgccgaggcgtacaactggggggtggccgacggcaagcggacacccgcgcgcatgcggatcgagtatccccggtcgtactggcaacaggtgcgggccaaatgccgcggcaccggaatcgacccgtacctcgtgctggccattgcccggcaggaaagcacgttccggcccgccctgacctcccacgccggcgcccgcggcatcatgcaggtcatgccgcccaccgcccagtggctggccaaggttgatccctcgattgacgcggcctgcatcgccaacctcgaaaaccccgacaactcgttccggctcgggattggttacctgttgcggatggtcgagcgctcgagcggcaacctcgtgcacgccctggcgtcgtacaacgccggccccggaaactgctcgaaatggctcaaaaggtggccgaaagccgacctcgagacgttcgtcgaaaacatcccgttcggcgagacccgcaactacgtcaaaaccgtcctgggcgcctacgccgcctaccactcgctctatccggctgtggaatgatgtggcacgcctatttggcgggtgaggcgtgatctgctatagtttttgggcttgggttcatcctgttacgggaaacggcggttacggagaggccccgctttttcttgcggaacaaaaagtcatgaccggtacagcacaccacgaaccaaggaagcgtgcaaagaccagagggggtcaagaagtggtcttgcatgacgacaattaccgctaccgcgcgttgtttgacaggatgacggaagggtttgcgctgcacgaaatcgttacggatgcgcaaggcaagccctgcgactatgtttttctcgatatcaacccggcattcgaagtcctcacggggctgaagcgcgaagatgtgatagggcgccgcgttaaggaagtgctgccaacggtcgagccgtactgggtggagcattttgggcaggtggcactcaccggcacgcccgcccgttttgagaattacgccgcgcctttgggccgctggtacgaggtttatgcgtacagccctgcgccgcggcaggtcgcggtcgtcttcctggatgtaaccaggcgcaagcaggctgaggaagtcttgcagcgatacgaactgctggcggcgaacagccgtgacattattctatttatgcggcgggacgacggccgcatcctcgaggccaacgccgccgccatccgcgcctacggctattcgcgcgaggaactgctcgaaatgatggggcgcgacctgtggagcgatcgcgatcgcgatgccgtcgaagcgcaaatggcgaaagccggtgccacgggtatcctcttcgagaccttccacaagcgcaaggacgggtcgatattccccgtggaagtcagttcgcacggcgaaataattgccgggattcgcatccgcgacatcaccgaacgtcaggaagccgaaaaagccctccgcgaaagccaaaccgacctcaagcacgcgcaggctgttgcccatacaggcagttggcgcctcaacgtccaacacaaccgattgtcgtggtcggacgagacgtacaggatgttcggcattgccacgggcacccccttgacctatgagacgttcctggatgccgtacaccccgatgatcggcagtacgtcgacgaaaactggatggcagccatccggggggaaacagcgtacgatatcgagcaccggattgtggtcggcggggccgtgaagtgggtccgggagcgggccgaactcgaggtcggtccagaaggcgagttgttaggggggtttgggacagtccaagacgtcaccgaacgcaagcaggcggcagaggcgttgcgcgaagccaatgaaaacctcgaaacccgcgtcagcgaacgaacggctgaactcgaactggccaacgtcacgctcgagcgggaaatggccgagcgccggcgcgcggaaggagccgtgctggccgagcggcaattattctacgacgttctggagacgctgccggtttacgttgtcctgttgactcccgactaccgggtcagtttcgcgaaccgcgtattccgagagcgtttcgggcagtccgaaaagcgctgttacgaacacctgtttgggcgcagcgagccgtgcgaaatctgcgaagcctatggcgtcctccagacgatggcgccccatgactgggaatgggtcgggcccgatgcacgcacctaccaggtctttgactttcctttcaccgacaccacgggcgctgttcttattctggaaatgggcatcgacatcaccgaacgcaagaggtcggaagacgaagtccgtcactaccaggaacatctcgaacaggaggttcgccagcgcaccgccgaggtggaaaacaggaacatccaactggccgccgagatcgcggaacgtaaacgcgccgaggatgccctccgccaaaacgaagccgtcctgatgcggtccaacgaggacctcgaacagtttgcctatgtcgcgtcgcacgatctgcaggagccgttgcgccagatcggcgggtttgtccaactcctgcggcgggattatgcccccttgttcgacgccaccgccggcgagtactttgcctttgtcacggatgccgccttacggatgcaattgctcatccagggcctgctcgattactcgagggttggacgaagcggcgtggtcgcctccaaggtgagcctcgagaaggccgcacggaccgccatgatcaatctggccgcccgaatcagcgaaaccggcgcaaaaatcactctcggcgaattgccctccgttcccggcaactccacactcctcacccaagtcttccaaaacttgattggaaacagcctcaaattccgcgccgaacgccccttggacatccagatcggatcccggatcgacggcaacgagtggcaggtttgggtaaaagacaacgggatcggattccaacaggagtacgccgagagaatcttccaggtgtttcagcgcctgcacgggcgcggggagtatccgggcaccggaatcgggttggccatctgcaaacgggccgtcgaacagcacggcggccgtatctgggccgaatccacacccggcgtaggcgctaccttctacttcacgctgcccgccggttgagcagggaaaacgacggcatatccgccgccccgtaagacttaaactgaagttccagagccagatcgaatgcacgttttatcctgcatgggaaataaccttgtattcaaatgcaggtttactgggaacaggcgtttctatccacacttgagtccgagcaggtcgaagatgtggcgctggaaatcggtgggttccgtgaatgtggtaaaccgtgcggcgtttttcccttggccgactcggcagatgtttttgcagcgcgtggcgagtgcatccatcagggtctgtaagctgtggacgggccacccgtcttgagtctgcttggttcgcttttcccgttgtacggcctcgccgggctgaggcttggcgacggggtcgcgggtccagcgagcggcgtgaagttcttcgtcttggaacagaacgggcgcgagtttcctgcgcaactcccattcgacgtagtaagccagcatgcagagaaagacgtgggctttcacgtggtccacggtgcggtggtggatgggccggatgcggatatcgaggcgcttgatgcaccggaacgcctgctcgacttgccccaggctcttgtacgcacgaacggtgtcttcggcgctgagctcttgtttcgactcgctcgtgcggataatgtagatgccgtcgagccgctcttcgtgctggatgcgtttggcgttgcgggcgaacgcgaaatggccgtcttgtatgtcgagcacgaagtgtttgccggccttgaagtggttgagaaccttgccgactttcaggccgatctcggtggccttaagcggtttgttggtgcgccgcttccgtttgaccatgaggtgttgttcgagtcggtcaagaagactgccaagctcatcctggccagcgacgcctgtgaacgcggaagttatctccacaccatcgcggggcagatcgcgcagatcgcgttcgaccaccttgacgcgcctgtatgcgttgtcggggccaacaacgggatcgtgccgccggccgagttggaaaaagagtacttcccgcagccggcctggctcctcgacgcgtaccacacgcaaataaagcctctacccggttaccagccttcgacagagcgcacggccgcagagtttgtgcggcagtccaagtacggcgtgctgtaacggaaattgaaaaccacaaagaacgcaaagagcacggcgcggcatagccgcaaccaaaaggcgcccgaacgtgtcattccgaggagcgctggcacatggcctctattcttaattcaaaagcctgagtccagcgcgacgtgggaatccccccggtatttttcccgacatcggtatgggaggagcgcttttattcggttttgggatagcttctagttgcatgggcgcattgttcacacaacaacacgcctataaccatgcaacaaaccaatgtttacgccccctcacacactacaagaaatgaaaccagcctctggaacttcgggctaatgaaatggacttcagaatacccacaaggcatggcgctgtgtggagcgcggcagcttgctgccgctttttcggcagggaggccttgcctgacaagtgcgacattgttcgcgaggaaagccttgcactataaaaagcggtggcaaacgcgctaagagcgtccacactccatacgtcaccgtatttacgaatagacgtactaagccgcgccaaatatgtcgggccccatatcgcatccggtatgcgtagggacgtaatcgagactcttgccacgggtccctactggatccgcaggttgcgattatcaataactctcctggccttgcctgccgatcgttcgagcgtctgtgggggcacaagttcaaccgtagcgcggatattcgtgatggcctggattttccggtcgatacggtcccgcagggcctgcatctggctcattttgtctgaaaacatctcggggcggacctcgactttaacggtcatttggtcgagcgcacccggacggtcaatttctataacatagtgcggcgcaataccttccacctgtagcagcgcctcctcgatttgcgacggaaacacgttgacgccccggattatcagcatgtcgtccgtccggccggcgactcggctcatccggacggtcgtccgcccgcaggggcacggctggctgtccagggcggcaatgtcgcgggtgcggtaacgcaaaatgggcatagcctgtttggtcaacgtcgtaaaaaccaactccccgtactcgccatccgccacaggctcgagcgtggtggggtcaacgcactcaacgatgaagtgatcttcctggatgtgcatgccgtcgcgtttgtagcactcgccgctgacgcccggcccgataacttcgcttaacccgtagttgttaaacgcatagacatcaagctcatcttcgattttgcggcgcatgtcttcggtccacatctcgccgccgaaatgggcgtacttgaggttaaacttgcgcgggtcaacgccctgggccctggccgcttccgcaatgttgagggcgtagctgggcgtacagaccagcgcgtccgcttccatgtcctcgagcagcatcacctgacgcggcgtattgcctgaagcgaccggcaaaaccgccgcccccactttttccaccccgtagtggaggccaaacccgcccgtgaaaagcccgtagccaaatgcaatatgcacggtgtggtgcgaccgcagcccgcccgcgtagagaaaccgggcgcagaggttggcccacgtatcgaggtcttcgcgcgtatacgcgacgaacgtgggcttgccggtggtcccggacgagccgtggaatcgggctacctgctcgcgcggcaccgccagaaaccccagcgggtattgccggcggaggtcttctttgatcgtaaacggaatccgccgcaggtcgtccagcgaacgaagatactccgccgagatcttttcgcgcgcaagcgattcccggtaaaaggggacgctgccgactcgccgtaccacgtccctgagccgatcgagttgcagatcctgcaactgcggccgatcaagcgtctcttcaggggaccagaccccgttttccaaggcaaaatccggcattacgcacctactatgcctgtgttccgcaccgcctgatcccggctaccgttcggcccgttcgtaaagctcgacgccgcccacaacattgatattcttggccttgagcagttcgatcgcggtatccgggttgtcgaaccggaacaccagcaccgctttatccccgctacggacggtgaaggcgtacatgtattcgatgttgacgcccccgccttccatgatggccaggacgttggcgaggccgccgggtttgtcggccacttcggtagccacaacctccgtcacgttcaccacgaacccggccttctcaaacacctctttcgctttcatccagtcgcggacgatcagccgcatgatgccgaactgctgggtgtcggccagcgacaacgtcagaatgttgatgcccgcatccgccaggactcggcacggctcgctcagccgccccggcttgttctccaaaaacaacgacaattggtgtattttcattgccgaaatcccttcctctttgccaacggcttacattttgcgccggtcaatcacgcgtttggctttcccctggcttcgctcgatcgtgtgaggctggaccaggctcagtttcactcgaatgcccaaaatgtgggctatttcatccgacaactttttgcggacagtttccatggcgccgatcgtgtcgccgaacacgtcggcggtaacctcgacctggacctccatgttgtcgagccctttttcccgctccagaatgatctgataatggggcagggtgccttccactttgagcagggccgattcaacctgcgacgggaacacattcacgccgcggatgatgaacatgtcgtcgctgcgccttccgatacggcgcatcctgcggatggtcctgccgcactcgcacggctcgggcatcagcgaggtgatgtcgcgtgtccggtatcggatcatcggcatggccagcttgctcagcgtcgtgatcaccagctcgccttcctggccgtccggcagcggctcgcacgtctccggatcgatgatctcgcaatagaaatggtcttcaaacaggtgcggccccgcctgctcctggcattccatggcgacgcccggaccgatgatttccgacaggccgtagatgtcgtaggccttgatgtcggcttcgggctcgatccgttcccgcatcgcctgggtccacggttccgcgccgaacacacccgctttgatgggcagtttccgcatgtcaatacccatctcccgagaccgctcgatcaggtggaggaaataactcggggtgcagcagatggcggtcacgccgaaatcctgcatgatcatgatctgacgatccgagttgccgcccgagatcggaatcacagtcgccccgagcgcctcggccccgtaatgcgcccccaaaccgcccgtaaaaagcccgtagccgtatgcgttctggatgatgtcgccctgcccaagcccgcacgccgcaaacgaacgtaccatcacgctcgaccacacgtcgatgtcgtcctgggtgtaggcgacgacgatcggtttgccggttgtcccgctggatgcgtgcagccgcacaatctcgctcatggggctggcgaacaggccgaacggataggtgtcgcgcaggtccgttttcaccgtgaacgggaggttgtggatgtcttcgagcttctgtaggtcctgtggtttcacacccttggcgtccagccgttcgcggaacagcgcctggtggtcgtacgcccgcttcacgatcgtcttaagccggtgcaattgcagcgcccgcaactggaccaccggcagataatccggtgcactcaccggattaaacgaacttccagcgtcatgcctgaatgcgttcacatcgtccctcccggggtttggctctcaagccgaatatagccaaaaaacaatcaacaaacaaaccaattataggtcctataagtcgtataggtcctattcgcccaaacccaacaaattcgtgtccaactcgactttaaaaccgcccacacttacacgactctaaccaaaaccactcttatccgtcaacccggccgaaaacgtccaggtgccggtccgtaaccatctcgacacgcagcccatccaggcccgcacaagccagttgcgcacccacctcgtccggcgtatacgccgacagcaacgagcggtaatattcttcctgcaacagggccgattccgcccccgcgtatcgccggactatctcggaggccgcctgcgccgaccgcggccgggcgagatcgcgcagaaaaatcagcgtccccggaaggcttacgcgcccgacttccccccacagccgccccgtatccgtgatatggtgaaggatgctgttcgagaaaaccacatcgaacgctctggacttaaacggcgccgccttcgcgtcttgctcgaccggccacagggaatcggccgcgccggctttcttgattgcgcttcgcgccaactccagcatcgcgtgcgacacatcccccgccacgatcttccagccgccccggcgccgccaaagccgaagcgggatatcccccgggcccgtccccaaatccagcgccagcgcccgatccaccggccccgcaagctccaccagccgctcgacaaacgcctcattcacatccgcgaaatcggccgccgcataggccgccgcctcttcctccagatccatcgcctcaggctcgggctgtcgttccattgctgctacctatgtaaagagcccatgcaagtccgggctgtattgtggtgcgggcgtctcgcctgcacatataagatttttttggtaaccttgggcagcagtttagcaggcaaggccatgaaaacgcgcgccgccaagatgccacgtgcaggcgggacgcccgcaccacaaatggcatcgaccaaactaacccgccaaagccctccaccgccgccacccggtcgcgcgggacaaactatcagcagaaatcttaggtccttttggtcccttatgtcccttgtcttgacttctcagacagcctggggaagggcgtaacccgcgcctatgccttccgccccacctcgcgcccgtaagcaaacaccgcggcattctgctcgtggagtttttccggcaggttggcataaacggcctcgatccaaacgctctcctcgaggtccaggtgcgtgctcagcacgcccagcagcgccacgttcagattgcggcggttcacgggcgaatcggggtctttgtccaggtcgccgaacgtctggccgtccttgaggaacatctcgggcttaaaaatcaacccgtcgggccgcatcacgtgctgggccgcctcgatctgcgtactgtcgagcgctaccatgaactgcgcctcgcccgacggaaccatcgggctgaacacttctttgccaaaccgcacgtcgctggtcaccgacccgccacgctggctcatcccgtggatttcgcttttcttcacgtcatgcccggaccggaacgccgcttccgccagcatgttggaagccttgataatgccctggccgcccaggccggcgaacaccacgttggtcacctcgtttttttcaggcattggctttctccgtcacggacgcagtccgggctttctgctttttcaccgacagcaggcacgggcgccgcgcgataatcagcgtcagttcctcgctggccaggctctctttgaccagcgcctcaaaacccgccgggtccacccccgtaaacacgtgcacgttcttgatgccaatcgatcgcgccaagtcttcaaagctcagcttgtgggtatcttttttgttgagcctgacgccggtgccggggtggtcctgcaagcccgtcatggcggtggtcccgttgtcgagaatgaggaccacgtggccggtcggcggcggattgtacgccatctcgacgaggcccgtaatgccgccgtgcacgaacgtgctgtccccgatcacgctgaccacccgccgcgcttcgtccggcggcagcacatgtcgcaagcccagcccgttgccgatgctcgcccccatgcacacgcacgaatccatcgcgtcgatcggcggcaggacccccagcgtatagcagccgatgtcgcccatgatgatgcaatcgagcttcttcaacaccgacagcgccgaccggtgcgggcaacccacgcacagttgcggcggcttccccggcggccggatcggctcgggcgattcatcatgcgccaggatccgtctcacccggtccacgttcatctcatcaaaccggtacatctcagccttgccttcgcacgccaccccaatcgcccggcacgcgtccaccagatacgggtcgttctcctcgataaccacgcagcgctcgacgcttttcgcgaactctttgatcatggtgtacggcagcgggtacgtcatgcccagcttcaggaagctgccggccggcgccgcttcccgcgcgtgaacgtaacacacgcccgccgtgatgatgcccagcttcttgctgccgtcgaaccgccggtggagcggcatcgtctcgccccacgcgtagatttcctcgagcttcgcacgcaggcgccggtgtgcgggccgcgcaaaccccgggatcatcacgcggccccggatatcgtgctcgaaatgcgccgccagcggctcgagccggtttgcccgcggcgtcaccaccgtctgcgaatggcaaacacgcgtcgtcatccgcagcatcaccggaagtttccaccgctccgaaatctcgaacgccgcgaacaggaactcatacgcctcctgcgagtccgacggctcgatcatcggcatgcccgcagcgactgcgtaccgccggttgtcctgctcgttctggctcgaggccatccccgggtcgtccgccgataccagcaccagacccccgctgacccccgtgtaggtcgacgtgaacaccgggtccgccgctacgttcacccccacgtgtttcatgcaagccagcgcacgcgcaccgccgaacgccgcgcccagcgccacttcatacgccaccttctcattgggcgcccattgggccggcccgcccaaagccgccagactctcgagaatctccgtggacggcgtgccgggatatgccgaagccaaagcgacccccgcgtcccgggcggcaagcgccaccgcctcattcccgctcaacaacattcggttcttaccacttgtgtcggtcataatatgtcctgcgctgttttgtagcaccgctgaaaagaaaaaaagacacccaccgcaacctaccaaaattccggcggtcaatcaaatcacccttaaattatgcctgctcgaacccgttcccgcaacggcccccgttttatttttcacagccatcgggacgcctcaacctttcggggccggggccgtatgtgctactcttataactggaaacgtctacgataaggagccgcagcatgggcctgtaccgatttcaagtcattatcgagcaagatgaagacggctactacgttgccgatgttcccgctttgcgcggttgccacactcagggcaagacgttcgaagaggcgatgacgaatatccgtgaagtcatcgagatgtgcgtgcgcgagatgcgcgaagacggcctcgagattgaaacgcagtatccggaagtgatcggcataaagaccgttgagatagcggtgtaagcacccatggcccacgaccttccgatgctgagggtaaaagaactcgtcgcagtattggaacgtttgggctttcagcctcgaccgttgggggcaaccagtcaccgccgctatgtccatcccgatgggcgcagaactaccgtcccatttcatgctggacaagacatagggcgcgggttgctgcgaaagatcttgaaggatatcgaaataacaccggaagagtttaaacgtctcttataggcgcagcgtccgaacaaggtgttctccatgcctcgaaacactgaaaaacaaattattgagatgctgaagaaccttgcgcaacggcttgggcagaaaagcctatcgaagaaagacatcgcttcggtaatggctgtgtctactttgaagtatcgatttgggaatattggaaatgcattggaggcagcaggccttgatcgagtggctccaggggagcatttaagaaaccgaggccctgttctaacggagcgcgcccttttcttagcgttgtatgaccttgaaaagaaaattggtcacgagcccggctacaatgattgttctgcccagtgcaaatattctacaaagccctacttcaaacgatttgggaaatgggccgatgtccttgcgcattaccggaaatggaaatcggagaacagccacatgatcgtctcaacccctgaaggcgaacgagtcgtcgaagaaggcagcgaaggacaggagagctccggaactcaacgtatgatttccatcggtacgacaagaaagaagacaccggaacaactatacggcgaacccattgattttcgaggtttgcgacacgcccccatcaatgaacaaggcgttgtattcctctttgcgatggtgagccgggaactgggttttaatgtcgaatcggtgcaacaaggttttccggattgcgagggaaaatatctgtttgattctaagaaaaacctttgggctaaggctcgcatagagtttgagtgccaagcgtcgaattttgagcaacacggacacgatcctaatcaatgcgatttcattgtttgctgggcaaatgattggccgggctgccccatcaaggttattgagttgaaaaacgaaatcctgaaactgccttcccgctaaatgaggatccgcgccgcgctagtccctacccgtccctgcctggtttgacgcagccagattcaccggggtactgttcttttgtgagcgaacttgcgttcaaatatgtcttcggtcccgcgctatcgcgccggcttgggcgttcgctcgggattgacgttgtcccgttcaagacctgcacctacgactgcgtctactgccaactcggccctaccaccgtccacacgctcgaacgcgtccgtttatctgggccttgcccggtcggccaaggagtgcaactattcttggccgacttccagatgcggatcctgtcgtagcgcttcaagtcataagacacggtggaaactcaggggaaaataggcgcccgcatttttggttgacacaaaataggcaatcgtatatatttgacgccgtcgcgggtgctagcgtgcttgaacagcaaggagcaggatgtgtcgagagagaaacgtcaagacaaaccggctggacgacctgtgctggagaagctgccaagcgcggaattggaagtgctggcttccctctggcaacaggggaaggccacagcccgcgagatccgcgaggcgatgcagggctaccggcccatgacgcacgggtcgatggtctcgctgctcaaacgcctggaaggcaagaacctcgtgtcgaaagagaaggggccggtgggaaaggcattcgtgtattgccctacccggccacctgagccgacgtatagacgaatcatgcgggacctatacgagcgtgtcttcggcgggagtggcgttgccatggtggcgtcgctcttcgagtcgcgcccgcctacgtccgaggaactggatgcgcttgaaaggctgctacgaaagttgcgggagaaacacaccggggagaactgaataccatgcagttgctgcattcaatcgagacgttttcagaggtcgtctggccctacgtcttccatgccacctggcagtcgatgctggccggtgcgctcatcctcggcatcgtatggctgctgcggaatcggtccgcgtcgctgcgctacgccttgttgatccttgcactggtgaagttcgccgtaccgccgcttgtggccgtcccgattgacctatcgcattggacacctgcagaggtaccggtgcgggaggccgtcgcgcctctgccgaaggagtcctcccaggtccctgtcatcgacgtgagcgctgtacctgtcgaggagcctcggccaccttcgtacgttggttcttcgcaagcgcctccagaacaaccacagactccaatgccgccgatgctgccggcggcgcctcagcaccacatggcctggcacacgagaatcttggcactgcacctggcgggggcgtttgtcgcgtgcctttggatcctcggctggacgtggcggatttgggcaatgaggagacgcgcccggatggtcaccgcaggaccattgtacgaacagttcctgagcctctgtgcggaattggacctcagccagcgcgtggacctcttcatttccgaggacaaaacgtcccccatagcgttcggtttgttccgccctaaggtcctcatgcccgcctccataatggacgaactctccacggaccaactcggcagcatcctggcccacgaactcgcccacctccgtcggtgggacctttgggttatcgtgttcgagaatctgcttctgctcttgtggtggttcaaccccgtcttctggctcgttatgcgcgcactccgccggacacgcgaggactgctgcgacgatttgatcctccatctgcgcctcgcggaaaacaccgcctactgcgaaagccttgtccgcgccgcctcgagcatcgcaggtttcggcaggctccgccccgccgtcggaaccgccgagatgctccaccccctcggtcgccgcatgaagcgcatcatggacgtgaccctccgccgttcgcccagactctccattgccggcgccatcgccgtcgtactgctgggactggccgtcctcccgggactccgccccgtcgaagcagaacacgacgcaacggggacgaaccgccgcggcgcggagacggttgttcctgaagggtatgagtatctcatgcctcaactcgagccgggtccctaccggttgcacggaacggtccgcgaccaaaacggcgcaccggcggccggggtcaaggtggcggtattccgcggggaagcgtggcagtggggttacaaggacacctttacggccgatgacgggacgtacgagatcaccggcctgcccgatggggcgtacaacgtgtttgcggtcaccgccgacgcgttcggggccgctccccttacgctgggaagtcctcttttgccagacgaaaacgtgtcgcgagacttaaccctcacgccgttcgaccccgacccgctcgaaggaaccgttttaagcaagacgggtgaacccgttcctggcacgctggttctttctatccgcgaatggagttcctacggcatgagtctggccctgcagataagaacagaccagaagggccgattcgcgatcccgagatggacatggccatacggccggggatcgcaaattctgttaccgccgaccctcgcggcgtttgctgagcggcaggaccccggcgtactcctgggtaaactgccggaaggcgagccgctcacgctcgttctcgatgacggcgtccgcgtttccggcacggtctgtttcaaggattccgggaaaccggctcgcggcattcccgtgatgttacgcggcacgcccgcggacaacgacatgcccgacatcactacgcgcaccgatgaatccgggcgctttgttttcgagcgtctctgtccttttcagtatcaactcgtcatctatgatgccgaggcgggctacacggcgctggagcatccccggctgaaccttctcgacggccaggatgttgtcggcctcgacatgcagatctcgcacggcgcaacaatctcgggaaaagtgacgtttcaagaaacgggcgagccgatacccgcagtccggctgtgggtgccgaacgtccgcccgcctacggtgttgcgagaggcggtcaccggatccgatgggacttaccggctgcagcatttgcctgcaggggaattcgccgtggcctacgccgtcccggatggcgtcgtgcgagagcctcgtccctcggacattggacccttggtggcgaagactgtctctgttggcccggacgagcagttgacggacgtggacttcaccttcgaacgcggcgcgtgcgtgtcgggccgcgtcgtcgatcaagcaggcgatcccgtcaagggtgcgcgcctgcacgcttcgaatagccatcgtaaccaactgcggcccagtcgccgcctcactacgtccgaaacggtgaccgcggaggacggggcctattgcctctggggcctggcgccttccgaggaatggacctatcagttagtcgtaagtgcggacggatatggacggattgagtctgatccattccaagtgacgggcgagattgatggcaaggacttcgtggtccagaggtgcgcgacgatctcgggccgcgtcgtggacagccagggtcgccccgtccccaccgttgccgtaagcatgaagattaccgaaggtcgtgcgtcacagcggttacccgacgctctcagcgacgttgaagggcgctttgcgatgcgggagggcgcctgtcccgggacctacacgttcgagctgtgtaccttgaatatggggttcggtccgtatcggacggtggatgcggcgaacccgccgcttcgagtcgaaggcccggatgacatcgaagggatcgaactcgtgttgcccgacgaaaaagccccgcacgatgccacgcctgcaaagccggatgctgcaccgaaggatactgccgcgaaggcgccggaaatgggtttctccgatggtgtggaacctattcccgccatagacgaacttcccggaaggctcgtgttccacggccgctatgttcaccggagccgcggccgcgagtacgaccagccctcgtctttgtgggtcaaagagcaggaaaacggggctgtcagcgccctatcgcatttgaccttcttcaacgaaacagccttggccgtgggtgatgagaatcaccggcccgcccactacgccgcgacccgcaaggcatcggaccgctatcccgcgttccaggcaaggattgacttccatgccaacaaggcggtccagatccgtcattggggtgaggagaccgacgataaggaattccctatcgacgagggcgccctgttctccctgaactcgcggcccgacccatacgcggttatcaacgttctcatacgcgggttcgggctgaaggcaggcgagggcaaggagttcatcatgtgcgattggggcaacgggccgcatggccaaggcacgtttccctcgtaccgtgtgcgcgtcgaaaacaagggcaaagaggagattgtagtcccggccggggcgttcaataccaaccacctcgtccttacgcaactcaccagcgccgacacgtggttcaagaagcgcgccggccatgtcacggacctttgggttctggacaatcacatcgtcgtgcgcatcgtccgtcaccgggaaccctacgaggtggaactcctcgactacgacgtcccggaccgtttgccgggccagatttcgcgtggtgtcccggaaggagcgcccttggaagtcctctccgcagagtacggtgcgcaggacaagtgggtcgacgtgaccgagccgttgaagcaacgcatccaaggaaacaaactgaccgtcagtagattcaatgaccttgccggcgatcccatcgacggtgtggtaaaggagttgaaggtaaagtaccgcgtgggggaccaaacccgcgtcaccacagtccgcgagggcgaaaccctcgagttggacatcgacctgagctccggggcaaccccggcgggggccgctgcggaataggggccaccggaagacaacgttacagcctggaaggagacgaaatatgaaacaggtgctgattggcgtgggcgtgctgcttgcggctttgttggtgatccctgtgatcgcgtacatgatgtcggggggcaagctggagccgagtattggtgacgccgcggttgcctcgtcgttctccgcacaattggtggatacaaacggaaaacccttcgcggatgcccgcgtctatcttcatcctgccatcggccatccggacaagcggggacaggaccgcgccagcatgcccatgcagaatacggaaaccgatggcgagggcaagttctccttcagcagcgtcagtccgggcacctacaccttgcagttctattggaaggacggaggggacaagggaaacctctacctcgacgcgcagaagttctggctggatgtctcgccgggggccgccgcctccgaactcaccattgtcgtgccatcgctggcggcccactcggtgggcggctacgtgcgggatgcgcaagcccgtcccgtcgccggcgtggcggtggaagccatgggcctcgcggactactcccgatcatcgaccaccaccgacagcgagggacactacttgataagaggcatcgcgggggatgtagcgggtgcgatctggttcaagggcgccgggaaagcggaactcaaggatatcggcatcggcacaaccgacgcaaacgttacgttgcgttagcctgcgaggacgggtggaccacgaaacacgccgaagccggccgacgttctctcttgtcgcggtccgccgtcctttcttttgacaccgctcggggccgtagggtacggtcttccctaccaggctgatctcgtcagggcccgacttccagcggatcgtttggtctatcatgtctccgtagatctcagggcagtcgttcaacgagtatccgtcgaccggtgttccgtcgatatcttcgagttcgacacgcgcgcttcccgctgcgggcgtggcgtagttgaggaccagtttttcccctttgaaccgaatcggcttcgtgacgaactcaccgcccccgagcggcgcatgcatcaaaacgaacgcatcgacgcgaaaggtgtaccgtcgcatgcaattccccgcgattacgctggtgtgcaacaaaagggtaaagactcagagtatggcgactcctgctgagtttgacttgcgccctgcccaacgggcatcgttgaaactacggcgcggaaaatctgttgggtacccgaatgtttggtgttggccgcggccctgattctgggcgcggcgcatgccacgccgataggggacgacgatggcggcactaccgtgatccgcttctcctattggggaaacatagccgatgacgccattttccgcgaagtcgcggaatcctttgagaaaagtcatcccaaagtccgtatcaagttcgagtgggtcgtcggcgactacgggatgaaactgcccctcctgctggtcagccagacggccgccgaccaggtgccgcgcgacgaagcccaagaattgcgcaagaccaatcccgaactgctcaaaaagacccgctacatttggctgaagaaccccgagaacctcaccgacaagcaacgcgcgcgacttgggcatttggagcagttgaacctgcgcagcaaccgcgcctatcttctcaaagaaagcttccgtgaattctgggactatgacagcaaagacggcgcccgccgctttctcaagaagtggttctggtgggcgacacactcccggctcaagcccatgcgcgactttgcctggacgatgaagaaccacctcgacgacctcctcaactactttgagatgcgcatcgacaaccgcgccgtcgaaggcatgaacaacaaggccaaagtcgtcagccaccgatgctacgggttccgtaccgccccccattacatcaccgccctatatcattgcctgggcgacctgccggagcccaaactcgtgcacaaattcttgtgaggaacctctttttctttgcccagcagtacttcgtgaagggcatcgtactcacagggattaagggctgaatattccaaaccttgtggccgtcgggcgcgattctctttgcgcaatgattccatgaacagcatgcccttaagagaagtctgtaatgtcatccgttctcgggccaccattgaagattcctgctgcatatgcctctccggctttttcgaatggtctttgaggtcgtgaatgggcagcgcgcgggggtagtatgtgcctggccaaccagtcgatctcctgtctgcccgtgtggttctccatcccaccagaccaagacgaagacggttactacgtcgcggatgttcccgcgttccgcggttgccacacccagggcagaacgttcgaggacggaggcaatgaccagccagcatccgcgaagtcatcgagatgtgcgtgcgcgagatgcgcgaaaacggcctcgatactaaaacccagtatccggaagtaataggcatcaaaaccgtcgaaatagccggggaagctcccatgggccacgaccttccgatcctgacggcaaaaaaacaactacgcctcctctttcgagacgcgcctgtaggtccaaaatcatttgacctgctattgccggcgattcgggtccacgattcgggtccacgcttgacgcacccgctctcccgcaggtactgtaaatctatggctcagaaatacgtattcggccccgccctttcccgccggctggggcgctcgctcgggattgacgtcgtcccgttcaagacctgcacctacgactgcgtctactgccaactcggacctactactgtccatacgctcgaacgcaagccctacgtgccactcgacgaggtactcgacgaactccggagcaagctcgaaaccggcgtcctacccgattacgtcacgatcggcgggtccggcgaacccaccctctattccgagatcggcccgctcatcaccggcatcaaatccctcacgccaacgcccgtagccgtcctcaccaacgggtcgctcctgtgggacccggaggtccgcgacgcactgaacctcgccaacgtcgtcctgccctccctcgacgcctctgacgcgcagacgttcctcgccgtcaaccagccgatagccgccattacgtatgagagaatgatcgcgggcctggaatccttccgcgagacttactccggccaaatctggctcgaaatctttctcaccgcccccatcgaacctcaaagccccgccatagaccgattcatcgactgtatcggccgcatccggcccgacaaaatccacctcaacaccctcgcccgacccgcaccaggctcgaccgccgttcccgtcgcccccaacatcatgcaaaagatcgcacgccgcatcgggcccaacgccgaagtcatcgccaactttccgaatattgtggcgcaggcgtctcgcctgcacgtctccgaagacgaaatcctcgccctcgtgcgccgacacccctgctcactccaagatatcgccgccggcctgtcaatccccgttctcgaagccatgaaacacgtcgagcacctgctccaacaaggcaaactcaccgccgaataccgaaacaacgtcgccttttacctcgccgccaaccgcaattgaaccaacgcgcgggcgaggcgttcttccgcagtcaatttaacccgctgctgctcgctgcattgccccatcgcacggacatccggccgttgccgccgtcgactacggttaggaaccgcgttgtgtcaccatccgtcagcggttcaaaaggttgtgaagcggcatcgtcgcggggcggcagcgcgaactccgtgtccggaatcggctcgttcatgccctcgtaggcaaacgtatacaggctgcgcatgcatagttgattgacggcaacctgaacgggcatcaactggtgcgagtcgatccaccatcgaatgatcctggcctccgtccagtcgccgggaaggtcggctgtagtcgacttaatcacgtgggcttggcggccgttaaaactgaccatcccttcgtattcgagatgcagttccgcagtagccgcgtctacgtcatgaccttcaaggtcaaagggatcgcatatcaagatgtttttcttgccgattgtgtcgtgcggcgcagcctgcacggattcctctgtctgcccattcttatcggtggtggtacacagccaccagcactggtccccatccccggctacaacgaacctgtttgtggataggttcacgtcgccgtagaactggcgattcccctgaaacctgaacgtgccgccatcggctttaataaacggcgccaattcgacgggcacgacgccaaacgcgtacgttaccatgacatgctcggacacagacgtcagatgctgccgcgcctggcgcatctcgctcagcaccgtgagcaaccggggatctttcgccgcctttttgaaccgttcgagtgagctctcggaaaacggttcgcgcgttgtggacaggtgcagcgggaccggcgcggctgccgccccctcgaccgtgcgaaacccccgaagttcgatatccccctgccaatcaggcggaaacgataccggcaagagaaaccgctttccacgctcgtcatactgcacgtccgccagcagttgtgcgccgcccatcaaggatctgtccttgctcaagtcaacaatgtaacccgcggacggatccatcggctggtcaaaaaccacctctatgaacgtaagacacgcaaccgtgtcacccggcgcgggcgagagcgatgcgacgcgcggttcaggggcgtccgcccggctcggtacagccgccgtctcaaagccccaacggtactgcgcggccttcacgccatccgcggaaaggaatccgtcgtcatcactgttaacggcaatgaattgttgttcacccggcgttaaccgtacgggaaccacgaactcgtacgactcggcatcgtactgtgccgccgaaaagtctctcaggccgcccttctcgaaggcaatccccattctgtccggatccataggccggtcaaattggatcctcagttccgtttgcacggccacattcttggctgcgtgcgccgggaagacaccgaccacaaccggctggccttcagcggacgcctgggcgggctcctgttttgggagggccgtcttgagtgcggccaattcctcctcactcggcatctcgacgagggccggcgaaaacgccgccgtcgagacgttcgtgacataaatgcgtttggatggcttgccttcttgcaggttgaggccctcgcgcagaatccacgcgtcatcctttttttggaactcggcccttaatacccactcccggtcgtccaacagcgtactgtggtaggccagaaccttgggcgcggattggcttccgaaggccaggaattccgggccaatttcgatcagttctcttctctcgccaccatcgggtagttgcgcgaagtcctcctcgagcacgggcacaaattccggcgtctgaatgtgcagtcgcacccggctgacggggtacgagctttttccgaaccatgttccgcccaggccgaatcccactgccgcgccagtcttctccggttccgcctcaatcactacgatgttttcagaaggcgcatcggtcgactcgacaatgcgcgcattctccggcaggccgcgcctggcaaatgcgtggagcgccgtgtgccacatcaatccctgccggtacgtcgacgcgttctccatcggcatgggactccgctggagaaggccgtagggctgcaaatagaccgcattctggctgtcaaacaccatctggctgccctcagtctcccagcggcctttatcgccgtcaatccaaacgcggtgcaccaactcgggcgtgtttcccggctcgggcccccccatgtttagcgtgtatcgcagatacgttggtcgcgggtcgagccacacgcggtttacctcaaccacctttctccagacatctttgggatcggacaggtccaccggtttctcaacggcttccgtggaggcgtcggccgattccgcagccgcagccgcgacgtcggcaactgtctcggttacagtggctgcagccggcgggacggcggccaagtccgcggtgctcgtaacaacagccggaatcggtttctcaagtgcctccatcggtccgatggctagtgtgaccacaagtccagcgacaagaagtattggaaccgcgataagtttgtgcgctatgacgagttctcccagttgtcttgccggatacagaatacgtgtcagactggctgtctccgtcagaccccacgaaaccggcgccacaacaatcgctttcatgaccgtcgagaccttttcctgggacaccctgtaccggcccgcctcgacgcgtttgagcatgcgctcgccgagggcttcccgcgcccgttgcagtcgttttgccaaagcgagacgactcacgccgagcaaggattccatctccgtgagggaacgcccggcaaagtaatgcatcaatagcacttcgcgatggttctcgccgagtttcagaagctcctcgtgcaacagcccgtccaattcagccgcctccccactcgcagatggctcgacagccaacggcggcgttgcttcatgcagggacgcttcgcgccctcgccgggccaacaaggtgttacacacgttccgtgcgattgtcagcagccacgccccgaacttctctttaacgcgaagccggtcaagagactgaaaggcccgcaggaacgtctcctgaaccacgtcctccgtatctgacacatttcggagccgggccatagctgtggcctgaacaacgggcatatatcgctcgaccagttccccgaagcgctcccgctcaccggaaaggacgtcctgtatcgcctgtttatccaatatgacttctcgcccgagcattgtttgttctcctgtagctcatataatagaccgataagcgtcattttgttgacatcttgtgtaaacgccggtcgagaaattaaacacccttgctagcctcacgtttttcgaggtacggcgccttggagtcgtcggcggactactgcttgaacgcgcgtggggctcagcttttccctaaagcgcaaagggctgtccgtatgggcaacacgcagtcgggtggtcatggcacgtaatgcttggcatgacagtatgttgcataaccattgacgatcttcagaggttcttggaagggcagaataaggccctgcataaatcggatgcaagatgagaatcggtacgcgagcaaggatgtggaaatgtatccgggcggctggatcggccttacccggggaggcttccactatgtcatccgaacatctttcctctcaatcattattcagcgcctggttagctgaccatacgggcgtaggttgctctgacttgtctgcaacgatcgcataacgaattccggggctactctctctatttttgggtcccatccttactcgcggaatcaagagcatacagacaaataaaaacccggcctccagttctgttgaaatcctgtcataatcatttcgcatcctgaccttgatttccgtacgcgccagtttccgtctacttctccaccggcaactcgggacgtgcagcccattcggtccagccagcgtcgtagtacaagacatccttgtaaccaagcaaccgtttcaagacaaagaatgtctggctcgcctggtggccggtgcggcaatggacaatcacggttgcatcttttgacggaacaatggctgcataggccgccgaaagatcggcaaccggtttgaacgtcagcactccttcgttcttcaccacgtcttcggtgtagggccggttaatggcgccggggatgtggccggcgcgggcctcgtcagacttggcgccgctgaagtattcagggggacgcacatcgatgatgatggcggatttatcctgctggtgcttgagcacagtcgcggcatcaacagtgaacgtatctgcccccggcatgggcttatactccgactcctgtaccgacggcagcacggtatccataggtcgcttttcggcggcccatttcccaaacccgccgttgagcaccgcgtagcggagatggccgagccgttcgagccccatgcagggcaaggtggcgtcatgcgccttatcgctgtagataaaaacgagcagattgtccggcgttatgcccatcaaggacaagtggcgcgccagcaggtccgccggcagcaacatcgacggtagtcctttgacgttgccgcggaagctctccacggcaaggctgagtgccccgggaatgtggctggtgttgtattcgggctgcggcctcatgtcgatcacgacaactccggatttcccaaggttgtccgcgagccactgcgtctccaccaggccaggcagtcgttgattgtccatggctacagggggtgccggtgatgctgccggtaccggcgtggcgaccgcccgagttgccgcggccgtcggtgttaccgccgtagccgatcttgccgtaaggaagaagttgcgccatgccgtcaccttcgcagccaacgcttgcgggattggttctccacgcagggacaccggtttcaggcaccgctctatgaagcccttcaaaccgtcggtgagcatatagatgttggcgtatcccattctttccagtgcgtcacgcacctgggcggggtgcgtcatgccgttcgagtagaggacaaccgtcttttgccccttgtgcgccgccaggtactgcggtaactgggcgagaccgacattaaccgctcccggcagatgaaaggccttgtattcgccatcagtccgcacatccatcaggagcaaattgggatcacccgccagcaaccgatccgcaagttcctccggctcgatatgatcgccgccctgctcgacttctttgagcagcgattcctcgccaagagccgattgctcgtgtgtcgccagttgggctaccgcggctgtggcaggggttccggttaccggcaccaggaacagtccggcggcggcaacaacaagtgcaaggctgaaggccttcaggaaaggcgaacggaatagggcgccgcccgtggcgcgcgctttttcgatgtactcggcgccccagaaacagaccacggcggcaagcgtgaaggcgacggcaaacaacggcttggacacgtggagcgtgtcgtaaacgaactgcacgcccctttcgccagaggtatacaaaggtttgaccagccagaaaagttcgttgaacaggacgctgccgccaatcgcaccaacaagaaacaagagagcgtccatcttgcctgcggcgagtcccgcggcggccgtgcccggacaccatccgcccatgacaaagccgacgccgaatatcaagcctcccactatctgggcgccgtagacggtatccataaagaagatgctttctgggcggacccagccaaacgccaggcaataacacaaacccagcatcgcggttatcagcgcggtaaacatgaccttgaggacggtcatgtcgcgaaaatagaaaatgcccgccaatttccgcgaactgctgaaccccgcgcgttcgagtgaaaacccgaagaaataccccaccagtaacgccacgaaaagagccgagctggccccgagggaatccgaaccgtagaatgtctcaatcattccattgcctcctcacgaaccacgcggcggcatagcccccggcaaacaaacacaccataaaaatgaggctgcccgtcagcagcagggccccgcctgtcaaggcttggcctgacgtgcacccttgagccaggcggctggcaaagcccacgaggagacctcccgcgacggctaaaagggctcggcgtcccgccggatacgcagcgcctcgctcgatctggaacgagactcggttggccaggagcgccgagaacaatcctcccaggaagatgcctacgagcataaacacgaggtaatacttcaagggcgagccgctccacgggccaaaatattcgctggaggccacgtggccgggaacaatacatccttcggtaaacgcggcgactcgtgcaattccgccggaagcgcccagcccggctccaagcaacaagaacgaggccaacaacgtgagtcccaacagaatgccggccaaataagggttccaataagggttcacttttgttttctcgtctatcatggttagcaccccgcgcttttcttcttggccggttgaggggcggcgggcgcctgggatgcaggcgcggacgctggcggagccgggggagctgcttgcggcatggaacttcctgccgcagcggcagatgcgcccaaagccacctctttgaccactgggttcagttccgaagccgcccagtatgcttccagtcctccatagagcgcccgaatcggccgcgtcgtcttctgcgagagaatgcccgcagccgccatggccagggaaccgtcccggtctacaatgaccaacggcgtcgtgccattcagatattctgagttggtgataaggtcgccaatatcgacgtttcgcgcccctggaagcgtgtagtcagcaaacatcgcgggcggccggatgtccacgaactcgaaggtcccgggcaaatccacaatcatccgtttcaaatccgaagccgaaatcctttccggcagattgaccgccacccttggcggcggtggcgttgccgatgcggaaaattgagccgtctgcggggccaatgccacgggatatgacgcggccgtgtcgaatgcggttggcagtgccgcatccgtccaggcggtcattccgccgagaagacttgccacattcttgaacccctttcgttccaggacacccaccgccatgctcgagcggtaccccgagttgcagagggtgacgaccggttgcgcggggtcaatctgggccgacagtgtgtcgaggtgttgaagcggcaagttgagtgaggccgcgatacgtcccttggacaattccgccgccagccgcacatccaggattatcggagcgtccgccttctctacctgtgcgttcaggtccgccggtttcacgagcgtattcttcgccaccggctggctggatttcagccaagagtcaatcgagacaacccccgcgtgatacccgaccctgtgcaaccggtagatggcctctttcatctgcggagccgtgccgcacacaaccagtctggcattccaaggcaccatgatgcccacccacgtttccagccgttccgtcagaccaatattgacggaactgggaatgtgcccgatcgcatagtcggcgtcgctccggagatcgaccacgtaggccttggccgggtccgtcaggttcacatcggctggatcttccttcggcatcggcgcgctccaatccaccaggtccggcccgttccggttcaatgccgcatcgtggtggaaatactgcggcgcttcgggcagacctgcgaggtctgccgcaatatactcgttgcggcccttgtgctggaggtagggattcttggcgcgttctgccccgatagtcgatgagggcgcatcgctcaggttggcgccacacaaggatcctgcaccatgcgccggaaatacaaccaccgcgtcaccgagcttggcaagcttgttcacccacgtgtcgaagctcatacccgcgagttccgagcccgtcatcgtcccgcccagaaggtccggtcgtccgatactccccacaaacaacatgtcgccggtcaggaccagttcaggcatatcgggtttgtctttgctgaagacataggccgtcatgctgtccggcgtatgccccggcgtggccacagccttgacggttgcctcgccgatctcaatcacggtcccgtcttcaagaggcttaaacggatattcggcttcgctgatggcgctcgcgtagatggggctgccggtcgccttcgccatttccatatggccagcgacaaaatccgcgtgcgagtgcgtcaggaaagtgcccttgaaactcagcccctccttcttcgcgtagtccagataagcgaatatatcccggccagggtcgaccatcagcgattccttgccgcttaccaccatgtaggaatagtggctcaaaacaggcaacgtaaactgcacaaggttgaatcctggatacttgtagacgtcgacaaccgagtagtgcgtagtatccggttcctgcggcgattcagcccatgcaatccgtggcgctgcaaacataaaaaacagcacagacatcaggacggcgcagacgcatacacatgctttcatgtttgacctccttggaaatcttcgaaaagctcgatattccataacgtgaaccgttgtttcataacacaaattccctgtcgcgtagggtcaaaatatccagccaacgtgtaaccaattctagccaaacgagttgcgcttaagttgtgtgtcggcactgaaccgattgactcggcctcaacatgcgggcatcatgcctcttttccatttggaaaggattgcccgttctcatgccggaattcatcctcaaaccctggcatctaatcgtgttgtttttggctttccatatcaatctggaaacgccggtcgagaagtgcagcaccgtttgtggcggtcgaagttgctgagtgattggctgttgagcacgaggtcccatgcgccatgcacttgccgtatgtgcaataagcattcatctgcttataacgcttaaaactttacattgcagtatcctgcaaaattattgacgctcggcaaaggcccgcgtaaaggcagaataaggccctggcgtgggccgtgcgcaagtagaaaatcggtgtgcgggcatggatttgaaaatgaatatccatttggtccaggaaacctcaaggctcatcatcgcgttcccgaccgtgattgcctctttcttgtgccggcatggtagcatagcgacaagagatctgaggagtcgttccatgttcaagagattgatgctcgccgcattcctcctcgcaaccatcctgacggccgctgtgctcctgcgcgccgtgctggctaagtcgcgacagtttccgcccgagacgcggcaaccaatgacgctgaacgatgaaacagcggcggcccatctctcggaggcgctgcagtgcaagaccgtttcctacatggaccaaactagatttagcggcgatgagtttcgcaaactgcatgcctgcatcaaaaaggcctatcccggtatccatgcccgcatgcagcgcgagttcgtcaaccaatacagcttgatgtacacgtggccaggaaacgaccccacgctcgagcccatccttctcctggctcacctggacgtggtcactgcggaggaaagcccactggcgtggacgcatccgccgttcggcggcgtcattgctgagggctgcgtttggggacgtggcgcactcgatgataaaggacgtctcatggcaattcttgaagccgcagaaacccttgtgcaagccggctacatgccccagcgcactatctatctcgcgttagggcacgatgaagagttgaatggggagcagggcgcagcccacatggcgtcactcctcaagatacgcggggtgcaggcagaattctccgtggatgagggtctcgtgatcacggacggaatcgtacctggcgtcgcaagaccgctcgcgctggtagcccttgccgacaaaggctatgcaagcttcgagcttctcgtcaagcaggagggcggccattcttcccaacccccacccgagacctcgatcgagattctggcggccgcattgactcgcatcaaccgtcacccgatgcccgtgcgttccgagggactgatgggcctcacgttggactacgcgactccggagatgagcctgccgtatcgcgtgcttttctccaatcgctggctgttcggcggactcatcacgcgggagcttgaacaagcgcccgccacgaatgccggcctccgaacgactattaccgccacaatgttcaacgcgggagaaaaggacaatatgctgccgtctaccgcacgggcggtcgttaactgccgacttctccctggagatacaatcgagcgcgtaaggaaccatatccgcgaagtcatgggggatgaccgcatcgagatgaatgtcctgcccggcgcacataacgcatcgcccgtttcagatcatgcggcgcggggctatcaggccattgagaaaagcattcgacacgtgtggcccgcggtcgcggtagcccccagcctcgatatcggcgacaacgattcgaggaactacgctaaagttgccgtaaaccagtaccggttcacccccttttggtttacagaacaagaactggccatgatacacggtgtaaacgagcgcgtcagcatccggcgctatatggaagcgatccagtactatattcagctcatccgctatgcagcaggatgatcattacaggcaacttccgaggaaacgctcgagattcagactggactcagtcttcatacctgaacgataccttgatcctcgctcggtaggcaacgacttggttgttgtcgaccttcatatcgagttgggccacctcagcaatgcgcatctcgcgcaaggttttgcccgccttctcgacggcgttctttgcagcctcttcccatgaattcggcgaggtgccgataatctcgacaactttgtagacgctctcactcatatttactccccttccgtggccgggtcgtgaccggcggctgaaaaccgatactctccatgacctgttccaccagtgtagacttaaaactgacaatcagcaactggtttgtgcaacccaaatccgcaccagccttcagtacgccccgatgcccgggtctccgaacctataggttgaatcgcgtgctcatcaggtagtggatgggctgctcatcattgctgtactcgtggtaggcaacgacgacggtcccatcagccagttgggtcacgctcggatacccgatgtgccaatactgctgcataactaatgcatccagaagagtacgcgaaccgctgcccagcgacggcgccggcacgcccccctccctgatcacgaactctttaccgatctcccaagtccggccgtcttgcgagatgcagccgcgaacaccccacggggccttcctgtagccgtagaccgccagtacgcgtccgtccttcaactgcacgacgtccgccggataaccccagagcgacgttctcttgggcgggctccacgtgactccatcgtcatccgaacacgtgaaccacatgttgtcctgtcgatttggtttgtggtgggtcctcatcaagcacaccagggtgccgtcgctgagccgcgccatccctggctccgagaagctgataatgccggccgcgtcatacgccactgtggaccagtactcccagttgtcaccgccatcatccgatctcaacaagaagcagcggctcggctcggctccgttttcccctttatccgacagtgttccgcccaggggcatgagcaaccccccgtcgggaagttccatgatgtgccccgctcccgacccgccgcaagcgtaccaggacaacgatgagctggcgataggattcgtgttgacctcaatggggtcagtccaggtcacgccgttgtctttggatttaagcagcgcataccccgtttgcctcttgaggcgttcgggcatcccgggaggaggcatttcaagcgattggtcgccttcgtaattgattcccctgggtgcgatgaaattacacacccgagtgtgcatcagaatagtcccgtcggacttctgggaaaaggcacagtcccagttgcccttaaactcggtgtagggccagatgacccgcttggcggcagtgttccaggttctccccccgtccgtcgatttgataaagcaagattggccgctgtcggcatggacgggatatctttcctcgttgaatcccaaaaagagctccccgttttgcagcaggacgatactgacctgattgcatgcatgggccagacttggatccttgtacacgactacatgctcgacatctttaatgcttaccttggtagttgcagtaacatcatttgaatctgccgcgtacgccgacactgtaaagcctgcaagcatcatcaaaaccgccaaaattgccattcttctcacgagacatctcccttccttccgacaagccaacgtttaccatatgttctgcctgcgaccatcgcgggcaagttctccgcgatcatacaggcccggaccgacgccctcaagaccagttcggagggcgttcaaggcccaataacacctttcgcgagcagtcctcagcgctgttcatgcgaattcgcgcagaccgcccaatcattatgagccatttacttgccgtatgtgcgacacgcagcctggtgcttatggcacgtaaagctcagcatgacagtatgttgcaaaacagttgacgctcttcgggcgcttgcgtaaaggcagaataaggccaggacaggggccgcgtacagggcgagaatcgctgcgcgggcatcgctgttgaagaaccggatcaggcgaagcagttcggacaggatgatccggctatcaccatcttggtcggctgtgtagctcgccgggggttcctcatcaccctctggtacaggcctccttcgcccttgtctaactcatgaagacccgtagggaacgggaaaagcccgcattcttgaaaaaaaattcacgcgcggctacgctggtctacgggttaggcctgtcctatcatctgcggaaggagaccggaatgcgcaagacggtccggaacattattcttgtatgggtctttctctcactcgggttgccgttatgggcagacgggatgggctttgatctgagcctgcagcaatacgatccggtcaccggtgagcgaacactggtcacggggaagcttgtcgcgaccaagacggcggtcgtcgtggttgatatgtgggaccaacactggtgcaagacctacaccgcgcgcgtgggcaatctcgtcccgcgcatgaaccagacactcgacgccgcgcggaaacttggcatccccatcgtctttgcgccgtcggacgtggtcgatttctatgcggactatccccagcgcaaggcgatgcaggccgttccgtcatatccgccgccggaaccaaatacattcgagccgccgccccaacccgtgggcaaggaccgatgcgagtgcgggccggatcagccgtgcccgacgggcactcgagtctggacccggcagcacaaggaccttgtcatcgcggagagcgatctcatcgtcgactgcaacaacggccgggagttgctgaatttctgccaggacaaaggcatcgacacacttgtctatatgggcgtggccagcaacatgtgcgtcctctatcgcgagtgcggcatgatcaacatgaaacgccacgggcttaggctatgtttcgtgtcagacctggtccaggccatcacagccaatggcatcgaccccggaagcagggaactggaccggaacttcacgccggcgaagggcagcgccatcatccagcgatatatcgaacaacacatcgcgccgtcgttcgagagccgccagttgttggccgcggccagtatgggaacgcaagaccgccgcccgcacattgtcttcgtactcgccgaacaggaatataaatcggacgcaacgttcccggccttcgttcaacgctatcttggggacgatttccgttgcacgcttctgaccccggaatcccatgtaggcacgggccgcgacaatgtgccgggactcgacgcgttgtacgacgcggatctgctggtgttgagcatgcggcggcgggcattgccggtcgtgcagatggatcatctcgaacggttcatccgcgcgggcaagccgcttgtggcggtgcgcgtcagcaccgtcccgttccagttgagcgaccccgcggaatgccccagcggccacgtggtctggcagaagttcgacgaagaagtgctggggtgccattacaagggctacgattcgcgctcacgcaagacggggtgcgacgtgtggtgcgccgcgcaggcgaaggaccatcccgtcctcaagggactggaaagcgccgcattccatagccccagttggctgtaccggcttaatccattgtcggacaccgccacgctgctgatgcaaggccgctggtcggaagacgccgcgaccgagccggtggcctggacgaacacgtataacggcggccgcgtgttctacacctcgctcggccattgggacgatttcatgaaccccgcgttcaaccaattgctcaagaacgcgatctactgggcgctggataaggacgttccttgaagacgcatttgaccgcttgcggggcgctaccggcttatctacaatcggttcgacagattcgttggggatttccagatacatatggagacaaaggacatggctgacaacaacgccttacttgacaccctcatcgctaaggtgactggcgggaacgacgacgagcggaccgaggcttggttcaacgccggcaaggtcggcgcctccgcggtcaaaccgttggccggggttatctcggcgcacagcggcgaggcggcgctggccgccaagcgggcgctgtggcagatcgcgcgttacgcggctcggcccggcgccgacgccgagcggcaatccgttgtggcggcattggccgccctcttgaacgacgaaacagagtccgttccggcacgtagcgaggcgctctggatcctgtccgagatcggggacgacgcagccgtcgaacccgtggcgagtgtgctcagagacgaggccctccgcgaagacgcgcgcatggcgttggaacgcattcccggcgaccgctcgctggccgcgctcaaggccgcgttcgatgcagcccccgacgccttcaaacccaacatcgcgcagtcgttgcgacaacggggcgtggacgtgcccggtgtgccgtgcgtgagatttgttccgacgaagaagaccgcggttcaacccaagacggagaaatagtctcgacaacttaatgaaggacatgacgtcatgacactcagtaggcgaggatttctggcaagtgcgggtgcagtgttgggctttccgtatatttcggcgatagcggcgccggggaagccgggggcaaacgaccgcctttccctggcgcatatcggcatcgggggcatggggtcgaaccatctgcagcagacattgaagttcgagcgcgatggcgacgtccacttggccgcgctatgcgacgtggacgagaaacggctcgcggcagccgtagggaaatgcggccccggtgtagacgcgtaccgcgactaccgctacatcctcgagcgcgacgacatcgacgccgtcgtgatcgccacgcccgaccactggcacgccgtgcagatggtccaggcgtgcgaatccggcaagcacgtctacgtcgagaaaccgacgtcggtcacgatcaacgacggcaaggcgatggtagcggcgacgaagaaatacaaccgggtggtccaggtggggtcgcaggcgcgatcggccgagcccgcccaccaagcgtgcacgtacatccgcaacggcatgctcggtaaggtccacaaggccacatgctggcacaagctcaatccgacgggcggcacggacccggatggcgagcccccggcgcaattggactgggacctctggctcggcccgctgcgctggcgtccctacaacaaggcctactgccccggcgtgttccggtgggtcatggaatccggcggcggcgtgattcgggatcgcggcgcgcacgtgatgagcatcatccgctggtgcctcgacgccgacgagcagatgccggttaccattgaggccaaaggctatccgcccaacaaggggatttgggactgcccgccggagatggaggtggtctacacgttcaaagaccccgattggcaactcatctgggcgcagcccggtgaccggcagagcaattaccccgacaagaacgatgatttcggcatggtattccacggcgaggacgatacgttggtgctcgatcgcgacggcacgcagtacgacgcaccggaaaaggcccgaaacttcaaagtgcctgccggcggtgtcgaagtgtatcgcatggacaaatatgccgactacaacatgaaccacaaggcagactggctgcaggccattcgaactggcgcaacgccgtgtatggacatcgagaaaggccatcggaccgccacgatgtgcaacttgggcaacctgtcctatctattgggacgcacgctgcgatgggacgccaacaaacaagagatcgtcgacgacccctatgcgaaccgcctgctcagcaagccgcagcgccatccgtatcatctgtaggcgcgcgccgtgaagcccgggctcaacctcgaattcgcccgaaccgaacgcctcgcgccggaacaagcgatggcgcgcgcggcggacgccgggtatcgctgggtcgagccctacgtgtattccgccatcgcgttgccgatcaacagccacctgaccgtgcgcgccgagtcgccctatcaccacttcgatggagggcggaccgatcccgcggcgatcaacgccgtgcgggaaggcctcggcctgtcattctcagccatcgatgcccactgtacgctgctgttgccgcagatcggcgtgccctatctcaaatcggcgatcgatttcgcggcggaagtcgcttgccccattgtaatgtccgacgagggtccggttcccgaagaatggatgacgctcgagcgcggcttcgacctgatgcgtgtaagtcttgacgaggtcgtccggcacgcccataggcggggcgtgttatatgccatggaattgcacaatgcgctgacggcgcgccccgattacctggtcaggttgcttgatgcctacggtcccggcgacctcggcgtcaatttcgataccggcaacgcgtttcttgcgggcaacgaccctgtcggttacctccagcaagttgccggccgtgtcgtacatgtccacattaaagacatcccggaatcgcaattacacgaacgcggcaaagtcaccggcacccgcgttggcgtggcggccggccaaggcgtaatcgacctgcccgggatcgtcgaggcactccggtccgcaggtttcgacggtgtgctctcagtcgagtgcgacaccctcgcgcaagcccgatcgagcttgccctatcttgaacgcttgatcggctcccgatgagcccgtaaggccagaaaagtcgaacgacgttcaagttcttgtccccgcgctgacccgctggctggatacccggcttctccccttttaactagccagcccgtggtaaaagtcgtcatggtctacacgcagtcattggctcacgacttcctgggctcgcgggcgccgcggcttctaaaagtcagaagggaaaaggttagtggtgagtcgcagggcgcaagcagccaagacgcaccaagactatcgcgagaaccgcccccaccaggtcggagaccagatcaagcgccgtgttgacgtatccgcccacgccggtctcgggtaccagcacggtcgcaatgaactcgatgatctcgttgagcgcgcctacgcccagccccgccatgaccaccacgatcgagagcgcggtccagccccgcagatccgcgcggagcagcggccgcagtaagtgatacatcaccagggtggccacgccaaacccgatgatgtggacgaactggtcgtagcgaaaaatgggaaccgtgtccgacagaggcaccagcattacgccgtaaagcaccccgtctccaatcggaatccccccgccgcacaggtgcagaatcgcccatgccacgaggccccagataatgggcaaagggtatcgcacgcgatcgttggtcagcgcgatcaccacgaggaaaaacactatcaccgccacgtacagcagaaactcgtagttccggcgatatccaaaatacacgctgaaaggcaccagcaccgaaaacagcaccgacagcggcgccacgtgtccgcgctccagcttaagcatgagttcctaccctcctttgccgaatgccgagcatcttgccacacccctccccgcccatcaagccggccactcgcgcccaacggaggcagattccgcacagaaatgttcagccggtgacgggcggcatcctacgacaaagccaaacccggaaacacgccccaacttctggtgcgggcctctcgcctgcacgtctccggtgacaatatccttgccctcatccgccgccacccccgctacaacataaaatagagcactttttgttccgctaaggtaaaatgggtgtagggcattgcgtgtcctccgttcggtctttggttgtttccaaacgctttgtaccgaacagaccgcgcaatgtccttttccattagccgagggaaaggccgtcccggagaacccgcggggaaataggggagaataggggacagcggacctggtgaaaaagtcatcttgcaccataaaatctacgtggcttccaccaaaatctggcaaaaaactgggactgactcgatttcggctgtttgaaatcgtgtctgtccctgcttttcgcggcccttcaatagagttgcctggctttttcaccaactccacagccacctattctcttgacttttctccccccaagggtgctggaaagttgtgacgcgcccacgcccgcgtgatgcccaacaacacatcgggagtaggcccgtcccacccctgcaacaccccctgccaccgcccactcgcatcccgccacaacgccacatccacacgcgccggcagttcaatctccatacgccccgccttgaaacgcttcagcccgcccgccgccatcgccgcaacctgtcccgtcctgtccagccgcaccgccgccacacccaccgcatcaaacttcacctcatgcccattcaggctcaccgttgcccggatcggatcccccatcacatcatccttgcctgacgccagaatcagcgtaccgtccagcagccggcaccggccgctcggctccggcatcaccgattgcgtaaatcccgccacacccctccgcgtacccagcgtctgcgcttccacccccgacgccctcaggtgcgcaataatatcccgcgcgcaatcggccgcactcccgttgatcatcgccgtcggcagggccgcagacccatcaaactcctcgccctcaaaatcgcgcgtccattccccgacccggtacaaccgcgtcggacctcccgccgccttcctgaaaaactccgccacagccggccgttcccactgcgggtggtacaacaccgccgctttgtaacgctgcggcccatatcgcacgctgccatcgcgggcgatcgtcaacgccccgctcgatatctcgctgctcggaatcaaatcggcgtagtagccttccgcccacatcgcatccgtgacctcgagcccaacgtccgcaaaccctgaccccgtccagttcaacgccgacggatgaccaaagatcaccgcaaccgggcaatccaccggcgccgtcgaaatcaggttcagcaggcgcacccggcaatccgctcgaagcaaatcgccccccagcagcgacgtcgcacggtccaccgcatcgttcggatacagcggatgaaaattcatccggcccccgcccagcgcgtggcgccaaagatcttcttcataagccttgatgtccccgtcgtaatacatgttgtaccagagaggcgaccgccactttttcgacagcgccgtccgcgcgcaaaacggcgtcgactcgtcggtctgcgccaaatcccgccgcaccccccaccagtccaacccgttcttgaacgcctcctccggcgtcggaaacggaaaccacgtcgggtgtgtcccgctcatcacctgcggaccaaacacctccttgatgcccgcataaaaagaattctcgacctccgcgttccgctcacggttcatctccatgtagtgattgatcgcccccgcacgctcacccacccgcccgcgctcccccacaaccatcagcaacacgtcccgcgccaggtcacgccccggccgccgccgcttgtacgccctcgccatccaatccgaataccacacgtcatccgcccgcggcttgaaccgacccggaaaaccccactcatccttacacgcccccgccaaccccacgtccctgtactgttcgagaatcccccgctcaaacccgatcaagtgcggcgcatatacgtccggtgtaaacaacgtaaatgccgccagcacaaacaccgtccgaccctcatcccccggaccgcacgggatcgcaaccgccacgccgtctttgtccgcctgctccacacgacaccggcccgtgatgtcctccaccgagtccggctcaatccccgccggccccgccacacccgaatagacccgcagcacccgcccaccaatcgagtcataaccccgcgcccggtgcgtgtaatgatcgcccaggttcaaaggttccacccccaccgtcacttcgcccaaccccaacatctccacctcacgcacccgcacaatctcctgcatctcccccggatacttgtccataaacgcctgccgagccagacgcacatccagatccatcaccatcgacatccccttctcccgcgcgtacgccgccgcagctttaatctgatcgtgtaccgcagggtccgtcacttccaccggataacggatgctcgtcgtcaacagatcaaaatccgtgtgcgacgcgtgcacgtccaagaaacgcttgtaaccctccggcccaaactcctcctccgaccagaaccagcaaccgatccccggccacgacgcctgcaccgcgttctcctcctgacccgccaacgccacacgcagcgaaccatccaaaaccgccactccgcgcgcctctgaaaccagctcactgaaaaacaagaccgccgcgatcattgtttcccctccatgccacgaagtgtgcaaaatcaccatggcccgctgcaactcgccccactgaattccgcagcgtccaccatctccactctgtccattccaccccccaaaaaaaacttgccacaacatcttgacgtgagggggccgaccgtgtacaatatctagtgtaacctcggggggacccgagaaacttaaaataaggaggagaaacgcaatgccagtaaagaagaaagcagcgcccaagaagaaagcagcgcccaagaaaaaagcagcgcccaagaagaaagccgccgcgaagaaaaaggttgtgaagaaggcggcgaaaaagcgctaagtagtattgcgcgagttttagcagggccggtgttgtttaccggcaagattgcgccggacgcgaagcagtttccgcgtccggtgctctttttctccccgcgatgaggccgaggaaggcgacgaggaacgggtcgatctcgaaccggtaccggttggtttcagcgagttcgacgatgatgctgaggccggtgacgtagatgacggtgaaggccatgaacagcagtgcggcccgctgggcggccgtgtggcggcgcgaccacaccccaagccacgcgccgtacgccatcagcagcggcatgccgatcagcagcgtgaggtaggggacgtgacgggacgctccgagttgggggatcagtcggcttacggggatgttgatcttgagagtgaggacgtcgtaggcgcgcaccagccattgaagccgcggcacggtgagcggcatcggcgagaaatacgtgagcccggcccacgcggtggtgcacaaaaacaatttcggccgcacccggatcacgtagagggcgtcctcgaggtagatgtcggacacggcgatctgggagaggtggttgtagttgacctcgccggtggatttggtggtctggcgcagcaccgggatgttttcgtaaccggcgatattgcgtatctccggggggtaatactcgattgcgtagaaccgctcgaccagcgacaccttcgagatcttcccttcatttgccaggcgcacgcgttcttcccacggcaggttgccgaccgttttgatccacgggcttttcccgagaaacgaaaacaccgaaaacttgtcgaaaagcacgtaattcttcgcgtaaaacgaaaacagaatcaccccgggtatcagcgccatccacaaaacctgcctgcggtttcctcgcatcacggcggcgactgcgcacgccatcaacacgtaatacgccaagtggtacatcgaccggattccgcacagcagaaacaggctgatgaaaaacccccagccgtacaccgcgcgccgagtccgcacgtagatctcgagtaacagcgcggcgatcacgagaagcgtcgcgcattggagcgtatagatcaggacgtgctcgaacacaaggaacgtcgggcttagcacaaacagcgtcgacgtcaggagcgcgacgcttttccggaccccgagccgcgtctgcaacagcgtcacgaggaggtacagggccagcccgttgatcagaaagagggcgtgaaacaccggcgccgcgtggcccgggaaaagttttaggatcacgccaagcgcgaggttgtacagcggcggctggacgtggaggtaaaatacgctctcgatcaggcgcgtccgcagcagcaccgggtcggcgtagtgggcgaacatccccagaggcgccatgtcgaaccgcagcccaagcgaattcaccagggcgtgaaacacaatgaacagccccgcctggaaacccaacagccacttccagcgagccgcgtcaataaatcggagcaaccgccgcatgaagagcaaggtatccgatttcgggccacgacgcaaaccggatgagaccatcgggccgttggctgcgaggtaggcggaactggttcgagttgaggcgcatgcgcatgttgttagaatctttgttcacgacatctgcgcacggcgcgtagatattgagtcaaggtcgcgaacaaagattctgaatgcgacttcttagtcgccttagtcgtcggagccggagagttctggttgttcttcttcgggatcgaccgcgatggcgttgcggtcggtggtcaggaaggtgagcacgccgaatgtgaggcaggataccgctacgccgaacacggatgcgtccacctgttccatgaagcggtaggcgccgtcgccgaggggggcgatatcgagccggtttttgagtatggcgaagcccttatagatcatggtcagggcgcttgcggtaagcatcgtgatgaatatgttgcgcgtgagcgcgggcgaccttttctttgagaggacgccaacgcacacgggcaggatgatcgcgggcgcccagaggtggtacgtgaacaggagaagtccgatgatgtcggaccacagcaccgccaccagtatggcggcgccgccgagcagcgcggagcagatgcgcgcgagccggagcatccgaccgtcgttgcggtctttccagccaagctggtgttcgaagaggtctttgatgaagatcgccgtggacgagttgagcgcggagtcggccgatgacatgacggccatcatgagcgcgccgatgacgaggccgccgatgacgggattgttcattttgcggatgaccatggggagcgcctgctggggggcgatgtcgggaaagtggatccgcgcgtagagggctatgaagaacagtacgacgggaaacgtgagcgccaggaagatcccgacgccggcaatgccgatccgcgtttcgcggatatcttttccaacgcagtatcgggtggcgtagccgggggcgaacgtttcgccgaggaagaaagcgaggaaggtggtgaccagaaaaatccagcctttcccgccttcgatctggaagaacgtgtgagggatggccgaggtggcctctttccatgaggagatgatgtcgggtatgcaggccgccagcgtgacgaggaagccgaaaataaggataacgaactggtagacgtccgtgtggatgacggccaggagcccgcccgcggtgctataggtgaccacgactgccccgccaatgatgatggcgagggcgagcaccaggggcgagttggtaaactcggggaggatagccgtcagcacacttccgaacgcggccatctgtgcggcgacgataaaaacggagaacagaagcgacagaatcagcacgagaaaacgcggaccttcgccaaaccgatgaccaaaatagcccgcgaccgtgtaaagttccgcgtcgcggaatttcggcgcgaccaccaggcccgagaacaggaagtggaggtaccagccggtggacacgacaagcatcagcacgccccactcgtaggttcgcccgatggcgccgatgctcgaaccgccgccgataacagtcgcccccatcgtgcaaaacaggaaaaaccagccgatgttgcgcccggccacgaggaaatcgtcggtgtcgcggatcttcctggctttaagcacgcctttgaagaagatgaagatcatgtaggcaatgatgatgccccaggtgatcaggccccccgccatgacgcctaggcctcccgggtcgagatgcgccagcgcccgaaaagatcggccagccgccgttgagggtcgtagacggcgatttgggcgggtgcggcccgcaacgcatccagttcgatgcccgcgaggtgccaggaggtgtcgcggccccagtatgcgtcgatccaccgggcaatcgtgtcaaacccgtaccagtacgactcgtaccgggaccacgtgcgaatgtggcccgtttcgattgtacgttccacttcgtcgttgacgcgggtgagcaggaacccgtcgcagactttttggccgttgcggtcgaacacgtcgacgaggatggatttgctggagtcccacgcccgcttgtaccggcgcgggacgagcgtgaacccgttgttgcgggcgtatgtctggggggcgagccagcgcggctgcccggagacgttcatggtggactcgtagttgccgagcgcgtgcgactggacggcttctttgcggtaggcgctgatgacggcgataccggaggcggtttcggcggcgcgccgcagcgatttgaacagttgctgcgcaccttcgggcccctgcatgacgccgatgctgttgcatacggtgacgagcacgggcagaggttccgggtccagcggttcgaggtcgaacgcggaaccctggcgaagccacaatcgctggcccagcagcgttccgaggccggcttcccccagtttcccggcggcaaggttgatcagttcggaggaaagatcgatcccgccgatcaactcgatcccgccgccggtttcaccggccaggacggggtcgtagtccaggtcgcggcgtgaggcgcgggcgcgggcgagattctcggcgtcggcagcgggcaactgatcgccgcgcgtggttttaaggccgtaacgcaggtgcaaccggcccgaaccgcagccaacatcgatcacgtgcagcggctttccggatcgttctgccagaaaagccaggacgcggtcaaggaattcttcttcaaatgcttcgtaagccacgacgtcgggatggccgtgaacgatattgcgctcgtacgcggcggcacattggtcccacacgccgcggtcgcggtcgcacgcctgcgtgagcccggtgtcgttcgtcatgggcttctcctcacgcgggtttggcggaggctaccccgtccaacatcgtggccgcgccgaaagcggcttcggataggggggatatgtggtcccgaatctcgtccagcgggggtagtatctctttggcgacgtattttgaatccatcaggcgcagcagcgcggaatagttgacgcggaaggcgatgcgctcgccgacttggagtttatcgacgttttcaccgaggttgaccacggagatatcgctgctggcgccggcaattttgtaccgggtatcgagaggcgtaatgccgttgatgtcggtgtcgagatggccgatgctgaccagtgcccggtacccgcgctggccgggcgaggtgtcggggcatgcttcggtttcgaacggcgtcatggtggtggtttcaccgagtggcgccaagccctttttcttgacttcagcgatttcggcctcgagccgcatcacgtcgtttcgcagttccgggagcgtgccgccgttgatcaggtcggtgccaaggaaggccgcctcgccgatgcgcgagtggtttacggcggatggcatctggccctccagcaaaaggggcagggtcgcggtgactcccgcggagataatgggcagcggctggcggaacttcaactcgagcagttcgcggtacagcacgagctgcatcagatggtcgacggtgggaacggtccccgccaggcacccgaggttgccgccgattccggcaacttcgatgttgggcagttcgaagactttcttgtagaagttgacgagactgccaggcaggatgccctcgcgcaggtcgccgagttcgatcatgatgatgatgcggtggatcttgtcgagccgtgccgcgtgatcgttgatggcgcggatcacctcgatttcactgttgaggctgatgtcggacagggcggccacttcgcccgccctggacaagtcgggtattcggagataccatttttcggcgcccggcatgcaccggctgacttgattcaggttcgagaggcgcgagtcgcccacgctggtgacgccgagcgcgtggagggcgcgcagcgtatcggcatggccgcacagcaccttggtaaccagcgtccacgaactgccgttggcgcggatccacctgtcgatcactttcaaattatagtggagcgcttcgatgttgatgacgagccggttcatggcgaatacctcatctccgcgtatttgctcgtgaatccgacacgctcgtacaggcgccgggccggattgtcgtattcgacgtgtagcttcacactcccttccgccagacacagcccgcgctccacaagctgccggcccaggcctttcccccgcaacggcgggtcgaccgccacaaacagcagcagattctcgggcacgtacccgcccatccccgtgcggagcatcaccagcgcccccgccgtcttcccgtcatgttccgccaccaggataaacccgccgccgttgagcgcgtcgcgcaggccccgagcaatgtcttcgaacgtgtcgctgtacggtttgagcgcctcctgcagaaatgccgccaggtcgtgcaatccgccccgcgcggcaaaatcggccggctgccgaagttcccgaagccggaactcggccgcatcgaccgatcgcggcggcgcgtcgccatccgcgggtgcggcggcatcggcatgtttcgcgccgtggccgtctgccgaccgcaacgtgtcctccgtcgcatcgagcggatagatcgccagcatgggcgccgcgtccagatgttcggcgttcatcatacaggctacgcgttccagcgacgacaggatctgcgcctgttcccactcgtgcagtttctccaactcccgcacaaaccgctcctggagcaacggcggtgcgccgcttaggacctgcctcgcgccgtccgtgcacgtcaccagcacgttgcgccggtcacgcccgttgcggccccgccgaaccagatcccgctgctcgagccggtcgactatgcccgtcgccgtggcgttgccgatgctgatgcggcgcgcaagctcgcctatcgcgatttcaccgttccgttcaatctcgcgcaacaatatgagctgcggactcgtaagactgtgagtctgcacaagacgacgggagtgaaggtctaccgcgcgcataactctgcgtaacgccaccagaatccgctcggtgagccctaacgcattgggattaaccatgaagagtcctttgcgtaaagatattttgtgtgcgaaacattgtagcggacacacactcccacgtcaactaaacaacaggatttctaaccacctcgatagatggatatcttgtaaccccaggtgtatcaataggttggctctcggccaactcccccattcaggcgtgcggatggctgtcccggtagacctgtttcagccggtcgatgctgacgtgggtgtagatctgggtgctcgagaggctttcgtgcccgaggagttcctggacgacccggaggtcggcgcccgcgttgagcatgtgcgtggcgaacgtgtggcggagcgtgtgcggcgagatttcccgccgcccaggcaggatttggcggacatatttctcgacgatccgctggacgctccgcgtcgtgagcggcccgccgcggtggttgacgaacagccggtcgtgctgcggctcacccaactgtggccgcacccggaggtagtcgcgcaacgccaggacggcgtattggccgagttggccgagccgctctttgcggcgtttgccgagcacgcgcatcaggcccgtgtcgaggtcgagactctcgatgttaagcgcggccagttccgcggcacggatgccgctgctgtacaggacctccagcaacgccctatcccggacgccgagcggctgggacgtgtccggcgcctcgacaagcgccgtgacttcggggattgtgagcgcctcgggcaggttgcggcccagtttgggcgaccggaccgtctgcgccgggttgtcctcgagcaagcccgaccggacgcagaacttgtacacggcccggatcgacgccagcttccgcgcggacgtacgcgcgctgccgccgcgcgtctggacatgcgccaggtacccccgcacgtcattccgaaccgcacggccaagcacgtcgagcgacgccggcgggtgcggctccccttcatcccgctcgaacgccgcgggcccgtgtgcgacgtagtcgcagaactggtccaggtcggaaaggtacgcacgcaacgtgtgcggcgaataacctttctcggcctcgaggtagtctacaaaaggctccaatcccgggcgcatgatcgagattatagcagcctcgaacgaagtccgaaattgtcagtcaaaaagtccgccgttatagctgctaacttaaccgtaggccagagtcctataagaggtttccggttttctggcaggggtggtgtcagaaaaactttttatctcgcgctcgttcaaccacttacgtttctcgaaccatgccaaaatggcaaaaagagagcaccaaatgcacatatgaaatagagggagttgatcaaggatcaattaagaattaagaattaagaatggtgcgaggatgacggacaaagggtaggggacgaaggatgaatggattgcggattgcagattgcggattggggattgcagattttttgaagcagaaggggcagaagagcaggctggaggaaaggatgaaggatagaaggacagcggggaaagggaaaaggcgatggaaaaggggagtgtaaagaagactcggaaacccagttacaagccgaaagctgggatgatgaatataccggtagggtggatgtttgagaaggctacgcgccgtcttgttgaaaacccggtggaacagggggcgatcgtgctggcgaaggaactggaggaagccgggctgagccagtcggcgatcatgcggaagttgaaggaggatggagtgccgaaccggggggaagggctttggacttcggcgatggtgcgaaagcttctggattacgatgggttgaaaggtcgttgggcggagcggaaggcgaaactggatgaggagtacgggacgcgtgtggccgccgccgaagccgacgcccgcgagatcgccgagggccggacgcccgcctcaccgctcgacaagtgcgaccccgtcgcctggggccagaaatggctggcgaaccgcgacgggtcggcccgcgcttattggcggcaccaaatcgaggatctccgcgcagccgacgacaacatcgtccatctcgacggccgcgacgtcggcaagacggccaacctgaccacgctggcgctccattatgcgatgaccacccggaaaggatcggggctggtagcggcggcgctcgcgggccagttgctcgccatttgggaggaaatcgagttccagctcgaaaacaacccgcggctcgaagcctgcatcgcccgcggccgcaacggccaccgcaagatgcagcggtttccctacccgcgcctcgagttcaccaacggcagcgtcctctacttccggcccgcgggcacgtacggcgaagcgttccgctccctccacgtcgaccgcgtctgggtcgacgaaggcgcgtggctcagcgaagacgcatggcgcgcgctgcgccaatgcctaaaagccggcggcaaactccgcgtatactcgacccccaacggcatgcgcaacgccacatactaccgcctcacaaactcgccccgctggcgcgtgttccgatggccgtcctggctcaaccccaactggacacccaaccacgaagccgacctgctcgaattctacggcggccgcgcaaccgccggctggcagcacgaagtcgccggcgaacacggcgcgccaagctacggcgcgttccaccccgaacacctcgcactcgcgctccaagacgtgcccgagtaccgcaaaatcgtcatcaccaacgccgaactcgaagactgccaatccgaactcgaaaccgaacaacggttcgagacgctactcaacatctggcccgactccgcccaatactacctcggcgcagacctcggatacacaaacgacccaaccgaaatcctagtcttccgccaagacacccccaaaaaatctcctgattgttctcctccagactccagactccagactccagactgcagtttaaggcttgttttgcgcgtccacatggagaaagtcgcttacccccacatcgcccaatgtctcgccgtcatcgactccctactcgcgcccgcagcaatcggcatcgacaacggcggcaacggactcgccgtcatccaggaactcatgtcgctcgacaaatacaagccacgcgcgttcgacggacgcctcttcggcttcgatttcggcggagtcacaccattcgaactccccaacggcgcccaaacgaaaaaacgaacaaaagaactcatgacctcgctcatcaacaaggcgctacaacggcgcgagatcgtcttccccgccaccgaccccgaaatacccgaccagttcctcacacaaacctactcactcaacaacggcgccgtcacctactcaaaaggaaacgaccacatcatcgacgcaacccgatgcatggtcctcgcccaagaaaaaaccgcacccaacgcaccatacaacgaccccgactacaccatccgccccccgctacccctgatggtcgaaatcttcaccctccccagcatgaaaaacttcccctggtaagcgcgaagttcaaagttctgagtgcgaagttgaccgggcgaagtgcgaacttgaccgtgcggcagcatatgacaactgatgaatgatgaatacgctgaaagcgcaagttacgccggaggcgtaagttacgctgaaggcgtaacacatattagcctggggcaacgccccaggaaatgaatacacaaccaaaaagcaccctgaaggggtgcaacaactccccccgcccctacagggccaagtgcgaacttgaccgtgcggcagcatatgacaactgatgaatgatgaatacgctgaaagcgcaagttacgccggaggcgtaacacatattagcctggggcaacgccccaggaaatgaatgcacaaccaaaaagcaccctgaagcggtgcaacaactccccccgcccctacagggccaagtgcgaagttcaccgtgcggcagcatatgacaactgatgaatgatgaatacgctgaaagcgcaagttacgccggagccgtaacacataatagcctgaggcaacgccccaggaaaggaatgcgtaaagatagtgcaccctgaaggggtgcaacaactcctgccgcttcactcttccaccccggaggggtgggtcaattgtcagcccagggttgcgaccggcccgtaccaatggccctgtacccgtcacctaccacgagcatccaacgaagaccccggcgaccactccacaccggtccagggccgggcgctaccctgggcacaagtcgcgccaacgaagtaccccggcaggggttcgacagcttgtccctccccacccgtatcatgcgttgttgcctttttctccaccgggtactaaactagcttcctcaagccactatgctaaacggggatgtttaggggccggcggccgatacccggcgccggaaaacggaacggagcggatttctgtggctacatattcaaccgccctaatcgtgaagcgggtcgccaaagccagaagaagcggctgggtaactctgagccttatggactgcggcgtgaaggacagcgacctccgcacgcttctcgacgcgccgggtgtcgaacagcttcaggggctgaacctcagcggaaatcagctttccacgcttcccccggagatcggccgcctcaccgcactcgataggctgtacctcgtcaacaatcagctttccgcgcagccgacttcgtcggccgccctgccagacagtcaacaatatcagcacataacgattctatacagcacgaccgaattttcccaccttcctgtaggtccggaataattccgggccctcgagtttctacattatcacgcggcagcggcggcagccagacccctttctgagcaacgtatgcctaagcgtaggtccggaataattccgggccctcgagtttctacattatcacgcggcagcggcggcagccagagccctttctgagcaatgtatgcctaagcgtaggtccggaataattccggacccacattcagcaaaaattatgtcgtcatatataaaggcagcgcggcccagctgtggtttgaggagaatctccgctcacgtatactcaccctggcccattcagcccttccggcttggcgagacaattcatcgagcctcccaataccgccgctgaccccaacttccacatcaaaatcgctcacttagataacccctcaatctacttgatttaaacagaacccccgcgtagactcactgcagggcgcgcaaaaaggggctgtctatgaactcgtacaacttgctttcccaaaactggattcccgttctctatcacaatggcgatttcaaacgcgtcggtatcctcaaagcattccaagacgcacacagaatccgccaagtcgccgcatccaatcccatggaccgcctcgccatactccgctttctcctcgccctgctctactggtgcaagggaaacccggcgaacggcccacaggccgcgccttacgaaccattccctccggattggttcttgaaactcgaacagaataaagaatgctttgacttgtttggagagacccggcgattttatcagtacaagaaacctgtgggcgaagataaacggctgaccgccaactaccttgtccatgaggtgccgaccggtacgaatgcgtggcattttaggcattcaacggacgaagtaaacggtttgtgtcgcgcatgttgtgcaatgggcttgctaaggcttccagcatttgcgacttccggtgggcgtggtaaaccgcctggaatcaactcaaagcctcccctttacgtcataccgctgcgcggttcacttgcggccactgtacggctttcctggcggccggtcggcccgttaggaacgcccgcatgggaaaaaccggacgtccaactgcctggcataggcgaggtgccactgctcacaggtttgacctggctgccgcggcgagtgtggttagactctcctgcggaacgggcagaaacctgcatctcatgcgggcgcagcgagaggctaatcctgcgtactgtatttgccccaattggcagcaccaagacggaagaaggagaaccggtcagggcgtggtgcgacccgcatgtcatctacgggatgtccgccaagggcgaaatcagcagcctgcatgcgcgggacgctcttggcgcaccagacgccgcggcggggcagtgggccaatatccttgccggcctgcttcgaaaggggcaaacaggaaacgcatctccttgctggatagtgggcttttctaccgtccagaacgacaagtatcttgaggctgtcgaatgccagatcccttgcgatatcgaccaggcgccacaagaacagcgggacgaatgcctcaacaacttggaacaatggcgcaagggaaaatggggtttcgccaaaaacctgggatcggacaacgaaaagggcgagcggcgtgagcatcgagagattacctctatgcttgcgtccattggaccgcacgttgaaaagcaggtgtcggagaaaagtggatcgttgatagcgggcggcgaaaccgcatggcaggaagcggccaaggcgttccgcccgatgatgcgcttagccgcacaatcgctgtccccagggtttacgatccaagcagccagaatacgcaagcgcattgccaatgccatgccaaacatgacacccaaggccgcgaagaaggggcggggaaaaggacgggataaatgaccgcgacggaagaattcattcgcgtattgagtggcctcaagtcaggggatcttggtctgctgcggacttattcccaacacggcttggatgaatccgtggatgggtttgacctcttttcggggctttggtggccgttacgggcgaagaaccagcgggcgccgcgccgggaagtggcgtggcttatagctaaactctacgctgcccacccaattccccaggcccgcgaggccacgcttgcgcgtcaactccgccggtgcctcccgaccgatgagaacggtagaaatcggtttgggcggaagctcgacaacatattgatgctgccgctcgacaagatcgaggcggaacttcgttgggcgatcgggcaggttgcctcgagaggactttcactcgattgggtaagactcacggatgaactctccgtgtgggaatacgaatccgtccacctgcgatgggcggaacaattccttcaaaccgaagattaaggatgaaaggggtccatcatgctgatcgagattcacgcaatacaaaaccatagtccgtcaaacctaaatcgggacgacctgggtgcgccgaagacgtgctattttggcggtgctctgcgctcgcgcatctcaagtcaatgcatcaaacgaagcatccggatgagcagggagttccaagcgctttgcgggggaattcgcacgcgccagttggccagactgatcgccgagaaggttcaagggaagccagacgtccagaagcgcgccgagaagatactcgaactatgcggtttcaagcccaagaaggcgaagaaggaagaaacggacgacgcagcagatagcgaaaaaagcaagatgctcgtttatacgagccgccaagccatcgaggaaatggccgcactactccaaaacggggacggaaggactgagaaacaactggccgcggacttctgcgcgttgatcagtaagcatgtggcagtccccgatatggcactatccggacggatgctggagccggacaaatcttcaaacgacctttggaaggagcttgacaagaccgtcgaggccgcccttcaggttgctcacgcgatttcaacgcacgaggcgctgcccgaggtggactattatgtggccgccgatgacattccaggcgaagatgcaggggcgggctacgtggatgaatccatgtttgcctcggcatgtttctacaagtacttctcgatcaattgggacaagcttgtggaaaacctcaatggccagaaagaacttgccgcacatacggtaggggcttttatccgtggagcagcgctggcaaatccttcgggcaaacagaatagttttgcggcgcacaatccgcccgatggcctgctgatccaattcgccgacaccccgacgagctatgcgaatgccttcgccgctcccgtgtcgggcaagggcaatcctgacgtcatttcacaaagtgtggcgcagttggcgcattatgttcgcgacttggacacggggtacggcaagccccagaagcgtttctggttctcgccgaatctgcgttatccgctttgcgtcatcgaagccaagaaaacgattccggtggccgaggtaaacctcaaatcgctcgatcaactgattccggccgtcatcggcggcttgggctttgattggaattcggttcagaagaaagtgacaagccaacaggtggcgccatgacggccaacacgctgtttcttcggtttgaaggaccgctgcaggcgtggggtaatcaggagtcgaagttcgttgtacggcgcacggctgaagggcccactaaatcgggcgtgatcggactgttgtgtgcggctttgggcgtgacgcgggcggaagcgcaggaatgccggttgcctcaactggccgaactgcgtatgggcgtccgggtggatgcgcccggataccggtggtgggactatcacacggtaggcgcggggatggacatgcgcatcgccgaagccgaggggaagacaaaacccggcgcaatgctcacgcggcgggagtatctttgcgacgccactttcctggtggtgcttcaggggaatccggccctgatcaaagaactccggcaggtgatcgaaaagccgcgctggacgctctatttgggcaggaaatgctgtccgccgtcgcggcgggtgctcgaggaggcgccggcggcgcatccggacctgatttcggcgcttgtgtcggttccgtggcagcggcgctttgaaagggataatcccccggaaacactcgagtatctgctggattggtttccgtcgcccgaccagccggaggcgccggatgacgccgaggtgtggtacgacgtgccgttgacgttcgagccgccgtcgcatggtgcgcgctttgttgtgcgcgggcagttccgcgtgggcgccggggggcaggtcccggtggcggaatcggcgttgcagcgccaggtgccctcgccacaacgcccgcgggcagattatggcaattccgagtaccggaagatgcgcgcgcagcggctcgagaaggactcgcatctttgcgtgttctgcagatcgcgtgcaacgaccgtgcagcacgtcacgtaccgccacgccggcggcgatgagcggatcggcgagctgcgttccctttgccgcttgtgccacgacgccgtcaccatgctcgagtatgggctgaacatggggctggaccgcatcgacccggaggatgctcgatggcgggagcggattatcgagaaacgcgacgagatcgtcaagttccggtcgctcgagacgcggcggcgtcggcttagccccgaggaggtcgagtgatgtatctatcgagtctgatgatcaacaccggcgacaatccggatcgggagcggccgggccggcggtggctgcgcgacatctaccacgtccaccagcggctgtcgatggcgtttccatcgaggtcgcacggaagcccgtccggttttctgttccgcatcgacaaccagatcgaggagaactcgccgcgcgcgatcgttcttgttcagtctcaattggccccggactgggatagcgcattttacaatgcgggcatgcttctggcggcgccgccggaggttcgcgaatatgccccgtctttcgcgcccggcgaccaccttcggtttcgcatcagaatgaatttaagcaagaagaccaagacggcgcgcgatggtacagatctgtgcacgccgcacgagggtgtcgacaccttcggccgccccaaatctcagtcgaaacgcgtggccgtgacctgggacggcgatcaaggcgaaaccccggaccgggcaatccgccaatggtttgccgcgaaggcccaacacgccgggtttgcactccagaacgaattcaacgtggttcacctcggctgggtggcgggacacaagccgggaacggccgagaaccggctgcggtttcgttccgcgctgctcgagggagacttgacggtggcggacgggccggctttcatgctatcggtcgagagcgggctgggctcggcgaaagggtttgggttcgggctgctgtctgtggttcgtgcaggcgggacgcccgcaccacaatcgaggcgtggcgaatgctgacgcgtgacttgcacgacctcgccaaggtgcgcgaccggctcagctacctttatgtcgagcacgcccggatcgatcaggaagacaaagccatcgccattcacgacgcccagggactcaccccggtgccgtgcgccacgctcgccctgttgatgctggggcccggcaccgccatcacacacgccgccgtcctcgccctcgccgacaacggctgcctcgtcgtgtggtgcggcgagcagggggtccggttctatgccgcggggcacggaaccacgcgaaactcccagaaccttctgctccaggcgcgcctctcgagccgccgctccacgcgcctcgccgtggttcgccgcctgtacgagatgcgctttccgggaaagctcgattcgagtctgacgctccaacagatccgcggcatggaaggcgtgcgcgtgcgcgaagcctactcgagcctgtcccgccaattcggcataccgtggacgggccgggcgtacgaccgccagaactggcgcgacgccgatcccgtcaaccgcgctctctccaccgccaattcctgcctctacggaatctgccacgccgccatagtcggcgcaggctattcgcccgcgctcgggttcatccacaccggcaaacagttgtcgtttgtctacgatatcgccgacctatacaaggccacgaccaccgcccccgccgcgttcgaaaccgccgcccgctcggcccgaaacatcgagcgagaggtccgaatcctgtgccgcgatgcttttgcggcgcagcgcctcctcgaacgcgttgtgaaggacctcgagtacgcgctggacgtgaagccggccgatgacgacgaagccgagaccgatttcgactcggatcccggcacgcccggaggcctgtgggaccctgacgccggcgaagtggccggcggcgtgtcctatgccgaacccgacgaacacacagaggatgaaccctaatggtcgtcatggtgctcgaacgcgtatcgccttcgctccgcggtgaactcactcgatggctgctcgaaccaaaatccggcgtgtttgtcggcaccgtctccgccatggtaagagaaaaactatgggaaaaggtttgccggaaaaccggcgaaggaggatctatcctcatttggaccgcaaataacgaacaggggttcaaaatcgacttctggggcgatccctcgagacacgtcctcagttgggatggacttcagctcattacaaagccaaaataaccaataaataccaagtgtaatccccacgcgcgtggggatgaaccgtcctggttgttatgcgctcgcccgcctccttcgtaatccccacgcgcgtggggatgaaccggcgatgcagatcgtgacaacgggagtacggaggtaatccccacgcgcgtggggatgaaccagtagcggcgggatgctcaagcccgaagatgtagtaatccccacgcgcgtggggatgaaccggaggatgggatggagacgatacgtttaaatgagtaatccccacgcgcgtggggatgaaccgttcacgttcgcgttcgatagccgcagcctgtggtaatccccacgcgcgtggggatgaaccgatcagtcgccagatcgatgatcgcgtcttcagtaatccccacgcgcgtggggatgaaccgcactcagcatccaacagccctgggcgcgtcttgtaatccccacgcgcgtggggatgaaccggcagaggtttagctggccgcgcctattggatcgtaatccccacgcgcgtggggatgaacccatctcggaagccacggtgacgagtgcgttttggtaatccccacgcgcgtggggatgaaccgtctacctggttgcacacggaatgaatcatgctgtaatccccacgcgcgtggggatgaaccgccagcgatgc

SEQ ID NO: 967 - DNA, 103508 bp, Artificial Sequence
  Synthetic Oligonucleotide
  misc_feature (1)..(40481): n is a, c, g, or t
nnnnnnnnnnnnnnnnnnnnnnnnnnnnnnnnnnnnnnnnnnnnnnnnnnnnnnnnnnnnnnnnnnnnnnnnnnnnnnnnnnnnnnnnnnnnnnnnnnnnnnnnnnnnnnnnnnnnnnnnnnnnnnnnnnnnnnnnnnnnnnnnnnnnnnnnnnnnnnnnnnnnnnnnnnnnnnnnnnnnnnnnnnnnnnnnnnnnnnnnnnnnnnnnnnnnnnnnnnnnnnnnnnnnnnnnnnnnnnnnnnnnnnnnnnnnnnnnnnnnnnnnnnnnnnnnnnnnnnnnnnnnnnnnnnnnnnnnnnnnnnnnnnnnnnnnnnnnnnnnnnnnnnnnnnnnnnnnnnnnnnnnnnnnnnnnnnnnnnnnnnnnnnnnnnnnnnnnnnnnnnnnnnnnnnnnnnnnnnnnnnnnnnnnnnnnnnnnnnnnnnnnnnnnnnnnnnnnnnnnnnnnnnnnnnnnnnnnnnnnnnnnnnnnnnnnnnnnnnnnnnnnnnnnnnnnnnnnnnnnnnnnnnnnnnnnnnnnnnnnnnnnnnnnnnnnnnnnnnnnnnnnnnnnnnnnnnnnnnnnnnnnnnnnnnnnnnnnnnnnnnnnnnnnnnnnnnnnnnnnnnnnnnnnnnnnnnnnnnnnnnnnnnnnnnnnnnnnnnnnnnnnnnnnnnnnnnnnnnnnnnnnnnnnnnnnnnnnnnnnnnnnnnnnnnnnnnnnnnnnnnnnnnnnnnnnnnnnnnnnnnnnnnnnnnnnnnnnnnnnnnnnnnnnnnnnnnnnnnnnnnnnnnnnnnnnnnnnnnnnnnnnnnnnnnnnnnnnnnnnnnnnnnnnnnnnnnnnnnnnnnnnnnnnnnnnnnnnnnnnnnnnnnnnnnnnnnnnnnnnnnnnnnnnnnnnnnnnnnnnnnnnnnnnnnnnnnnnnnnnnnnnnnnnnnnnnnnnnnnnnnnnnnnnnnnnnnnnnnnnnnnnnnnnnnnnnnnnnnnnnnnnnnnnnnnnnnnnnnnnnnnnnnnnnnnnnnnnnnnnnnnnnnnnnnnnnnnnnnnnnnnnnnnnnnnnnnnnnnnnnnnnnnnnnnnnnnnnnnnnnnnnnnnnnnnnnnnnnnnnnnnnnnnnnnnnnnnnnnnnnnnnnnnnnnnnnnnnnnnnnnnnnnnnnnnnnnnnnnnnnnnnnnnnnnnnnnnnnnnnnnnnnnnnnnnnnnnnnnnnnnnnnnnnnnnnnnnnnnnnnnnnnnnnnnnnnnnnnnnnnnnnnnnnnnnnnnnnnnnnnnnnnnnnnnnnnnnnnnnnnnnnnnnnnnnnnnnnnnnnnnnnnnnnnnnnnnnnnnnnnnnnnnnnnnnnnnnnnnnnnnnnnnnnnnnnnnnnnnnnnnnnnnnnnnnnnnnnnnnnnnnnnnnnnnnnnnnnnnnnnnnnnnnnnnnnnnnnnnnnnnnnnnnnnnnnnnnnnnnnnnnnnnnnnnnnnnnnnnnnnnnnnnnnnnnnnnnnnnnnnnnnnnnnnnnnnnnnnnnnnnnnnnnnnnnnnnnnnnnnnnnnnnnnnnnnnnnnnnnnnnnnnnnnnnnnnnnnnnnnnnnnnnnnnnnnnnnnnnnnnnnnnnnnnnnnnnnnnnnnnnnnnnnnnnnnnnnnnnnnnnnnnnnnnnnnnnnnnnnnnnnnnnnnnnnnnnnnnnnnnnnnnnnnnnnnnnnnnnnnnnnnnnnnnnnnnnnnnnnnnnnnnnnnnnnnnnnnnnnnnnnnnnnnnnnnnnnnnnnnnnnnnnnnnnnnnnnnnnnnnnnnnnnnnnnnnnnnnnnnnnnnnnnnnnnnnnnnnnnnnnnnnnnnnnnnnnnnnnnnnnnnnnnnnnnnnnnnnnnnnnnnnnnnnnnnnnnnnnnnnnnnnnnnnnnnnnnnnnnnnnnnnnnnnnnnnnnnnnnnnnnnnnnnnnnnnnnnnnnnnnnnnnnnnnnnnnnnnnnnnnnnnnnnnnnnnnnnnnnnnnnnnnnnnnnnnnnnnnnnnnnnnnnnnnnnnnnnnnnnnnnnnnnnnnnnnnnnnnnnnnnnnnnnnnnnnnnnnnnnnnnnnnnnnnnnnnnnnnnnnnnnnnnnnnnnnnnnnnnnnnnnnnnnnnnnnnnnnnnnnnnnnnnnnnnnnnnnnnnnnnnnnnnnnnnnnnnnnnnnnnnnnnnnnnnnnnnnnnnnnnnnnnnnnnnnnnnnnnnnnnnnnnnnnnnnnnnnnnnnnnnnnnnnnnnnnnnnnnnnnnnnnnnnnnnnnnnnnnnnnnnnnnnnnnnnnnnnnnnnnnnnnnnnnnnnnnnnnnnnnnnnnnnnnnnnnnnnnnnnnnnnnnnnnnnnnnnnnnnnnnnnnnnnnnnnnnnnnnnnnnnnnnnnnnnnnnnnnnnnnnnnnnnnnnnnnnnnnnnnnnnnnnnnnnnnnnnnnnnnnnnnnnnnnnnnnnnnnnnnnnnnnnnnnnnnnnnnnnnnnnnnnnnnnnnnnnnnnnnnnnnnnnnnnnnnnnnnnnnnnnnnnnnnnnnnnnnnnnnnnnnnnnnnnnnnnnnnnnnnnnnnnnnnnnnnnnnnnnnnnnnnnnnnnnnnnnnnnnnnnnnnnnnnnnnnnnnnnnnnnnnnnnnnnnnnnnnnnnnnnnnnnnnnnnnnnnnnnnnnnnnnnnnnnnnnnnnnnnnnnnnnnnnnnnnnnnnnnnnnnnnnnnnnnnnnnnnnnnnnnnnnnnnnnnnnnnnnnnnnnnnnnnnnnnnnnnnnnnnnnnnnnnnnnnnnnnnnnnnnnnnnnnnnnnnnnnnnnnnnnnnnnnnnnnnnnnnnnnnnnnnnnnnnnnnnnnnnnnnnnnnnnnnnnnnnnnnnnnnnnnnnnnnnnnnnnnnnnnnnnnnnnnnnnnnnnnnnnnnnnnnnnnnnnnnnnnnnnnnnnnnnnnnnnnnnnnnnnnnnnnnnnnnnnnnnnnnnnnnnnnnnnnnnnnnnnnnnnnnnnnnnnnnnnnnnnnnnnnnnnnnnnnnnnnnnnnnnnnnnnnnnnnnnnnnnnnnnnnnnnnnnnnnnnnnnnnnnnnnnnnnnnnnnnnnnnnnnnnnnnnnnnnnnnnnnnnnnnnnnnnnnnnnnnnnnnnnnnnnnnnnnnnnnnnnnnnnnnnnnnnnnnnnnnnnnnnnnnnnnnnnnnnnnnnnnnnnnnnnnnnnnnnnnnnnnnnnnnnnnnnnnnnnnnnnnnnnnnnnnnnnnnnnnnnnnnnnnnnnnnnnnnnnnnnnnnnnnnnnnnnnnnnnnnnnnnnnnnnnnnnnnnnnnnnnnnnnnnnnnnnnnnnnnnnnnnnnnnnnnnnnnnnnnnnnnnnnnnnnnnnnnnnnnnnnnnnnnnnnnnnnnnnnnnnnnnnnnnnnnnnnnnnnnnnnnnnnnnnnnnnnnnnnnnnnnnnnnnnnnnnnnnnnnnnnnnnnnnnnnnnnnnnnnnnnnnnnnnnnnnnnnnnnnnnnnnnnnnnnnnnnnnnnnnnnnnnnnnnnnnnnnnnnnnnnnnnnnnnnnnnnnnnnnnnnnnnnnnnnnnnnnnnnnnnnnnnnnnnnnnnnnnnnnnnnnnnnnnnnnnnnnnnnnnnnnnnnnnnnnnnnnnnnnnnnnnnnnnnnnnnnnnnnnnnnnnnnnnnnnnnnnnnnnnnnnnnnnnnnnnnnnnnnnnnnnnnnnnnnnnnnnnnnnnnnnnnnnnnnnnnnnnnnnnnnnnnnnnnnnnnnnnnnnnnnnnnnnnnnnnnnnnnnnnnnnnnnnnnnnnnnnnnnnnnnnnnnnnnnnnnnnnnnnnnnnnnnnnnnnnnnnnnnnnnnnnnnnnnnnnnnnnnnnnnnnnnnnnnnnnnnnnnnnnnnnnnnnnnnnnnnnnnnnnnnnnnnnnnnnnnnnnnnnnnnnnnnnnnnnnnnnnnnnnnnnnnnnnnnnnnnnnnnnnnnnnnnnnnnnnnnnnnnnnnnnnnnnnnnnnnnnnnnnnnnnnnnnnnnnnnnnnnnnnnnnnnnnnnnnnnnnnnnnnnnnnnnnnnnnnnnnnnnnnnnnnnnnnnnnnnnnnnnnnnnnnnnnnnnnnnnnnnnnnnnnnnnnnnnnnnnnnnnnnnnnnnnnnnnnnnnnnnnnnnnnnnnnnnnnnnnnnnnnnnnnnnnnnnnnnnnnnnnnnnnnnnnnnnnnnnnnnnnnnnnnnnnnnnnnnnnnnnnnnnnnnnnnnnnnnnnnnnnnnnnnnnnnnnnnnnnnnnnnnnnnnnnnnnnnnnnnnnnnnnnnnnnnnnnnnnnnnnnnnnnnnnnnnnnnnnnnnnnnnnnnnnnnnnnnnnnnnnnnnnnnnnnnnnnnnnnnnnnnnnnnnnnnnnnnnnnnnnnnnnnnnnnnnnnnnnnnnnnnnnnnnnnnnnnnnnnnnnnnnnnnnnnnnnnnnnnnnnnnnnnnnnnnnnnnnnnnnnnnnnnnnnnnnnnnnnnnnnnnnnnnnnnnnnnnnnnnnnnnnnnnnnnnnnnnnnnnnnnnnnnnnnnnnnnnnnnnnnnnnnnnnnnnnnnnnnnnnnnnnnnnnnnnnnnnnnnnnnnnnnnnnnnnnnnnnnnnnnnnnnnnnnnnnnnnnnnnnnnnnnnnnnnnnnnnnnnnnnnnnnnnnnnnnnnnnnnnnnnnnnnnnnnnnnnnnnnnnnnnnnnnnnnnnnnnnnnnnnnnnnnnnnnnnnnnnnnnnnnnnnnnnnnnnnnnnnnnnnnnnnnnnnnnnnnnnnnnnnnnnnnnnnnnnnnnnnnnnnnnnnnnnnnnnnnnnnnnnnnnnnnnnnnnnnnnnnnnnnnnnnnnnnnnnnnnnnnnnnnnnnnnnnnnnnnnnnnnnnnnnnnnnnnnnnnnnnnnnnnnnnnnnnnnnnnnnnnnnnnnnnnnnnnnnnnnnnnnnnnnnnnnnnnnnnnnnnnnnnnnnnnnnnnnnnnnnnnnnnnnnnnnnnnnnnnnnnnnnnnnnnnnnnnnnnnnnnnnnnnnnnnnnnnnnnnnnnnnnnnnnnnnnnnnnnnnnnnnnnnnnnnnnnnnnnnnnnnnnnnnnnnnnnnnnnnnnnnnnnnnnnnnnnnnnnnnnnnnnnnnnnnnnnnnnnnnnnnnnnnnnnnnnnnnnnnnnnnnnnnnnnnnnnnnnnnnnnnnnnnnnnnnnnnnnnnnnnnnnnnnnnnnnnnnnnnnnnnnnnnnnnnnnnnnnnnnnnnnnnnnnnnnnnnnnnnnnnnnnnnnnnnnnnnnnnnnnnnnnnnnnnnnnnnnnnnnnnnnnnnnnnnnnnnnnnnnnnnnnnnnnnnnnnnnnnnnnnnnnnnnnnnnnnnnnnnnnnnnnnnnnnnnnnnnnnnnnnnnnnnnnnnnnnnnnnnnnnnnnnnnnnnnnnnnnnnnnnnnnnnnnnnnnnnnnnnnnnnnnnnnnnnnnnnnnnnnnnnnnnnnnnnnnnnnnnnnnnnnnnnnnnnnnnnnnnnnnnnnnnnnnnnnnnnnnnnnnnnnnnnnnnnnnnnnnnnnnnnnnnnnnnnnnnnnnnnnnnnnnnnnnnnnnnnnnnnnnnnnnnnnnnnnnnnnnnnnnnnnnnnnnnnnnnnnnnnnnnnnnnnnnnnnnnnnnnnnnnnnnnnnnnnnnnnnnnnnnnnnnnnnnnnnnnnnnnnnnnnnnnnnnnnnnnnnnnnnnnnnnnnnnnnnnnnnnnnnnnnnnnnnnnnnnnnnnnnnnnnnnnnnnnnnnnnnnnnnnnnnnnnnnnnnnnnnnnnnnnnnnnnnnnnnnnnnnnnnnnnnnnnnnnnnnnnnnnnnnnnnnnnnnnnnnnnnnnnnnnnnnnnnnnnnnnnnnnnnnnnnnnnnnnnnnnnnnnnnnnnnnnnnnnnnnnnnnnnnnnnnnnnnnnnnnnnnnnnnnnnnnnnnnnnnnnnnnnnnnnnnnnnnnnnnnnnnnnnnnnnnnnnnnnnnnnnnnnnnnnnnnnnnnnnnnnnnnnnnnnnnnnnnnnnnnnnnnnnnnnnnnnnnnnnnnnnnnnnnnnnnnnnnnnnnnnnnnnnnnnnnnnnnnnnnnnnnnnnnnnnnnnnnnnnnnnnnnnnnnnnnnnnnnnnnnnnnnnnnnnnnnnnnnnnnnnnnnnnnnnnnnnnnnnnnnnnnnnnnnnnnnnnnnnnnnnnnnnnnnnnnnnnnnnnnnnnnnnnnnnnnnnnnnnnnnnnnnnnnnnnnnnnnnnnnnnnnnnnnnnnnnnnnnnnnnnnnnnnnnnnnnnnnnnnnnnnnnnnnnnnnnnnnnnnnnnnnnnnnnnnnnnnnnnnnnnnnnnnnnnnnnnnnnnnnnnnnnnnnnnnnnnnnnnnnnnnnnnnnnnnnnnnnnnnnnnnnnnnnnnnnnnnnnnnnnnnnnnnnnnnnnnnnnnnnnnnnnnnnnnnnnnnnnnnnnnnnnnnnnnnnnnnnnnnnnnnnnnnnnnnnnnnnnnnnnnnnnnnnnnnnnnnnnnnnnnnnnnnnnnnnnnnnnnnnnnnnnnnnnnnnnnnnnnnnnnnnnnnnnnnnnnnnnnnnnnnnnnnnnnnnnnnnnnnnnnnnnnnnnnnnnnnnnnnnnnnnnnnnnnnnnnnnnnnnnnnnnnnnnnnnnnnnnnnnnnnnnnnnnnnnnnnnnnnnnnnnnnnnnnnnnnnnnnnnnnnnnnnnnnnnnnnnnnnnnnnnnnnnnnnnnnnnnnnnnnnnnnnnnnnnnnnnnnnnnnnnnnnnnnnnnnnnnnnnnnnnnnnnnnnnnnnnnnnnnnnnnnnnnnnnnnnnnnnnnnnnnnnnnnnnnnnnnnnnnnnnnnnnnnnnnnnnnnnnnnnnnnnnnnnnnnnnnnnnnnnnnnnnnnnnnnnnnnnnnnnnnnnnnnnnnnnnnnnnnnnnnnnnnnnnnnnnnnnnnnnnnnnnnnnnnnnnnnnnnnnnnnnnnnnnnnnnnnnnnnnnnnnnnnnnnnnnnnnnnnnnnnnnnnnnnnnnnnnnnnnnnnnnnnnnnnnnnnnnnnnnnnnnnnnnnnnnnnnnnnnnnnnnnnnnnnnnnnnnnnnnnnnnnnnnnnnnnnnnnnnnnnnnnnnnnnnnnnnnnnnnnnnnnnnnnnnnnnnnnnnnnnnnnnnnnnnnnnnnnnnnnnnnnnnnnnnnnnnnnnnnnnnnnnnnnnnnnnnnnnnnnnnnnnnnnnnnnnnnnnnnnnnnnnnnnnnnnnnnnnnnnnnnnnnnnnnnnnnnnnnnnnnnnnnnnnnnnnnnnnnnnnnnnnnnnnnnnnnnnnnnnnnnnnnnnnnnnnnnnnnnnnnnnnnnnnnnnnnnnnnnnnnnnnnnnnnnnnnnnnnnnnnnnnnnnnnnnnnnnnnnnnnnnnnnnnnnnnnnnnnnnnnnnnnnnnnnnnnnnnnnnnnnnnnnnnnnnnnnnnnnnnnnnnnnnnnnnnnnnnnnnnnnnnnnnnnnnnnnnnnnnnnnnnnnnnnnnnnnnnnnnnnnnnnnnnnnnnnnnnnnnnnnnnnnnnnnnnnnnnnnnnnnnnnnnnnnnnnnnnnnnnnnnnnnnnnnnnnnnnnnnnnnnnnnnnnnnnnnnnnnnnnnnnnnnnnnnnnnnnnnnnnnnnnnnnnnnnnnnnnnnnnnnnnnnnnnnnnnnnnnnnnnnnnnnnnnnnnnnnnnnnnnnnnnnnnnnnnnnnnnnnnnnnnnnnnnnnnnnnnnnnnnnnnnnnnnnnnnnnnnnnnnnnnnnnnnnnnnnnnnnnnnnnnnnnnnnnnnnnnnnnnnnnnnnnnnnnnnnnnnnnnnnnnnnnnnnnnnnnnnnnnnnnnnnnnnnnnnnnnnnnnnnnnnnnnnnnnnnnnnnnnnnnnnnnnnnnnnnnnnnnnnnnnnnnnnnnnnnnnnnnnnnnnnnnnnnnnnnnnnnnnnnnnnnnnnnnnnnnnnnnnnnnnnnnnnnnnnnnnnnnnnnnnnnnnnnnnnnnnnnnnnnnnnnnnnnnnnnnnnnnnnnnnnnnnnnnnnnnnnnnnnnnnnnnnnnnnnnnnnnnnnnnnnnnnnnnnnnnnnnnnnnnnnnnnnnnnnnnnnnnnnnnnnnnnnnnnnnnnnnnnnnnnnnnnnnnnnnnnnnnnnnnnnnnnnnnnnnnnnnnnnnnnnnnnnnnnnnnnnnnnnnnnnnnnnnnnnnnnnnnnnnnnnnnnnnnnnnnnnnnnnnnnnnnnnnnnnnnnnnnnnnnnnnnnnnnnnnnnnnnnnnnnnnnnnnnnnnnnnnnnnnnnnnnnnnnnnnnnnnnnnnnnnnnnnnnnnnnnnnnnnnnnnnnnnnnnnnnnnnnnnnnnnnnnnnnnnnnnnnnnnnnnnnnnnnnnnnnnnnnnnnnnnnnnnnnnnnnnnnnnnnnnnnnnnnnnnnnnnnnnnnnnnnnnnnnnnnnnnnnnnnnnnnnnnnnnnnnnnnnnnnnnnnnnnnnnnnnnnnnnnnnnnnnnnnnnnnnnnnnnnnnnnnnnnnnnnnnnnnnnnnnnnnnnnnnnnnnnnnnnnnnnnnnnnnnnnnnnnnnnnnnnnnnnnnnnnnnnnnnnnnnnnnnnnnnnnnnnnnnnnnnnnnnnnnnnnnnnnnnnnnnnnnnnnnnnnnnnnnnnnnnnnnnnnnnnnnnnnnnnnnnnnnnnnnnnnnnnnnnnnnnnnnnnnnnnnnnnnnnnnnnnnnnnnnnnnnnnnnnnnnnnnnnnnnnnnnnnnnnnnnnnnnnnnnnnnnnnnnnnnnnnnnnnnnnnnnnnnnnnnnnnnnnnnnnnnnnnnnnnnnnnnnnnnnnnnnnnnnnnnnnnnnnnnnnnnnnnnnnnnnnnnnnnnnnnnnnnnnnnnnnnnnnnnnnnnnnnnnnnnnnnnnnnnnnnnnnnnnnnnnnnnnnnnnnnnnnnnnnnnnnnnnnnnnnnnnnnnnnnnnnnnnnnnnnnnnnnnnnnnnnnnnnnnnnnnnnnnnnnnnnnnnnnnnnnnnnnnnnnnnnnnnnnnnnnnnnnnnnnnnnnnnnnnnnnnnnnnnnnnnnnnnnnnnnnnnnnnnnnnnnnnnnnnnnnnnnnnnnnnnnnnnnnnnnnnnnnnnnnnnnnnnnnnnnnnnnnnnnnnnnnnnnnnnnnnnnnnnnnnnnnnnnnnnnnnnnnnnnnnnnnnnnnnnnnnnnnnnnnnnnnnnnnnnnnnnnnnnnnnnnnnnnnnnnnnnnnnnnnnnnnnnnnnnnnnnnnnnnnnnnnnnnnnnnnnnnnnnnnnnnnnnnnnnnnnnnnnnnnnnnnnnnnnnnnnnnnnnnnnnnnnnnnnnnnnnnnnnnnnnnnnnnnnnnnnnnnnnnnnnnnnnnnnnnnnnnnnnnnnnnnnnnnnnnnnnnnnnnnnnnnnnnnnnnnnnnnnnnnnnnnnnnnnnnnnnnnnnnnnnnnnnnnnnnnnnnnnnnnnnnnnnnnnnnnnnnnnnnnnnnnnnnnnnnnnnnnnnnnnnnnnnnnnnnnnnnnnnnnnnnnnnnnnnnnnnnnnnnnnnnnnnnnnnnnnnnnnnnnnnnnnnnnnnnnnnnnnnnnnnnnnnnnnnnnnnnnnnnnnnnnnnnnnnnnnnnnnnnnnnnnnnnnnnnnnnnnnnnnnnnnnnnnnnnnnnnnnnnnnnnnnnnnnnnnnnnnnnnnnnnnnnnnnnnnnnnnnnnnnnnnnnnnnnnnnnnnnnnnnnnnnnnnnnnnnnnnnnnnnnnnnnnnnnnnnnnnnnnnnnnnnnnnnnnnnnnnnnnnnnnnnnnnnnnnnnnnnnnnnnnnnnnnnnnnnnnnnnnnnnnnnnnnnnnnnnnnnnnnnnnnnnnnnnnnnnnnnnnnnnnnnnnnnnnnnnnnnnnnnnnnnnnnnnnnnnnnnnnnnnnnnnnnnnnnnnnnnnnnnnnnnnnnnnnnnnnnnnnnnnnnnnnnnnnnnnnnnnnnnnnnnnnnnnnnnnnnnnnnnnnnnnnnnnnnnnnnnnnnnnnnnnnnnnnnnnnnnnnnnnnnnnnnnnnnnnnnnnnnnnnnnnnnnnnnnnnnnnnnnnnnnnnnnnnnnnnnnnnnnnnnnnnnnnnnnnnnnnnnnnnnnnnnnnnnnnnnnnnnnnnnnnnnnnnnnnnnnnnnnnnnnnnnnnnnnnnnnnnnnnnnnnnnnnnnnnnnnnnnnnnnnnnnnnnnnnnnnnnnnnnnnnnnnnnnnnnnnnnnnnnnnnnnnnnnnnnnnnnnnnnnnnnnnnnnnnnnnnnnnnnnnnnnnnnnnnnnnnnnnnnnnnnnnnnnnnnnnnnnnnnnnnnnnnnnnnnnnnnnnnnnnnnnnnnnnnnnnnnnnnnnnnnnnnnnnnnnnnnnnnnnnnnnnnnnnnnnnnnnnnnnnnnnnnnnnnnnnnnnnnnnnnnnnnnnnnnnnnnnnnnnnnnnnnnnnnnnnnnnnnnnnnnnnnnnnnnnnnnnnnnnnnnnnnnnnnnnnnnnnnnnnnnnnnnnnnnnnnnnnnnnnnnnnnnnnnnnnnnnnnnnnnnnnnnnnnnnnnnnnnnnnnnnnnnnnnnnnnnnnnnnnnnnnnnnnnnnnnnnnnnnnnnnnnnnnnnnnnnnnnnnnnnnnnnnnnnnnnnnnnnnnnnnnnnnnnnnnnnnnnnnnnnnnnnnnnnnnnnnnnnnnnnnnnnnnnnnnnnnnnnnnnnnnnnnnnnnnnnnnnnnnnnnnnnnnnnnnnnnnnnnnnnnnnnnnnnnnnnnnnnnnnnnnnnnnnnnnnnnnnnnnnnnnnnnnnnnnnnnnnnnnnnnnnnnnnnnnnnnnnnnnnnnnnnnnnnnnnnnnnnnnnnnnnnnnnnnnnnnnnnnnnnnnnnnnnnnnnnnnnnnnnnnnnnnnnnnnnnnnnnnnnnnnnnnnnnnnnnnnnnnnnnnnnnnnnnnnnnnnnnnnnnnnnnnnnnnnnnnnnnnnnnnnnnnnnnnnnnnnnnnnnnnnnnnnnnnnnnnnnnnnnnnnnnnnnnnnnnnnnnnnnnnnnnnnnnnnnnnnnnnnnnnnnnnnnnnnnnnnnnnnnnnnnnnnnnnnnnnnnnnnnnnnnnnnnnnnnnnnnnnnnnnnnnnnnnnnnnnnnnnnnnnnnnnnnnnnnnnnnnnnnnnnnnnnnnnnnnnnnnnnnnnnnnnnnnnnnnnnnnnnnnnnnnnnnnnnnnnnnnnnnnnnnnnnnnnnnnnnnnnnnnnnnnnnnnnnnnnnnnnnnnnnnnnnnnnnnnnnnnnnnnnnnnnnnnnnnnnnnnnnnnnnnnnnnnnnnnnnnnnnnnnnnnnnnnnnnnnnnnnnnnnnnnnnnnnnnnnnnnnnnnnnnnnnnnnnnnnnnnnnnnnnnnnnnnnnnnnnnnnnnnnnnnnnnnnnnnnnnnnnnnnnnnnnnnnnnnnnnnnnnnnnnnnnnnnnnnnnnnnnnnnnnnnnnnnnnnnnnnnnnnnnnnnnnnnnnnnnnnnnnnnnnnnnnnnnnnnnnnnnnnnnnnnnnnnnnnnnnnnnnnnnnnnnnnnnnnnnnnnnnnnnnnnnnnnnnnnnnnnnnnnnnnnnnnnnnnnnnnnnnnnnnnnnnnnnnnnnnnnnnnnnnnnnnnnnnnnnnnnnnnnnnnnnnnnnnnnnnnnnnnnnnnnnnnnnnnnnnnnnnnnnnnnnnnnnnnnnnnnnnnnnnnnnnnnnnnnnnnnnnnnnnnnnnnnnnnnnnnnnnnnnnnnnnnnnnnnnnnnnnnnnnnnnnnnnnnnnnnnnnnnnnnnnnnnnnnnnnnnnnnnnnnnnnnnnnnnnnnnnnnnnnnnnnnnnnnnnnnnnnnnnnnnnnnnnnnnnnnnnnnnnnnnnnnnnnnnnnnnnnnnnnnnnnnnnnnnnnnnnnnnnnnnnnnnnnnnnnnnnnnnnnnnnnnnnnnnnnnnnnnnnnnnnnnnnnnnnnnnnnnnnnnnnnnnnnnnnnnnnnnnnnnnnnnnnnnnnnnnnnnnnnnnnnnnnnnnnnnnnnnnnnnnnnnnnnnnnnnnnnnnnnnnnnnnnnnnnnnnnnnnnnnnnnnnnnnnnnnnnnnnnnnnnnnnnnnnnnnnnnnnnnnnnnnnnnnnnnnnnnnnnnnnnnnnnnnnnnnnnnnnnnnnnnnnnnnnnnnnnnnnnnnnnnnnnnnnnnnnnnnnnnnnnnnnnnnnnnnnnnnnnnnnnnnnnnnnnnnnnnnnnnnnnnnnnnnnnnnnnnnnnnnnnnnnnnnnnnnnnnnnnnnnnnnnnnnnnnnnnnnnnnnnnnnnnnnnnnnnnnnnnnnnnnnnnnnnnnnnnnnnnnnnnnnnnnnnnnnnnnnnnnnnnnnnnnnnnnnnnnnnnnnnnnnnnnnnnnnnnnnnnnnnnnnnnnnnnnnnnnnnnnnnnnnnnnnnnnnnnnnnnnnnnnnnnnnnnnnnnnnnnnnnnnnnnnnnnnnnnnnnnnnnnnnnnnnnnnnnnnnnnnnnnnnnnnnnnnnnnnnnnnnnnnnnnnnnnnnnnnnnnnnnnnnnnnnnnnnnnnnnnnnnnnnnnnnnnnnnnnnnnnnnnnnnnnnnnnnnnnnnnnnnnnnnnnnnnnnnnnnnnnnnnnnnnnnnnnnnnnnnnnnnnnnnnnnnnnnnnnnnnnnnnnnnnnnnnnnnnnnnnnnnnnnnnnnnnnnnnnnnnnnnnnnnnnnnnnnnnnnnnnnnnnnnnnnnnnnnnnnnnnnnnnnnnnnnnnnnnnnnnnnnnnnnnnnnnnnnnnnnnnnnnnnnnnnnnnnnnnnnnnnnnnnnnnnnnnnnnnnnnnnnnnnnnnnnnnnnnnnnnnnnnnnnnnnnnnnnnnnnnnnnnnnnnnnnnnnnnnnnnnnnnnnnnnnnnnnnnnnnnnnnnnnnnnnnnnnnnnnnnnnnnnnnnnnnnnnnnnnnnnnnnnnnnnnnnnnnnnnnnnnnnnnnnnnnnnnnnnnnnnnnnnnnnnnnnnnnnnnnnnnnnnnnnnnnnnnnnnnnnnnnnnnnnnnnnnnnnnnnnnnnnnnnnnnnnnnnnnnnnnnnnnnnnnnnnnnnnnnnnnnnnnnnnnnnnnnnnnnnnnnnnnnnnnnnnnnnnnnnnnnnnnnnnnnnnnnnnnnnnnnnnnnnnnnnnnnnnnnnnnnnnnnnnnnnnnnnnnnnnnnnnnnnnnnnnnnnnnnnnnnnnnnnnnnnnnnnnnnnnnnnnnnnnnnnnnnnnnnnnnnnnnnnnnnnnnnnnnnnnnnnnnnnnnnnnnnnnnnnnnnnnnnnnnnnnnnnnnnnnnnnnnnnnnnnnnnnnnnnnnnnnnnnnnnnnnnnnnnnnnnnnnnnnnnnnnnnnnnnnnnnnnnnnnnnnnnnnnnnnnnnnnnnnnnnnnnnnnnnnnnnnnnnnnnnnnnnnnnnnnnnnnnnnnnnnnnnnnnnnnnnnnnnnnnnnnnnnnnnnnnnnnnnnnnnnnnnnnnnnnnnnnnnnnnnnnnnnnnnnnnnnnnnnnnnnnnnnnnnnnnnnnnnnnnnnnnnnnnnnnnnnnnnnnnnnnnnnnnnnnnnnnnnnnnnnnnnnnnnnnnnnnnnnnnnnnnnnnnnnnnnnnnnnnnnnnnnnnnnnnnnnnnnnnnnnnnnnnnnnnnnnnnnnnnnnnnnnnnnnnnnnnnnnnnnnnnnnnnnnnnnnnnnnnnnnnnnnnnnnnnnnnnnnnnnnnnnnnnnnnnnnnnnnnnnnnnnnnnnnnnnnnnnnnnnnnnnnnnnnnnnnnnnnnnnnnnnnnnnnnnnnnnnnnnnnnnnnnnnnnnnnnnnnnnnnnnnnnnnnnnnnnnnnnnnnnnnnnnnnnnnnnnnnnnnnnnnnnnnnnnnnnnnnnnnnnnnnnnnnnnnnnnnnnnnnnnnnnnnnnnnnnnnnnnnnnnnnnnnnnnnnnnnnnnnnnnnnnnnnnnnnnnnnnnnnnnnnnnnnnnnnnnnnnnnnnnnnnnnnnnnnnnnnnnnnnnnnnnnnnnnnnnnnnnnnnnnnnnnnnnnnnnnnnnnnnnnnnnnnnnnnnnnnnnnnnnnnnnnnnnnnnnnnnnnnnnnnnnnnnnnnnnnnnnnnnnnnnnnnnnnnnnnnnnnnnnnnnnnnnnnnnnnnnnnnnnnnnnnnnnnnnnnnnnnnnnnnnnnnnnnnnnnnnnnnnnnnnnnnnnnnnnnnnnnnnnnnnnnnnnnnnnnnnnnnnnnnnnnnnnnnnnnnnnnnnnnnnnnnnnnnnnnnnnnnnnnnnnnnnnnnnnnnnnnnnnnnnnnnnnnnnnnnnnnnnnnnnnnnnnnnnnnnnnnnnnnnnnnnnnnnnnnnnnnnnnnnnnnnnnnnnnnnnnnnnnnnnnnnnnnnnnnnnnnnnnnnnnnnnnnnnnnnnnnnnnnnnnnnnnnnnnnnnnnnnnnnnnnnnnnnnnnnnnnnnnnnnnnnnnnnnnnnnnnnnnnnnnnnnnnnnnnnnnnnnnnnnnnnnnnnnnnnnnnnnnnnnnnnnnnnnnnnnnnnnnnnnnnnnnnnnnnnnnnnnnnnnnnnnnnnnnnnnnnnnnnnnnnnnnnnnnnnnnnnnnnnnnnnnnnnnnnnnnnnnnnnnnnnnnnnnnnnnnnnnnnnnnnnnnnnnnnnnnnnnnnnnnnnnnnnnnnnnnnnnnnnnnnnnnnnnnnnnnnnnnnnnnnnnnnnnnnnnnnnnnnnnnnnnnnnnnnnnnnnnnnnnnnnnnnnnnnnnnnnnnnnnnnnnnnnnnnnnnnnnnnnnnnnnnnnnnnnnnnnnnnnnnnnnnnnnnnnnnnnnnnnnnnnnnnnnnnnnnnnnnnnnnnnnnnnnnnnnnnnnnnnnnnnnnnnnnnnnnnnnnnnnnnnnnnnnnnnnnnnnnnnnnnnnnnnnnnnnnnnnnnnnnnnnnnnnnnnnnnnnnnnnnnnnnnnnnnnnnnnnnnnnnnnnnnnnnnnnnnnnnnnnnnnnnnnnnnnnnnnnnnnnnnnnnnnnnnnnnnnnnnnnnnnnnnnnnnnnnnnnnnnnnnnnnnnnnnnnnnnnnnnnnnnnnnnnnnnnnnnnnnnnnnnnnnnnnnnnnnnnnnnnnnnnnnnnnnnnnnnnnnnnnnnnnnnnnnnnnnnnnnnnnnnnnnnnnnnnnnnnnnnnnnnnnnnnnnnnnnnnnnnnnnnnnnnnnnnnnnnnnnnnnnnnnnnnnnnnnnnnnnnnnnnnnnnnnnnnnnnnnnnnnnnnnnnnnnnnnnnnnnnnnnnnnnnnnnnnnnnnnnnnnnnnnnnnnnnnnnnnnnnnnnnnnnnnnnnnnnnnnnnnnnnnnnnnnnnnnnnnnnnnnnnnnnnnnnnnnnnnnnnnnnnnnnnnnnnnnnnnnnnnnnnnnnnnnnnnnnnnnnnnnnnnnnnnnnnnnnnnnnnnnnnnnnnnnnnnnnnnnnnnnnnnnnnnnnnnnnnnnnnnnnnnnnnnnnnnnnnnnnnnnnnnnnnnnnnnnnnnnnnnnnnnnnnnnnnnnnnnnnnnnnnnnnnnnnnnnnnnnnnnnnnnnnnnnnnnnnnnnnnnnnnnnnnnnnnnnnnnnnnnnnnnnnnnnnnnnnnnnnnnnnnnnnnnnnnnnnnnnnnnnnnnnnnnnnnnnnnnnnnnnnnnnnnnnnnnnnnnnnnnnnnnnnnnnnnnnnnnnnnnnnnnnnnnnnnnnnnnnnnnnnnnnnnnnnnnnnnnnnnnnnnnnnnnnnnnnnnnnnnnnnnnnnnnnnnnnnnnnnnnnnnnnnnnnnnnnnnnnnnnnnnnnnnnnnnnnnnnnnnnnnnnnnnnnnnnnnnnnnnnnnnnnnnnnnnnnnnnnnnnnnnnnnnnnnnnnnnnnnnnnnnnnnnnnnnnnnnnnnnnnnnnnnnnnnnnnnnnnnnnnnnnnnnnnnnnnnnnnnnnnnnnnnnnnnnnnnnnnnnnnnnnnnnnnnnnnnnnnnnnnnnnnnnnnnnnnnnnnnnnnnnnnnnnnnnnnnnnnnnnnnnnnnnnnnnnnnnnnnnnnnnnnnnnnnnnnnnnnnnnnnnnnnnnnnnnnnnnnnnnnnnnnnnnnnnnnnnnnnnnnnnnnnnnnnnnnnnnnnnnnnnnnnnnnnnnnnnnnnnnnnnnnnnnnnnnnnnnnnnnnnnnnnnnnnnnnnnnnnnnnnnnnnnnnnnnnnnnnnnnnnnnnnnnnnnnnnnnnnnnnnnnnnnnnnnnnnnnnnnnnnnnnnnnnnnnnnnnnnnnnnnnnnnnnnnnnnnnnnnnnnnnnnnnnnnnnnnnnnnnnnnnnnnnnnnnnnnnnnnnnnnnnnnnnnnnnnnnnnnnnnnnnnnnnnnnnnnnnnnnnnnnnnnnnnnnnnnnnnnnnnnnnnnnnnnnnnnnnnnnnnnnnnnnnnnnnnnnnnnnnnnnnnnnnnnnnnnnnnnnnnnnnnnnnnnnnnnnnnnnnnnnnnnnnnnnnnnnnnnnnnnnnnnnnnnnnnnnnnnnnnnnnnnnnnnnnnnnnnnnnnnnnnnnnnnnnnnnnnnnnnnnnnnnnnnnnnnnnnnnnnnnnnnnnnnnnnnnnnnnnnnnnnnnnnnnnnnnnnnnnnnnnnnnnnnnnnnnnnnnnnnnnnnnnnnnnnnnnnnnnnnnnnnnnnnnnnnnnnnnnnnnnnnnnnnnnnnnnnnnnnnnnnnnnnnnnnnnnnnnnnnnnnnnnnnnnnnnnnnnnnnnnnnnnnnnnnnnnnnnnnnnnnnnnnnnnnnnnnnnnnnnnnnnnnnnnnnnnnnnnnnnnnnnnnnnnnnnnnnnnnnnnnnnnnnnnnnnnnnnnnnnnnnnnnnnnnnnnnnnnnnnnnnnnnnnnnnnnnnnnnnnnnnnnnnnnnnnnnnnnnnnnnnnnnnnnnnnnnnnnnnnnnnnnnnnnnnnnnnnnnnnnnnnnnnnnnnnnnnnnnnnnnnnnnnnnnnnnnnnnnnnnnnnnnnnnnnnnnnnnnnnnnnnnnnnnnnnnnnnnnnnnnnnnnnnnnnnnnnnnnnnnnnnnnnnnnnnnnnnnnnnnnnnnnnnnnnnnnnnnnnnnnnnnnnnnnnnnnnnnnnnnnnnnnnnnnnnnnnnnnnnnnnnnnnnnnnnnnnnnnnnnnnnnnnnnnnnnnnnnnnnnnnnnnnnnnnnnnnnnnnnnnnnnnnnnnnnnnnnnnnnnnnnnnnnnnnnnnnnnnnnnnnnnnnnnnnnnnnnnnnnnnnnnnnnnnnnnnnnnnnnnnnnnnnnnnnnnnnnnnnnnnnnnnnnnnnnnnnnnnnnnnnnnnnnnnnnnnnnnnnnnnnnnnnnnnnnnnnnnnnnnnnnnnnnnnnnnnnnnnnnnnnnnnnnnnnnnnnnnnnnnnnnnnnnnnnnnnnnnnnnnnnnnnnnnnnnnnnnnnnnnnnnnnnnnnnnnnnnnnnnnnnnnnnnnnnnnnnnnnnnnnnnnnnnnnnnnnnnnnnnnnnnnnnnnnnnnnnnnnnnnnnnnnnnnnnnnnnnnnnnnnnnnnnnnnnnnnnnnnnnnnnnnnnnnnnnnnnnnnnnnnnnnnnnnnnnnnnnnnnnnnnnnnnnnnnnnnnnnnnnnnnnnnnnnnnnnnnnnnnnnnnnnnnnnnnnnnnnnnnnnnnnnnnnnnnnnnnnnnnnnnnnnnnnnnnnnnnnnnnnnnnnnnnnnnnnnnnnnnnnnnnnnnnnnnnnnnnnnnnnnnnnnnnnnnnnnnnnnnnnnnnnnnnnnnnnnnnnnnnnnnnnnnnnnnnnnnnnnnnnnnnnnnnnnnnnnnnnnnnnnnnnnnnnnnnnnnnnnnnnnnnnnnnnnnnnnnnnnnnnnnnnnnnnnnnnnnnnnnnnnnnnnnnnnnnnnnnnnnnnnnnnnnnnnnnnnnnnnnnnnnnnnnnnnnnnnnnnnnnnnnnnnnnnnnnnnnnnnnnnnnnnnnnnnnnnnnnnnnnnnnnnnnnnnnnnnnnnnnnnnnnnnnnnnnnnnnnnnnnnnnnnnnnnnnnnnnnnnnnnnnnnnnnnnnnnnnnnnnnnnnnnnnnnnnnnnnnnnnnnnnnnnnnnnnnnnnnnnnnnnnnnnnnnnnnnnnnnnnnnnnnnnnnnnnnnnnnnnnnnnnnnnnnnnnnnnnnnnnnnnnnnnnnnnnnnnnnnnnnnnnnnnnnnnnnnnnnnnnnnnnnnnnnnnnnnnnnnnnnnnnnnnnnnnnnnnnnnnnnnnnnnnnnnnnnnnnnnnnnnnnnnnnnnnnnnnnnnnnnnnnnnnnnnnnnnnnnnnnnnnnnnnnnnnnnnnnnnnnnnnnnnnnnnnnnnnnnnnnnnnnnnnnnnnnnnnnnnnnnnnnnnnnnnnnnnnnnnnnnnnnnnnnnnnnnnnnnnnnnnnnnnnnnnnnnnnnnnnnnnnnnnnnnnnnnnnnnnnnnnnnnnnnnnnnnnnnnnnnnnnnnnnnnnnnnnnnnnnnnnnnnnnnnnnnnnnnnnnnnnnnnnnnnnnnnnnnnnnnnnnnnnnnnnnnnnnnnnnnnnnnnnnnnnnnnnnnnnnnnnnnnnnnnnnnnnnnnnnnnnnnnnnnnnnnnnnnnnnnnnnnnnnnnnnnnnnnnnnnnnnnnnnnnnnnnnnnnnnnnnnnnnnnnnnnnnnnnnnnnnnnnnnnnnnnnnnnnnnnnnnnnnnnnnnnnnnnnnnnnnnnnnnnnnnnnnnnnnnnnnnnnnnnnnnnnnnnnnnnnnnnnnnnnnnnnnnnnnnnnnnnnnnnnnnnnnnnnnnnnnnnnnnnnnnnnnnnnnnnnnnnnnnnnnnnnnnnnnnnnnnnnnnnnnnnnnnnnnnnnnnnnnnnnnnnnnnnnnnnnnnnnnnnnnnnnnnnnnnnnnnnnnnnnnnnnnnnnnnnnnnnnnnnnnnnnnnnnnnnnnnnnnnnnnnnnnnnnnnnnnnnnnnnnnnnnnnnnnnnnnnnnnnnnnnnnnnnnnnnnnnnnnnnnnnnnnnnnnnnnnnnnnnnnnnnnnnnnnnnnnnnnnnnnnnnnnnnnnnnnnnnnnnnnnnnnnnnnnnnnnnnnnnnnnnnnnnnnnnnnnnnnnnnnnnnnnnnnnnnnnnnnnnnnnnnnnnnnnnnnnnnnnnnnnnnnnnnnnnnnnnnnnnnnnnnnnnnnnnnnnnnnnnnnnnnnnnnnnnnnnnnnnnnnnnnnnnnnnnnnnnnnnnnnnnnnnnnnnnnnnnnnnnnnnnnnnnnnnnnnnnnnnnnnnnnnnnnnnnnnnnnnnnnnnnnnnnnnnnnnnnnnnnnnnnnnnnnnnnnnnnnnnnnnnnnnnnnnnnnnnnnnnnnnnnnnnnnnnnnnnnnnnnnnnnnnnnnnnnnnnnnnnnnnnnnnnnnnnnnnnnnnnnnnnnnnnnnnnnnnnnnnnnnnnnnnnnnnnnnnnnnnnnnnnnnnnnnnnnnnnnnnnnnnnnnnnnnnnnnnnnnnnnnnnnnnnnnnnnnnnnnnnnnnnnnnnnnnnnnnnnnnnnnnnnnnnnnnnnnnnnnnnnnnnnnnnnnnnnnnnnnnnnnnnnnnnnnnnnnnnnnnnnnnnnnnnnnnnnnnnnnnnnnnnnnnnnnnnnnnnnnnnnnnnnnnnnnnnnnnnnnnnnnnnnnnnnnnnnnnnnnnnnnnnnnnnnnnnnnnnnnnnnnnnnnnnnnnnnnnnnnnnnnnnnnnnnnnnnnnnnnnnnnnnnnnnnnnnnnnnnnnnnnnnnnnnnnnnnnnnnnnnnnnnnnnnnnnnnnnnnnnnnnnnnnnnnnnnnnnnnnnnnnnnnnnnnnnnnnnnnnnnnnnnnnnnnnnnnnnnnnnnnnnnnnnnnnnnnnnnnnnnnnnnnnnnnnnnnnnnnnnnnnnnnnnnnnnnnnnnnnnnnnnnnnnnnnnnnnnnnnnnnnnnnnnnnnnnnnnnnnnnnnnnnnnnnnnnnnnnnnnnnnnnnnnnnnnnnnnnnnnnnnnnnnnnnnnnnnnnnnnnnnnnnnnnnnnnnnnnnnnnnnnnnnnnnnnnnnnnnnnnnnnnnnnnnnnnnnnnnnnnnnnnnnnnnnnnnnnnnnnnnnnnnnnnnnnnnnnnnnnnnnnnnnnnnnnnnnnnnnnnnnnnnnnnnnnnnnnnnnnnnnnnnnnnnnnnnnnnnnnnnnnnnnnnnnnnnnnnnnnnnnnnnnnnnnnnnnnnnnnnnnnnnnnnnnnnnnnnnnnnnnnnnnnnnnnnnnnnnnnnnnnnnnnnnnnnnnnnnnnnnnnnnnnnnnnnnnnnnnnnnnnnnnnnnnnnnnnnnnnnnnnnnnnnnnnnnnnnnnnnnnnnnnnnnnnnnnnnnnnnnnnnnnnnnnnnnnnnnnnnnnnnnnnnnnnnnnnnnnnnnnnnnnnnnnnnnnnnnnnnnnnnnnnnnnnnnnnnnnnnnnnnnnnnnnnnnnnnnnnnnnnnnnnnnnnnnnnnnnnnnnnnnnnnnnnnnnnnnnnnnnnnnnnnnnnnnnnnnnnnnnnnnnnnnnnnnnnnnnnnnnnnnnnnnnnnnnnnnnnnnnnnnnnnnnnnnnnnnnnnnnnnnnnnnnnnnnnnnnnnnnnnnnnnnnnnnnnnnnnnnnnnnnnnnnnnnnnnnnnnnnnnnnnnnnnnnnnnnnnnnnnnnnnnnnnnnnnnnnnnnnnnnnnnnnnnnnnnnnnnnnnnnnnnnnnnnnnnnnnnnnnnnnnnnnnnnnnnnnnnnnnnnnnnnnnnnnnnnnnnnnnnnnnnnnnnnnnnnnnnnnnnnnnnnnnnnnnnnnnnnnnnnnnnnnnnnnnnnnnnnnnnnnnnnnnnnnnnnnnnnnnnnnnnnnnnnnnnnnnnnnnnnnnnnnnnnnnnnnnnnnnnnnnnnnnnnnnnnnnnnnnnnnnnnnnnnnnnnnnnnnnnnnnnnnnnnnnnnnnnnnnnnnnnnnnnnnnnnnnnnnnnnnnnnnnnnnnnnnnnnnnnnnnnnnnnnnnnnnnnnnnnnnnnnnnnnnnnnnnnnnnnnnnnnnnnnnnnnnnnnnnnnnnnnnnnnnnnnnnnnnnnnnnnnnnnnnnnnnnnnnnnnnnnnnnnnnnnnnnnnnnnnnnnnnnnnnnnnnnnnnnnnnnnnnnnnnnnnnnnnnnnnnnnnnnnnnnnnnnnnnnnnnnnnnnnnnnnnnnnnnnnnnnnnnnnnnnnnnnnnnnnnnnnnnnnnnnnnnnnnnnnnnnnnnnnnnnnnnnnnnnnnnnnnnnnnnnnnnnnnnnnnnnnnnnnnnnnnnnnnnnnnnnnnnnnnnnnnnnnnnnnnnnnnnnnnnnnnnnnnnnnnnnnnnnnnnnnnnnnnnnnnnnnnnnnnnnnnnnnnnnnnnnnnnnnnnnnnnnnnnnnnnnnnnnnnnnnnnnnnnnnnnnnnnnnnnnnnnnnnnnnnnnnnnnnnnnnnnnnnnnnnnnnnnnnnnnnnnnnnnnnnnnnnnnnnnnnnnnnnnnnnnnnnnnnnnnnnnnnnnnnnnnnnnnnnnnnnnnnnnnnnnnnnnnnnnnnnnnnnnnnnnnnnnnnnnnnnnnnnnnnnnnnnnnnnnnnnnnnnnnnnnnnnnnnnnnnnnnnnnnnnnnnnnnnnnnnnnnnnnnnnnnnnnnnnnnnnnnnnnnnnnnnnnnnnnnnnnnnnnnnnnnnnnnnnnnnnnnnnnnnnnnnnnnnnnnnnnnnnnnnnnnnnnnnnnnnnnnnnnnnnnnnnnnnnnnnnnnnnnnnnnnnnnnnnnnnnnnnnnnnnnnnnnnnnnnnnnnnnnnnnnnnnnnnnnnnnnnnnnnnnnnnnnnnnnnnnnnnnnnnnnnnnnnnnnnnnnnnnnnnnnnnnnnnnnnnnnnnnnnnnnnnnnnnnnnnnnnnnnnnnnnnnnnnnnnnnnnnnnnnnnnnnnnnnnnnnnnnnnnnnnnnnnnnnnnnnnnnnnnnnnnnnnnnnnnnnnnnnnnnnnnnnnnnnnnnnnnnnnnnnnnnnnnnnnnnnnnnnnnnnnnnnnnnnnnnnnnnnnnnnnnnnnnnnnnnnnnnnnnnnnnnnnnnnnnnnnnnnnnnnnnnnnnnnnnnnnnnnnnnnnnnnnnnnnnnnnnnnnnnnnnnnnnnnnnnnnnnnnnnnnnnnnnnnnnnnnnnnnnnnnnnnnnnnnnnnnnnnnnnnnnnnnnnnnnnnnnnnnnnnnnnnnnnnnnnnnnnnnnnnnnnnnnnnnnnnnnnnnnnnnnnnnnnnnnnnnnnnnnnnnnnnnnnnnnnnnnnnnnnnnnnnnnnnnnnnnnnnnnnnnnnnnnnnnnnnnnnnnnnnnnnnnnnnnnnnnnnnnnnnnnnnnnnnnnnnnnnnnnnnnnnnnnnnnnnnnnnnnnnnnnnnnnnnnnnnnnnnnnnnnnnnnnnnnnnnnnnnnnnnnnnnnnnnnnnnnnnnnnnnnnnnnnnnnnnnnnnnnnnnnnnnnnnnnnnnnnnnnnnnnnnnnnnnnnnnnnnnnnnnnnnnnnnnnnnnnnnnnnnnnnnnnnnnnnnnnnnnnnnnnnnnnnnnnnnnnnnnnnnnnnnnnnnnnnnnnnnnnnnnnnnnnnnnnnnnnnnnnnnnnnnnnnnnnnnnnnnnnnnnnnnnnnnnnnnnnnnnnnnnnnnnnnnnnnnnnnnnnnnnnnnnnnnnnnnnnnnnnnnnnnnnnnnnnnnnnnnnnnnnnnnnnnnnnnnnnnnnnnnnnnnnnnnnnnnnnnnnnnnnnnnnnnnnnnnnnnnnnnnnnnnnnnnnnnnnnnnnnnnnnnnnnnnnnnnnnnnnnnnnnnnnnnnnnnnnnnnnnnnnnnnnnnnnnnnnnnnnnnnnnnnnnnnnnnnnnnnnnnnnnnnnnnnnnnnnnnnnnnnnnnnnnnnnnnnnnnnnnnnnnnnnnnnnnnnnnnnnnnnnnnnnnnnnnnnnnnnnnnnnnnnnnnnnnnnnnnnnnnnnnnnnnnnnnnnnnnnnnnnnnnnnnnnnnnnnnnnnnnnnnnnnnnnnnnnnnnnnnnnnnnnnnnnnnnnnnnnnnnnnnnnnnnnnnnnnnnnnnnnnnnnnnnnnnnnnnnnnnnnnnnnnnnnnnnnnnnnnnnnnnnnnnnnnnnnnnnnnnnnnnnnnnnnnnnnnnnnnnnnnnnnnnnnnnnnnnnnnnnnnnnnnnnnnnnnnnnnnnnnnnnnnnnnnnnnnnnnnnnnnnnnnnnnnnnnnnnnnnnnnnnnnnnnnnnnnnnnnnnnnnnnnnnnnnnnnnnnnnnnnnnnnnnnnnnnnnnnnnnnnnnnnnnnnnnnnnnnnnnnnnnnnnnnnnnnnnnnnnnnnnnnnnnnnnnnnnnnnnnnnnnnnnnnnnnnnnnnnnnnnnnnnnnnnnnnnnnnnnnnnnnnnnnnnnnnnnnnnnnnnnnnnnnnnnnnnnnnnnnnnnnnnnnnnnnnnnnnnnnnnnnnnnnnnnnnnnnnnnnnnnnnnnnnnnnnnnnnnnnnnnnnnnnnnnnnnnnnnnnnnnnnnnnnnnnnnnnnnnnnnnnnnnnnnnnnnnnnnnnnnnnnnnnnnnnnnnnnnnnnnnnnnnnnnnnnnnnnnnnnnnnnnnnnnnnnnnnnnnnnnnnnnnnnnnnnnnnnnnnnnnnnnnnnnnnnnnnnnnnnnnnnnnnnnnnnnnnnnnnnnnnnnnnnnnnnnnnnnnnnnnnnnnnnnnnnnnnnnnnnnnnnnnnnnnnnnnnnnnnnnnnnnnnnnnnnnnnnnnnnnnnnnnnnnnnnnnnnnnnnnnnnnnnnnnnnnnnnnnnnnnnnnnnnnnnnnnnnnnnnnnnnnnnnnnnnnnnnnnnnnnnnnnnnnnnnnnnnnnnnnnnnnnnnnnnnnnnnnnnnnnnnnnnnnnnnnnnnnnnnnnnnnnnnnnnnnnnnnnnnnnnnnnnnnnnnnnnnnnnnnnnnnnnnnnnnnnnnnnnnnnnnnnnnnnnnnnnnnnnnnnnnnnnnnnnnnnnnnnnnnnnnnnnnnnnnnnnnnnnnnnnnnnnnnnnnnnnnnnnnnnnnnnnnnnnnnnnnnnnnnnnnnnnnnnnnnnnnnnnnnnnnnnnnnnnnnnnnnnnnnnnnnnnnnnnnnnnnnnnnnnnnnnnnnnnnnnnnnnnnnnnnnnnnnnnnnnnnnnnnnnnnnnnnnnnnnnnnnnnnnnnnnnnnnnnnnnnnnnnnnnnnnnnnnnnnnnnnnnnnnnnnnnnnnnnnnnnnnnnnnnnnnnnnnnnnnnnnnnnnnnnnnnnnnnnnnnnnnnnnnnnnnnnnnnnnnnnnnnnnnnnnnnnnnnnnnnnnnnnnnnnnnnnnnnnnnnnnnnnnnnnnnnnnnnnnnnnnnnnnnnnnnnnnnnnnnnnnnnnnnnnnnnnnnnnnnnnnnnnnnnnnnnnnnnnnnnnnnnnnnnnnnnnnnnnnnnnnnnnnnnnnnnnnnnnnnnnnnnnnnnnnnnnnnnnnnnnnnnnnnnnnnnnnnnnnnnnnnnnnnnnnnnnnnnnnnnnnnnnnnnnnnnnnnnnnnnnnnnnnnnnnnnnnnnnnnnnnnnnnnnnnnnnnnnnnnnnnnnnnnnnnnnnnnnnnnnnnnnnnnnnnnnnnnnnnnnnnnnnnnnnnnnnnnnnnnnnnnnnnnnnnnnnnnnnnnnnnnnnnnnnnnnnnnnnnnnnnnnnnnnnnnnnnnnnnnnnnnnnnnnnnnnnnnnnnnnnnnnnnnnnnnnnnnnnnnnnnnnnnnnnnnnnnnnnnnnnnnnnnnnnnnnnnnnnnnnnnnnnnnnnnnnnnnnnnnnnnnnnnnnnnnnnnnnnnnnnnnnnnnnnnnnnnnnnnnnnnnnnnnnnnnnnnnnnnnnnnnnnnnnnnnnnnnnnnnnnnnnnnnnnnnnnnnnnnnnnnnnnnnnnnnnnnnnnnnnnnnnnnnnnnnnnnnnnnnnnnnnnnnnnnnnnnnnnnnnnnnnnnnnnnnnnnnnnnnnnnnnnnnnnnnnnnnnnnnnnnnnnnnnnnnnnnnnnnnnnnnnnnnnnnnnnnnnnnnnnnnnnnnnnnnnnnnnnnnnnnnnnnnnnnnnnnnnnnnnnnnnnnnnnnnnnnnnnnnnnnnnnnnnnnnnnnnnnnnnnnnnnnnnnnnnnnnnnnnnnnnnnnnnnnnnnnnnnnnnnnnnnnnnnnnnnnnnnnnnnnnnnnnnnnnnnnnnnnnnnnnnnnnnnnnnnnnnnnnnnnnnnnnnnnnnnnnnnnnnnnnnnnnnnnnnnnnnnnnnnnnnnnnnnnnnnnnnnnnnnnnnnnnnnnnnnnnnnnnnnnnnnnnnnnnnnnnnnnnnnnnnnnnnnnnnnnnnnnnnnnnnnnnnnnnnnnnnnnnnnnnnnnnnnnnnnnnnnnnnnnnnnnnnnnnnnnnnnnnnnnnnnnnnnnnnnnnnnnnnnnnnnnnnnnnnnnnnnnnnnnnnnnnnnnnnnnnnnnnnnnnnnnnnnnnnnnnnnnnnnnnnnnnnnnnnnnnnnnnnnnnnnnnnnnnnnnnnnnnnnnnnnnnnnnnnnnnnnnnnnnnnnnnnnnnnnnnnnnnnnnnnnnnnnnnnnnnnnnnnnnnnnnnnnnnnnnnnnnnnnnnnnnnnnnnnnnnnnnnnnnnnnnnnnnnnnnnnnnnnnnnnnnnnnnnnnnnnnnnnnnnnnnnnnnnnnnnnnnnnnnnnnnnnnnnnnnnnnnnnnnnnnnnnnnnnnnnnnnnnnnnnnnnnnnnnnnnnnnnnnnnnnnnnnnnnnnnnnnnnnnnnnnnnnnnnnnnnnnnnnnnnnnnnnnnnnnnnnnnnnnnnnnnnnnnnnnnnnnnnnnnnnnnnnnnnnnnnnnnnnnnnnnnnnnnnnnnnnnnnnnnnnnnnnnnnnnnnnnnnnnnnnnnnnnnnnnnnnnnnnnnnnnnnnnnnnnnnnnnnnnnnnnnnnnnnnnnnnnnnnnnnnnnnnnnnnnnnnnnnnnnnnnnnnnnnnnnnnnnnnnnnnnnnnnnnnnnnnnnnnnnnnnnnnnnnnnnnnnnnnnnnnnnnnnnnnnnnnnnnnnnnnnnnnnnnnnnnnnnnnnnnnnnnnnnnnnnnnnnnnnnnnnnnnnnnnnnnnnnnnnnnnnnnnnnnnnnnnnnnnnnnnnnnnnnnnnnnnnnnnnnnnnnnnnnnnnnnnnnnnnnnnnnnnnnnnnnnnnnnnnnnnnnnnnnnnnnnnnnnnnnnnnnnnnnnnnnnnnnnnnnnnnnnnnnnnnnnnnnnnnnnnnnnnnnnnnnnnnnnnnnnnnnnnnnnnnnnnnnnnnnnnnnnnnnnnnnnnnnnnnnnnnnnnnnnnnnnnnnnnnnnnnnnnnnnnnnnnnnnnnnnnnnnnnnnnnnnnnnnnnnnnnnnnnnnnnnnnnnnnnnnnnnnnnnnnnnnnnnnnnnnnnnnnnnnnnnnnnnnnnnnnnnnnnnnnnnnnnnnnnnnnnnnnnnnnnnnnnnnnnnnnnnnnnnnnnnnnnnnnnnnnnnnnnnnnnnnnnnnnnnnnnnnnnnnnnnnnnnnnnnnnnnnnnnnnnnnnnnnnnnnnnnnnnnnnnnnnnnnnnnnnnnnnnnnnnnnnnnnnnnnnnnnnnnnnnnnnnnnnnnnnnnnnnnnnnnnnnnnnnnnnnnnnnnnnnnnnnnnnnnnnnnnnnnnnnnnnnnnnnnnnnnnnnnnnnnnnnnnnnnnnnnnnnnnnnnnnnnnnnnnnnnnnnnnnnnnnnnnnnnnnnnnnnnnnnnnnnnnnnnnnnnnnnnnnnnnnnnnnnnnnnnnnnnnnnnnnnnnnnnnnnnnnnnnnnnnnnnnnnnnnnnnnnnnnnnnnnnnnnnnnnnnnnnnnnnnnnnnnnnnnnnnnnnnnnnnnnnnnnnnnnnnnnnnnnnnnnnnnnnnnnnnnnnnnnnnnnnnnnnnnnnnnnnnnnnnnnnnnnnnnnnnnnnnnnnnnnnnnnnnnnnnnnnnnnnnnnnnnnnnnnnnnnnnnnnnnnnnnnnnnnnnnnnnnnnnnnnnnnnnnnnnnnnnnnnnnnnnnnnnnnnnnnnnnnnnnnnnnnnnnnnnnnnnnnnnnnnnnnnnnnnnnnnnnnnnnnnnnnnnnnnnnnnnnnnnnnnnnnnnnnnnnnnnnnnnnnnnnnnnnnnnnnnnnnnnnnnnnnnnnnnnnnnnnnnnnnnnnnnnnnnnnnnnnnnnnnnnnnnnnnnnnnnnnnnnnnnnnnnnnnnnnnnnnnnnnnnnnnnnnnnnnnnnnnnnnnnnnnnnnnnnnnnnnnnnnnnnnnnnnnnnnnnnnnnnnnnnnnnnnnnnnnnnnnnnnnnnnnnnnnnnnnnnnnnnnnnnnnnnnnnnnnnnnnnnnnnnnnnnnnnnnnnnnnnnnnnnnnnnnnnnnnnnnnnnnnnnnnnnnnnnnnnnnnnnnnnnnnnnnnnnnnnnnnnnnnnnnnnnnnnnnnnnnnnnnnnnnnnnnnnnnnnnnnnnnnnnnnnnnnnnnnnnnnnnnnnnnnnnnnnnnnnnnnnnnnnnnnnnnnnnnnnnnnnnnnnnnnnnnnnnnnnnnnnnnnnnnnnnnnnnnnnnnnnnnnnnnnnnnnnnnnnnnnnnnnnnnnnnnnnnnnnnnnnnnnnnnnnnnnnnnnnnnnnnnnnnnnnnnnnnnnnnnnnnnnnnnnnnnnnnnnnnnnnnnnnnnnnnnnnnnnnnnnnnnnnnnnnnnnnnnnnnnnnnnnnnnnnnnnnnnnnnnnnnnnnnnnnnnnnnnnnnnnnnnnnnnnnnnnnnnnnnnnnnnnnnnnnnnnnnnnnnnnnnnnnnnnnnnnnnnnnnnnnnnnnnnnnnnnnnnnnnnnnnnnnnnnnnnnnnnnnnnnnnnnnnnnnnnnnnnnnnnnnnnnnnnnnnnnnnnnnnnnnnnnnnnnnnnnnnnnnnnnnnnnnnnnnnnnnnnnnnnnnnnnnnnnnnnnnnnnnnnnnnnnnnnnnnnnnnnnnnnnnnnnnnnnnnnnnnnnnnnnnnnnnnnnnnnnnnnnnnnnnnnnnnnnnnnnnnnnnnnnnnnnnnnnnnnnnnnnnnnnnnnnnnnnnnnnnnnnnnnnnnnnnnnnnnnnnnnnnnnnnnnnnnnnnnnnnnnnnnnnnnnnnnnnnnnnnnnnnnnnnnnnnnnnnnnnnnnnnnnnnnnnnnnnnnnnnnnnnnnnnnnnnnnnnnnnnnnnnnnnnnnnnnnnnnnnnnnnnnnnnnnnnnnnnnnnnnnnnnnnnnnnnnnnnnnnnnnnnnnnnnnnnnnnnnnnnnnnnnnnnnnnnnnnnnnnnnnnnnnnnnnnnnnnnnnnnnnnnnnnnnnnnnnnnnnnnnnnnnnnnnnnnnnnnnnnnnnnnnnnnnnnnnnnnnnnnnnnnnnnnnnnnnnnnnnnnnnnnnnnnnnnnnnnnnnnnnnnnnnnnnnnnnnnnnnnnnnnnnnnnnnnnnnnnnnnnnnnnnnnnnnnnnnnnnnnnnnnnnnnnnnnnnnnnnnnnnnnnnnnnnnnnnnnnnnnnnnnnnnnnnnnnnnnnnnnnnnnnnnnnnnnnnnnnnnnnnnnnnnnnnnnnnnnnnnnnnnnnnnnnnnnnnnnnnnnnnnnnnnnnnnnnnnnnnnnnnnnnnnnnnnnnnnnnnnnnnnnnnnnnnnnnnnnnnnnnnnnnnnnnnnnnnnnnnnnnnnnnnnnnnnnnnnnnnnnnnnnnnnnnnnnnnnnnnnnnnnnnnnnnnnnnnnnnnnnnnnnnnnnnnnnnnnnnnnnnnnnnnnnnnnnnnnnnnnnnnnnnnnnnnnnnnnnnnnnnnnnnnnnnnnnnnnnnnnnnnnnnnnnnnnnnnnnnnnnnnnnnnnnnnnnnnnnnnnnnnnnnnnnnnnnnnnnnnnnnnnnnnnnnnnnnnnnnnnnnnnnnnnnnnnnnnnnnnnnnnnnnnnnnnnnnnnnnnnnnnnnnnnnnnnnnnnnnnnnnnnnnnnnnnnnnnnnnnnnnnnnnnnnnnnnnnnnnnnnnnnnnnnnnnnnnnnnnnnnnnnnnnnnnnnnnnnnnnnnnnnnnnnnnnnnnnnnnnnnnnnnnnnnnnnnnnnnnnnnnnnnnnnnnnnnnnnnnnnnnnnnnnnnnnnnnnnnnnnnnnnnnnnnnnnnnnnnnnnnnnnnnnnnnnnnnnnnnnnnnnnnnnnnnnnnnnnnnnnnnnnnnnnnnnnnnnnnnnnnnnnnnnnnnnnnnnnnnnnnnnnnnnnnnnnnnnnnnnnnnnnnnnnnnnnnnnnnnnnnnnnnnnnnnnnnnnnnnnnnnnnnnnnnnnnnnnnnnnnnnnnnnnnnnnnnnnnnnnnnnnnnnnnnnnnnnnnnnnnnnnnnnnnnnnnnnnnnnnnnnnnnnnnnnnnnnnnnnnnnnnnnnnnnnnnnnnnnnnnnnnnnnnnnnnnnnnnnnnnnnnnnnnnnnnnnnnnnnnnnnnnnnnnnnnnnnnnnnnnnnnnnnnnnnnnnnnnnnnnnnnnnnnnnnnnnnnnnnnnnnnnnnnnnnnnnnnnnnnnnnnnnnnnnnnnnnnnnnnnnnnnnnnnnnnnnnnnnnnnnnnnnnnnnnnnnnnnnnnnnnnnnnnnnnnnnnnnnnnnnnnnnnnnnnnnnnnnnnnnnnnnnnnnnnnnnnnnnnnnnnnnnnnnnnnnnnnnnnnnnnnnnnnnnnnnnnnnnnnnnnnnnnnnnnnnnnnnnnnnnnnnnnnnnnnnnnnnnnnnnnnnnnnnnnnnnnnnnnnnnnnnnnnnnnnnnnnnnnnnnnnnnnnnnnnnnnnnnnnnnnnnnnnnnnnnnnnnnnnnnnnnnnnnnnnnnnnnnnnnnnnnnnnnnnnnnnnnnnnnnnnnnnnnnnnnnnnnnnnnnnnnnnnnnnnnnnnnnnnnnnnnnnnnnnnnnnnnnnnnnnnnnnnnnnnnnnnnnnnnnnnnnnnnnnnnnnnnnnnnnnnnnnnnnnnnnnnnnnnnnnnnnnnnnnnnnnnnnnnnnnnnnnnnnnnnnnnnnnnnnnnnnnnnnnnnnnnnnnnnnnnnnnnnnnnnnnnnnnnnnnnnnnnnnnnnnnnnnnnnnnnnnnnnnnnnnnnnnnnnnnnnnnnnnnnnnnnnnnnnnnnnnnnnnnnnnnnnnnnnnnnnnnnnnnnnnnnnnnnnnnnnnnnnnnnnnnnnnnnnnnnnnnnnnnnnnnnnnnnnnnnnnnnnnnnnnnnnnnnnnnnnnnnnnnnnnnnnnnnnnnnnnnnnnnnnnnnnnnnnnnnnnnnnnnnnnnnnnnnnnnnnnnnnnnnnnnnnnnnnnnnnnnnnnnnnnnnnnnnnnnnnnnnnnnnnnnnnnnnnnnnnnnnnnnnnnnnnnnnnnnnnnnnnnnnnnnnnnnnnnnnnnnnnnnnnnnnnnnnnnnnnnnnnnnnnnnnnnnnnnnnnnnnnnnnnnnnnnnnnnnnnnnnnnnnnnnnnnnnnnnnnnnnnnnnnnnnnnnnnnnnnnnnnnnnnnnnnnnnnnnnnnnnnnnnnnnnnnnnnnnnnnnnnnnnnnnnnnnnnnnnnnnnnnnnnnnnnnnnnnnnnnnnnnnnnnnnnnnnnnnnnnnnnnnnnnnnnnnnnnnnnnnnnnnnnnnnnnnnnnnnnnnnnnnnnnnnnnnnnnnnnnnnnnnnnnnnnnnnnnnnnnnnnnnnnnnnnnnnnnnnnnnnnnnnnnnnnnnnnnnnnnnnnnnnnnnnnnnnnnnnnnnnnnnnnnnnnnnnnnnnnnnnnnnnnnnnnnnnnnnnnnnnnnnnnnnnnnnnnnnnnnnnnnnnnnnnnnnnnnnnnnnnnnnnnnnnnnnnnnnnnnnnnnnnnnnnnnnnnnnnnnnnnnnnnnnnnnnnnnnnnnnnnnnnnnnnnnnnnnnnnnnnnnnnnnnnnnnnnnnnnnnnnnnnnnnnnnnnnnnnnnnnnnnnnnnnnnnnnnnnnnnnnnnnnnnnnnnnnnnnnnnnnnnnnnnnnnnnnnnnnnnnnnnnnnnnnnnnnnnnnnnnnnnnnnnnnnnnnnnnnnnnnnnnnnnnnnnnnnnnnnnnnnnnnnnnnnnnnnnnnnnnnnnnnnnnnnnnnnnnnnnnnnnnnnnnnnnnnnnnnnnnnnnnnnnnnnnnnnnnnnnnnnnnnnnnnnnnnnnnnnnnnnnnnnnnnnnnnnnnnnnnnnnnnnnnnnnnnnnnnnnnnnnnnnnnnnnnnnnnnnnnnnnnnnnnnnnnnnnnnnnnnnnnnnnnnnnnnnnnnnnnnnnnnnnnnnnnnnnnnnnnnnnnnnnnnnnnnnnnnnnnnnnnnnnnnnnnnnnnnnnnnnnnnnnnnnnnnnnnnnnnnnnnnnnnnnnnnnnnnnnnnnnnnnnnnnnnnnnnnnnnnnnnnnnnnnnnnnnnnnnnnnnnnnnnnnnnnnnnnnnnnnnnnnnnnnnnnnnnnnnnnnnnnnnnnnnnnnnnnnnnnnnnnnnnnnnnnnnnnnnnnnnnnnnnnnnnnnnnnnnnnnnnnnnnnnnnnnnnnnnnnnnnnnnnnnnnnnnnnnnnnnnnnnnnnnnnnnnnnnnnnnnnnnnnnnnnnnnnnnnnnnnnnnnnnnnnnnnnnnnnnnnnnnnnnnnnnnnnnnnnnnnnnnnnnnnnnnnnnnnnnnnnnnnnnnnnnnnnnnnnnnnnnnnnnnnnnnnnnnnnnnnnnnnnnnnnnnnnnnnnnnnnnnnnnnnnnnnnnnnnnnnnnnnnnnnnnnnnnnnnnnnnnnnnnnnnnnnnnnnnnnnnnnnnnnnnnnnnnnnnnnnnnnnnnnnnnnnnnnnnnnnnnnnnnnnnnnnnnnnnnnnnnnnnnnnnnnnnnnnnnnnnnnnnnnnnnnnnnnnnnnnnnnnnnnnnnnnnnnnnnnnnnnnnnnnnnnnnnnnnnnnnnnnnnnnnnnnnnnnnnnnnnnnnnnnnnnnnnnnnnnnnnnnnnnnnnnnnnnnnnnnnnnnnnnnnnnnnnnnnnnnnnnnnnnnnnnnnnnnnnnnnnnnnnnnnnnnnnnnnnnnnnnnnnnnnnnnnnnnnnnnnnnnnnnnnnnnnnnnnnnnnnnnnnnnnnnnnnnnnnnnnnnnnnnnnnnnnnnnnnnnnnnnnnnnnnnnnnnnnnnnnnnnnnnnnnnnnnnnnnnnnnnnnnnnnnnnnnnnnnnnnnnnnnnnnnnnnnnnnnnnnnnnnnnnnnnnnnnnnnnnnnnnnnnnnnnnnnnnnnnnnnnnnnnnnnnnnnnnnnnnnnnnnnnnnnnnnnnnnnnnnnnnnnnnnnnnnnnnnnnnnnnnnnnnnnnnnnnnnnnnnnnnnnnnnnnnnnnnnnnnnnnnnnnnnnnnnnnnnnnnnnnnnnnnnnnnnnnnnnnnnnnnnnnnnnnnnnnnnnnnnnnnnnnnnnnnnnnnnnnnnnnnnnnnnnnnnnnnnnnnnnnnnnnnnnnnnnnnnnnnnnnnnnnnnnnnnnnnnnnnnnnnnnnnnnnnnnnnnnnnnnnnnnnnnnnnnnnnnnnnnnnnnnnnnnnnnnnnnnnnnnnnnnnnnnnnnnnnnnnnnnnnnnnnnnnnnnnnnnnnnnnnnnnnnnnnnnnnnnnnnnnnnnnnnnnnnnnnnnnnnnnnnnnnnnnnnnnnnnnnnnnnnnnnnnnnnnnnnnnnnnnnnnnnnnnnnnnnnnnnnnnnnnnnnnnnnnnnnnnnnnnnnnnnnnnnnnnnnnnnnnnnnnnnnnnnnnnnnnnnnnnnnnnnnnnnnnnnnnnnnnnnnnnnnnnnnnnnnnnnnnnnnnnnnnnnnnnnnnnnnnnnnnnnnnnnnnnnnnnnnnnnnnnnnnnnnnnnnnnnnnnnnnnnnnnnnnnnnnnnnnnnnnnnnnnnnnnnnnnnnnnnnnnnnnnnnnnnnnnnnnnnnnnnnnnnnnnnnnnnnnnnnnnnnnnnnnnnnnnnnnnnnnnnnnnnnnnnnnnnnnnnnnnnnnnnnnnnnnnnnnnnnnnnnnnnnnnnnnnnnnnnnnnnnnnnnnnnnnnnnnnnnnnnnnnnnnnnnnnnnnnnnnnnnnnnnnnnnnnnnnnnnnnnnnnnnnnnnnnnnnnnnnnnnnnnnnnnnnnnnnnnnnnnnnnnnnnnnnnnnnnnnnnnnnnnnnnnnnnnnnnnnnnnnnnnnnnnnnnnnnnnnnnnnnnnnnnnnnnnnnnnnnnnnnnnnnnnnnnnnnnnnnnnnnnnnnnnnnnnnnnnnnnnnnnnnnnnnnnnnnnnnnnnnnnnnnnnnnnnnnnnnnnnnnnnnnnnnnnnnnnnnnnnnnnnnnnnnnnnnnnnnnnnnnnnnnnnnnnnnnnnnnnnnnnnnnnnnnnnnnnnnnnnnnnnnnnnnnnnnnnnnnnnnnnnnnnnnnnnnnnnnnnnnnnnnnnnnnnnnnnnnnnnnnnnnnnnnnnnnnnnnnnnnnnnnnnnnnnnnnnnnnnnnnnnnnnnnnnnnnnnnnnnnnnnnnnnnnnnnnnnnnnnnnnnnnnnnnnnnnnnnnnnnnnnnnnnnnnnnnnnnnnnnnnnnnnnnnnnnnnnnnnnnnnnnnnnnnnnnnnnnnnnnnnnnnnnnnnnnnnnnnnnnnnnnnnnnnnnnnnnnnnnnnnnnnnnnnnnnnnnnnnnnnnnnnnnnnnnnnnnnnnnnnnnnnnnnnnnnnnnnnnnnnnnnnnnnnnnnnnnnnnnnnnnnnnnnnnnnnnnnnnnnnnnnnnnnnnnnnnnnnnnnnnnnnnnnnnnnnnnnnnnnnnnnnnnnnnnnnnnnnnnnnnnnnnnnnnnnnnnnnnnnnnnnnnnnnnnnnnnnnnnnnnnnnnnnnnnnnnnnnnnnnnnnnnnnnnnnnnnnnnnnnnnnnnnnnnnnnnnnnnnnnnnnnnnnnnnnnnnnnnnnnnnnnnnnnnnnnnnnnnnnnnnnnnnnnnnnnnnnnnnnnnnnnnnnnnnnnnnnnnnnnnnnnnnnnnnnnnnnnnnnnnnnnnnnnnnnnnnnnnnnnnnnnnnnnnnnnnnnnnnnnnnnnnnnnnnnnnnnnnnnnnnnnnnnnnnnnnnnnnnnnnnnnnnnnnnnnnnnnnnnnnnnnnnnnnnnnnnnnnnnnnnnnnnnnnnnnnnnnnnnnnnnnnnnnnnnnnnnnnnnnnnnnnnnnnnnnnnnnnnnnnnnnnnnnnnnnnnnnnnnnnnnnnnnnnnnnnnnnnnnnnnnnnnnnnnnnnnnnnnnnnnnnnnnnnnnnnnnnnnnnnnnnnnnnnnnnnnnnnnnnnnnnnnnnnnnnnnnnnnnnnnnnnnnnnnnnnnnnnnnnnnnnnnnnnnnnnnnnnnnnnnnnnnnnnnnnnnnnnnnnnnnnnnnnnnnnnnnnnnnnnnnnnnnnnnnnnnnnnnnnnnnnnnnnnnnnnnnnnnnnnnnnnnnnnnnnnnnnnnnnnnnnnnnnnnnnnnnnnnnnnnnnnnnnnnnnnnnnnnnnnnnnnnnnnnnnnnnnnnnnnnnnnnnnnnnnnnnnnnnnnnnnnnnnnnnnnnnnnnnnnnnnnnnnnnnnnnnnnnnnnnnnnnnnnnnnnnnnnnnnnnnnnnnnnnnnnnnnnnnnnnnnnnnnnnnnnnnnnnnnnnnnnnnnnnnnnnnnnnnnnnnnnnnnnnnnnnnnnnnnnnnnnnnnnnnnnnnnnnnnnnnnnnnnnnnnnnnnnnnnnnnnnnnnnnnnnnnnnnnnnnnnnnnnnnnnnnnnnnnnnnnnnnnnnnnnnnnnnnnnnnnnnnnnnnnnnnnnnnnnnnnnnnnnnnnnnnnnnnnnnnnnnnnnnnnnnnnnnnnnnnnnnnnnnnnnnnnnnnnnnnnnnnnnnnnnnnnnnnnnnnnnnnnnnnnnnnnnnnnnnnnnnnnnnnnnnnnnnnnnnnnnnnnnnnnnnnnnnnnnnnnnnnnnnnnnnnnnnnnnnnnnnnnnnnnnnnnnnnnnnnnnnnnnnnnnnnnnnnnnnnnnnnnnnnnnnnnnnnnnnnnnnnnnnnnnnnnnnnnnnnnnnnnnnnnnnnnnnnnnnnnnnnnnnnnnnnnnnnnnnnnnnnnnnnnnnnnnnnnnnnnnnnnnnnnnnnnnnnnnnnnnnnnnnnnnnnnnnnnnnnnnnnnnnnnnnnnnnnnnnnnnnnnnnnnnnnnnnnnnnnnnnnnnnnnnnnnnnnnnnnnnnnnnnnnnnnnnnnnnnnnnnnnnnnnnnnnnnnnnnnnnnnnnnnnnnnnnnnnnnnnnnnnnnnnnnnnnnnnnnnnnnnnnnnnnnnnnnnnnnnnnnnnnnnnnnnnnnnnnnnnnnnnnnnnnnnnnnnnnnnnnnnnnnnnnnnnnnnnnnnnnnnnnnnnnnnnnnnnnnnnnnnnnnnnnnnnnnnnnnnnnnnnnnnnnnnnnnnnnnnnnnnnnnnnnnnnnnnnnnnnnnnnnnnnnnnnnnnnnnnnnnnnnnnnnnnnnnnnnnnnnnnnnnnnnnnnnnnnnnnnnnnnnnnnnnnnnnnnnnnnnnnnnnnnnnnnnnnnnnnnnnnnnnnnnnnnnnnnnnnnnnnnnnnnnnnnnnnnnnnnnnnnnnnnnnnnnnnnnnnnnnnnnnnnnnnnnnnnnnnnnnnnnnnnnnnnnnnnnnnnnnnnnnnnnnnnnnnnnnnnnnnnnnnnnnnnnnnnnnnnnnnnnnnnnnnnnnnnnnnnnnnnnnnnnnnnnnnnnnnnnnnnnnnnnnnnnnnnnnnnnnnnnnnnnnnnnnnnnnnnnnnnnnnnnnnnnnnnnnnnnnnnnnnnnnnnnnnnnnnnnnnnnnnnnnnnnnnnnnnnnnnnnnnnnnnnnnnnnnnnnnnnnnnnnnnnnnnnnnnnnnnnnnnnnnnnnnnnnnnnnnnnnnnnnnnnnnnnnnnnnnnnnnnnnnnnnnnnnnnnnnnnnnnnnnnnnnnnnnnnnnnnnnnnnnnnnnnnnnnnnnnnnnnnnnnnnnnnnnnnnnnnnnnnnnnnnnnnnnnnnnnnnnnnnnnnnnnnnnnnnnnnnnnnnnnnnnnnnnnnnnnnnnnnnnnnnnnnnnnnnnnnnnnnnnnnnnnnnnnnnnnnnnnnnnnnnnnnnnnnnnnnnnnnnnnnnnnnnnnnnnnnnnnnnnnnnnnnnnnnnnnnnnnnnnnnnnnnnnnnnnnnnnnnnnnnnnnnnnnnnnnnnnnnnnnnnnnnnnnnnnnnnnnnnnnnnnnnnnnnnnnnnnnnnnnnnnnnnnnnnnnnnnnnnnnnnnnnnnnnnnnnnnnnnnnnnnnnnnnnnnnnnnnnnnnnnnnnnnnnnnnnnnnnnnnnnnnnnnnnnnnnnnnnnnnnnnnnnnnnnnnnnnnnnnnnnnnnnnnnnnnnnnnnnnnnnnnnnnnnnnnnnnnnnnnnnnnnnnnnnnnnnnnnnnnnnnnnnnnnnnnnnnnnnnnnnnnnnnnnnnnnnnnnnnnnnnnnnnnnnnnnnnnnnnnnnnnnnnnnnnnnnnnnnnnnnnnnnnnnnnnnnnnnnnnnnnnnnnnnnnnnnnnnnnnnnnnnnnnnnnnnnnnnnnnnnnnnnnnnnnnnnnnnnnnnnnnnnnnnnnnnnnnnnnnnnnnnnnnnnnnnnnnnnnnnnnnnnnnnnnnnnnnnnnnnnnnnnnnnnnnnnnnnnnnnnnnnnnnnnnnnnnnnnnnnnnnnnnnnnnnnnnnnnnnnnnnnnnnnnnnnnnnnnnnnnnnnnnnnnnnnnnnnnnnnnnnnnnnnnnnnnnnnnnnnnnnnnnnnnnnnnnnnnnnnnnnnnnnnnnnnnnnnnnnnnnnnnnnnnnnnnnnnnnnnnnnnnnnnnnnnnnnnnnnnnnnnnnnnnnnnnnnnnnnnnnnnnnnnnnnnnnnnnnnnnnnnnnnnnnnnnnnnnnnnnnnnnnnnnnnnnnnnnnnnnnnnnnnnnnnnnnnnnnnnnnnnnnnnnnnnnnnnnnnnnnnnnnnnnnnnnnnnnnnnnnnnnnnnnnnnnnnnnnnnnnnnnnnnnnnnnnnnnnnnnnnnnnnnnnnnnnnnnnnnnnnnnnnnnnnnnnnnnnnnnnnnnnnnnnnnnnnnnnnnnnnnnnnnnnnnnnnnnnnnnnnnnnnnnnnnnnnnnnnnnnnnnnnnnnnnnnnnnnnnnnnnnnnnnnnnnnnnnnnnnnnnnnnnnnnnnnnnnnnnnnnnnnnnnnnnnnnnnnnnnnnnnnnnnnnnnnnnnnnnnnnnnnnnnnnnnnnnnnnnnnnnnnnnnnnnnnnnnnnnnnnnnnnnnnnnnnnnnnnnnnnnnnnnnnnnnnnnnnnnnnnnnnnnnnnnnnnnnnnnnnnnnnnnnnnnnnnnnnnnnnnnnnnnnnnnnnnnnnnnnnnnnnnnnnnnnnnnnnnnnnnnnnnnnnnnnnnnnnnnnnnnnnnnnnnnnnnnnnnnnnnnnnnnnnnnnnnnnnnnnnnnnnnnnnnnnnnnnnnnnnnnnnnnnnnnnnnnnnnnnnnnnnnnnnnnnnnnnnnnnnnnnnnnnnnnnnnnnnnnnnnnnnnnnnnnnnnnnnnnnnnnnnnnnnnnnnnnnnnnnnnnnnnnnnnnnnnnnnnnnnnnnnnnnnnnnnnnnnnnnnnnnnnnnnnnnnnnnnnnnnnnnnnnnnnnnnnnnnnnnnnnnnnnnnnnnnnnnnnnnnnnnnnnnnnnnnnnnnnnnnnnnnnnnnnnnnnnnnnnnnnnnnnnnnnnnnnnnnnnnnnnnnnnnnnnnnnnnnnnnnnnnnnnnnnnnnnnnnnnnnnnnnnnnnnnnnnnnnnnnnnnnnnnnnnnnnnnnnnnnnnnnnnnnnnnnnnnnnnnnnnnnnnnnnnnnnnnnnnnnnnnnnnnnnnnnnnnnnnnnnnnnnnnnnnnnnnnnnnnnnnnnnnnnnnnnnnnnnnnnnnnnnnnnnnnnnnnnnnnnnnnnnnnnnnnnnnnnnnnnnnnnnnnnnnnnnnnnnnnnnnnnnnnnnnnnnnnnnnnnnnnnnnnnnnnnnnnnnnnnnnnnnnnnnnnnnnnnnnnnnnnnnnnnnnnnnnnnnnnnnnnnnnnnnnnnnnnnnnnnnnnnnnnnnnnnnnnnnnnnnnnnnnnnnnnnnnnnnnnnnnnnnnnnnnnnnnnnnnnnnnnnnnnnnnnnnnnnnnnnnnnnnnnnnnnnnnnnnnnnnnnnnnnnnnnnnnnnnnnnnnnnnnnnnnnnnnnnnnnnnnnnnnnnnnnnnnnnnnnnnnnnnnnnnnnnnnnnnnnnnnnnnnnnnnnnnnnnnnnnnnnnnnnnnnnnnnnnnnnnnnnnnnnnnnnnnnnnnnnnnnnnnnnnnnnnnnnnnnnnnnnnnnnnnnnnnnnnnnnnnnnnnnnnnnnnnnnnnnnnnnnnnnnnnnnnnnnnnnnnnnnnnnnnnnnnnnnnnnnnnnnnnnnnnnnnnnnnnnnnnnnnnnnnnnnnnnnnnnnnnnnnnnnnnnnnnnnnnnnnnnnnnnnnnnnnnnnnnnnnnnnnnnnnnnnnnnnnnnnnnnnnnnnnnnnnnnnnnnnnnnnnnnnnnnnnnnnnnnnnnnnnnnnnnnnnnnnnnnnnnnnnnnnnnnnnnnnnnnnnnnnnnnnnnnnnnnnnnnnnnnnnnnnnnnnnnnnnnnnnnnnnnnnnnnnnnnnnnnnnnnnnnnnnnnnnnnnnnnnnnnnnnnnnnnnnnnnnnnnnnnnnnnnnnnnnnnnnnnnnnnnnnnnnnnnnnnnnnnnnnnnnnnnnnnnnnnnnnnnnnnnnnnnnnnnnnnnnnnnnnnnnnnnnnnnnnnnnnnnnnnnnnnnnnnnnnnnnnnnnnnnnnnnnnnnnnnnnnnnnnnnnnnnnnnnnnnnnnnnnnnnnnnnnnnnnnnnnnnnnnnnnnnnnnnnnnnnnnnnnnnnnnnnnnnnnnnnnnnnnnnnnnnnnnnnnnnnnnnnnnnnnnnnnnnnnnnnnnnnnnnnnnnnnnnnnnnnnnnnnnnnnnnnnnnnnnnnnnnnnnnnnnnnnnnnnnnnnnnnnnnnnnnnnnnnnnnnnnnnnnnnnnnnnnnnnnnnnnnnnnnnnnnnnnnnnnnnnnnnnnnnnnnnnnnnnnnnnnnnnnnnnnnnnnnnnnnnnnnnnnnnnnnnnnnnnnnnnnnnnnnnnnnnnnnnnnnnnnnnnnnnnnnnnnnnnnnnnnnnnnnnnnnnnnnnnnnnnnnnnnnnnnnnnnnnnnnnnnnnnnnnnnnnnnnnnnnnnnnnnnnnnnnnnnnnnnnnnnnnnnnnnnnnnnnnnnnnnnnnnnnnnnnnnnnnnnnnnnnnnnnnnnnnnnnnnnnnnnnnnnnnnnnnnnnnnnnnnnnnnnnnnnnnnnnnnnnnnnnnnnnnnnnnnnnnnnnnnnnnnnnnnnnnnnnnnnnnnnnnnnnnnnnnnnnnnnnnnnnnnnnnnnnnnnnnnnnnnnnnnnnnnnnnnnnnnnnnnnnnnnnnnnnnnnnnnnnnnnnnnnnnnnnnnnnnnnnnnnnnnnnnnnnnnnnnnnnnnnnnnnnnnnnnnnnnnnnnnnnnnnnnnnnnnnnnnnnnnnnnnnnnnnnnnnnnnnnnnnnnnnnnnnnnnnnnnnnnnnnnnnnnnnnnnnnnnnnnnnnnnnnnnnnnnnnnnnnnnnnnnnnnnnnnnnnnnnnnnnnnnnnnnnnnnnnnnnnnnnnnnnnnnnnnnnnnnnnnnnnnnnnnnnnnnnnnnnnnnnnnnnnnnnnnnnnnnnnnnnnnnnnnnnnnnnnnnnnnnnnnnnnnnnnnnnnnnnnnnnnnnnnnnnnnnnnnnnnnnnnnnnnnnnnnnnnnnnnnnnnnnnnnnnnnnnnnnnnnnnnnnnnnnnnnnnnnnnnnnnnnnnnnnnnnnnnnnnnnnnnnnnnnnnnnnnnnnnnnnnnnnnnnnnnnnnnnnnnnnnnnnnnnnnnnnnnnnnnnnnnnnnnnnnnnnnnnnnnnnnnnnnnnnnnnnnnnnnnnnnnnnnnnnnnnnnnnnnnnnnnnnnnnnnnnnnnnnnnnnnnnnnnnnnnnnnnnnnnnnnnnnnnnnnnnnnnnnnnnnnnnnnnnnnnnnnnnnnnnnnnnnnnnnnnnnnnnnnnnnnnnnnnnnnnnnnnnnnnnnnnnnnnnnnnnnnnnnnnnnnnnnnnnnnnnnnnnnnnnnnnnnnnnnnnnnnnnnnnnnnnnnnnnnnnnnnnnnnnnnnnnnnnnnnnnnnnnnnnnnnnnnnnnnnnnnnnnnnnnnnnnnnnnnnnnnnnnnnnnnnnnnnnnnnnnnnnnnnnnnnnnnnnnnnnnnnnnnnnnnnnnnnnnnnnnnnnnnnnnnnnnnnnnnnnnnnnnnnnnnnnnnnnnnnnnnnnnnnnnnnnnnnnnnnnnnnnnnnnnnnnnnnnnnnnnnnnnnnnnnnnnnnnnnnnnnnnnnnnnnnnnnnnnnnnnnnnnnnnnnnnnnnnnnnnnnnnnnnnnnnnnnnnnnnnnnnnnnnnnnnnnnnnnnnnnnnnnnnnnnnnnnnnnnnnnnnnnnnnnnnnnnnnnnnnnnnnnnnnnnnnnnnnnnnnnnnnnnnnnnnnnnnnnnnnnnnnnnnnnnnnnnnnnnnnnnnnnnnnnnnnnnnnnnnnnnnnnnnnnnnnnnnnnnnnnnnnnnnnnnnnnnnnnnnnnnnnnnnnnnnnnnnnnnnnnnnnnnnnnnnnnnnnnnnnnnnnnnnnnnnnnnnnnnnnnnnnnnnnnnnnnnnnnnnnnnnnnnnnnnnnnnnnnnnnnnnnnnnnnnnnnnnnnnnnnnnnnnnnnnnnnnnnnnnnnnnnnnnnnnnnnnnnnnnnnnnnnnnnnnnnnnnnnnnnnnnnnnnnnnnnnnnnnnnnnnnnnnnnnnnnnnnnnnnnnnnnnnnnnnnnnnnnnnnnnnnnnnnnnnnnnnnnnnnnnnnnnnnnnnnnnnnnnnnnnnnnnnnnnnnnnnnnnnnnnnnnnnnnnnnnnnnnnnnnnnnnnnnnnnnnnnnnnnnnnnnnnnnnnnnnnnnnnnnnnnnnnnnnnnnnnnnnnnnnnnnggtggaagaatcatggcctctagactgcgccgaattgaaatcgatatcgcccaaactcatttgtaagaccttgttaaaatatgctttacagcaacaacagcagtttttaacgggacagtactgattgtcgattgcggattgaagattagccggaggacgggaaggtaatcggttttggttaacgcagtttttgctgtcgttgtgttgttgggtgggttgccgggggcggattcgtacctcgccggacataatgctgaacgcaccggaaagttcaaagaagccatcggcgcctatacggccagtgcatccgcggatccgttgctggcgccctacgcccggatcagtgcggccaggtgcctgggcgcgaccggcagccgcacacaggcggtgcaggcgttacgcagcgtgctcgccgaggtgccggaggggccgtgggttcttccagcgaaactcgatctggcgggcctgctggcgctggactcgcagtttcccgcggccgcggccctttatgccgaatcgctcgactttgcgccgaagacggcggcgccgaagacggcggccccgaagacgtggagcccgaaaacgtggatcgtcgatcagtatgattgggcggcggcggaggtgtacgtccgcgtgccggaatttgaacagcgggcctatgcctacttccgcgataacgtggcaaccaccgtgctccgtcagcggcgcatcgatgcggcgcgttacctcgagaagtcgcctgatatggccgaccggtttgtggcgctcgatgggctgatcaagtcagccgaatgcaccgatgcgtggaaactggcgttgcggctcctgcccgaggcggttggcggcggtagcccggtgaacattaacgtgctcgcgcccctgctgacgtcgaacaaacgggccctgacggacgcgcagcgcgaagcgttccagaaactcgtcaacgagcacggcgacagcgacgcgcgcgcgcgctggatgcgcctggttctggcctgcgtcgcccgcagccattcgagcgttggcaagccggaggtcgcggcgttggcgtgcgacctgctcctcaagcatttcgaaaaatcggatcaggccggggatgcgctgtattggctggcaagccgttttgcccgagacgaaaaagacaagagcgccgtcgagcagtacctgcgcctggccaaacattgtcccgatcatgcgcgggccgatttcgccctgctcgccgccgccggactccagaagaaaaccggcgacctcaagggctgcgtccactcgctcgaacaactggtcggccgctatccccaggggcgccatgccgccaacgcatggtattggctgggaaaacaccacgaggccgcggggcataaaaaagacgccgctaaagcctttcagaacgcagcccaattcgggccgggcaactattacgcccattgcgccgcataccgtctggccaaggcgcgcgcgcgcgacgacgacagcccatccaatggccaaaacctccgggtggacggcaccggctcgtacatagcgccgctggaaatcgccgcggaagaacgtgtaaacgttcctgaccccgccatggacccgcagttcgagcggctgatgttttttggcaagaacgggctcgaagagggcgagtgggaagcgttgtacctcggcaagcggctcggcaacggggccgaagacgcccccgtttaccgggtcatgtgtgaagccgggtatgccaaggcggcgatggatttcgccgaggcgtacaactggggggtggccgacggcaagcggacacccgcgcgcatgcggatcgagtatccccggtcgtactggcaacaggtgcgggccaaatgccgcggcaccggaatcgacccgtacctcgtgctggccattgcccggcaggaaagcacgttccggcccgccctgacctcccacgccggcgcccgcggcatcatgcaggtcatgccgcccaccgcccagtggctggccaaggttgatccctcgattgacgcggcctgcatcgccaacctcgaaaaccccgacaactcgttccggctcgggattggttacctgttgcggatggtcgagcgctcgagcggcaacctcgtgcacgccctggcgtcgtacaacgccggccccggaaactgctcgaaatggctcaaaaggtggccgaaagccgacctcgagacgttcgtcgaaaacatcccgttcggcgagacccgcaactacgtcaaaaccgtcctgggcgcctacgccgcctaccactcgctctatccggctgtggaatgatgtggcacgcctatttggcgggtgaggcgtgatctgctatagtttttgggcttgggttcatcctgttacgggaaacggcggttacggagaggccccgctttttcttgcggaacaaaaagtcatgaccggtacagcacaccacgaaccaaggaagcgtgcaaagaccagagggggtcaagaagtggtcttgcatgacgacaattaccgctaccgcgcgttgtttgacaggatgacggaagggtttgcgctgcacgaaatcgttacggatgcgcaaggcaagccctgcgactatgtttttctcgatatcaacccggcattcgaagtcctcacggggctgaagcgcgaagatgtgatagggcgccgcgttaaggaagtgctgccaacggtcgagccgtactgggtggagcattttgggcaggtggcactcaccggcacgcccgcccgttttgagaattacgccgcgcctttgggccgctggtacgaggtttatgcgtacagccctgcgccgcggcaggtcgcggtcgtcttcctggatgtaaccaggcgcaagcaggctgaggaagtcttgcagcgatacgaactgctggcggcgaacagccgtgacattattctatttatgcggcgggacgacggccgcatcctcgaggccaacgccgccgccatccgcgcctacggctattcgcgcgaggaactgctcgaaatgatggggcgcgacctgtggagcgatcgcgatcgcgatgccgtcgaagcgcaaatggcgaaagccggtgccacgggtatcctcttcgagaccttccacaagcgcaaggacgggtcgatattccccgtggaagtcagttcgcacggcgaaataattgccgggattcgcatccgcgacatcaccgaacgtcaggaagccgaaaaagccctccgcgaaagccaaaccgacctcaagcacgcgcaggctgttgcccatacaggcagttggcgcctcaacgtccaacacaaccgattgtcgtggtcggacgagacgtacaggatgttcggcattgccacgggcacccccttgacctatgagacgttcctggatgccgtacaccccgatgatcggcagtacgtcgacgaaaactggatggcagccatccggggggaaacagcgtacgatatcgagcaccggattgtggtcggcggggccgtgaagtgggtccgggagcgggccgaactcgaggtcggtccagaaggcgagttgttaggggggtttgggacagtccaagacgtcaccgaacgcaagcaggcggcagaggcgttgcgcgaagccaatgaaaacctcgaaacccgcgtcagcgaacgaacggctgaactcgaactggccaacgtcacgctcgagcgggaaatggccgagcgccggcgcgcggaaggagccgtgctggccgagcggcaattattctacgacgttctggagacgctgccggtttacgttgtcctgttgactcccgactaccgggtcagtttcgcgaaccgcgtattccgagagcgtttcgggcagtccgaaaagcgctgttacgaacacctgtttgggcgcagcgagccgtgcgaaatctgcgaagcctatggcgtcctccagacgatggcgccccatgactgggaatgggtcgggcccgatgcacgcacctaccaggtctttgactttcctttcaccgacaccacgggcgctgttcttattctggaaatgggcatcgacatcaccgaacgcaagaggtcggaagacgaagtccgtcactaccaggaacatctcgaacaggaggttcgccagcgcaccgccgaggtggaaaacaggaacatccaactggccgccgagatcgcggaacgtaaacgcgccgaggatgccctccgccaaaacgaagccgtcctgatgcggtccaacgaggacctcgaacagtttgcctatgtcgcgtcgcacgatctgcaggagccgttgcgccagatcggcgggtttgtccaactcctgcggcgggattatgcccccttgttcgacgccaccgccggcgagtactttgcctttgtcacggatgccgccttacggatgcaattgctcatccagggcctgctcgattactcgagggttggacgaagcggcgtggtcgcctccaaggtgagcctcgagaaggccgcacggaccgccatgatcaatctggccgcccgaatcagcgaaaccggcgcaaaaatcactctcggcgaattgccctccgttcccggcaactccacactcctcacccaagtcttccaaaacttgattggaaacagcctcaaattccgcgccgaacgccccttggacatccagatcggatcccggatcgacggcaacgagtggcaggtttgggtaaaagacaacgggatcggattccaacaggagtacgccgagagaatcttccaggtgtttcagcgcctgcacgggcgcggggagtatccgggcaccggaatcgggttggccatctgcaaacgggccgtcgaacagcacggcggccgtatctgggccgaatccacacccggcgtaggcgctaccttctacttcacgctgcccgccggttgagcagggaaaacgacggcatatccgccgccccgtaagacttaaactgaagttccagagccagatcgaatgcacgttttatcctgcatgggaaataaccttgtattcaaatgcaggtttactgggaacaggcgtttctatccacacttgagtccgagcaggtcgaagatgtggcgctggaaatcggtgggttccgtgaatgtggtaaaccgtgcggcgtttttcccttggccgactcggcagatgtttttgcagcgcgtggcgagtgcatccatcagggtctgtaagctgtggacgggccacccgtcttgagtctgcttggttcgcttttcccgttgtacggcctcgccgggctgaggcttggcgacggggtcgcgggtccagcgagcggcgtgaagttcttcgtcttggaacagaacgggcgcgagtttcctgcgcaactcccattcgacgtagtaagccagcatgcagagaaagacgtgggctttcacgtggtccacggtgcggtggtggatgggccggatgcggatatcgaggcgcttgatgcaccggaacgcctgctcgacttgccccaggctcttgtacgcacgaacggtgtcttcggcgctgagctcttgtttcgactcgctcgtgcggataatgtagatgccgtcgagccgctcttcgtgctggatgcgtttggcgttgcgggcgaacgcgaaatggccgtcttgtatgtcgagcacgaagtgtttgccggccttgaagtggttgagaaccttgccgactttcaggccgatctcggtggccttaagcggtttgttggtgcgccgcttccgtttgaccatgaggtgttgttcgagtcggtcaagaagactgccaagctcatcctggccagcgacgcctgtgaacgcggaagttatctccacaccatcgcggggcagatcgcgcagatcgcgttcgaccaccttgacgcgcctgtatgcgttgtcggggccaacaacgggatcgtgccgccggccgagttggaaaaagagtacttcccgcagccggcctggctcctcgacgcgtatcacgcacaaataaagcctctacccggttaccagccttcgacagagcgcacggccgcagagtttgtgcggcagtccaagtacggcgtgctgtaacggaaattgaaaaccacaaagaacgcaaagagcacggcgcggcatagccgcaaccaaaaggcgcccgaacgtgtcattccgaggagcgctggcacatggcctctattcttaattcaaaagcctgagtccagcgcgacgtgggaatccccccggtatttttcccgacatcggtatgggaggagcgcttttattcggttttgggatagcttctagttgcatgggcgcattgttcacacaacaacacgcctataaccatgcaacaaaccaatgtttacgccccctcacacactacaagaaatgaaaccagcctctggaacttcgggctaatgaaatggacttcagaatacccacaaggcatggcgctgtgtggagcgcggcagcttgctgccgctttttcggcagggaggccttgcctgacaagtgcgacattgttcgcgaggaaagccttgcactataaaaagcggtggcaaacgcgctaagagcgtccacactccatacgtcaccgtatttacgaatagacgtactaagccgcgccaaatatgtcgggccccatatcgcatccggtatgcgtagggacgtaatcgagactcttgccacgggtccctactggatccgcaggttgcgattatcaataactctcctggccttgcctgccgatcgttcgagcgtctgtgggggcacaagttcaaccgtagcgcggatattcgtgatggcctggattttccggtcgatacggtcccgcagggcctgcatctggctcattttgtctgaaaacatctcggggcggacctcgactttaacggtcatttggtcgagcgcacccggacggtcaatttctataacatagtgcggcgcaataccttccacctgtagcagcgcctcctcgatttgcgacggaaacacgttgacgccccggattatcagcatgtcgtccgtccggccggcgactcggctcatccggacggtcgtccgcccgcaggggcacggctggctgtccagggcggcaatgtcgcgggtgcggtaacgcaaaatgggcatagcctgtttggtcaacgtcgtaaaaaccaactccccgtactcgccatccgccacaggctcgagcgtggtggggtcaacgcactcaacgatgaagtgatcttcctggatgtgcatgccgtcgcgtttgtagcactcgccgctgacgcccggcccgataacttcgcttaacccgtagttgttaaacgcatagacatcaagctcatcttcgattttgcggcgcatgtcttcggtccacatctcgccgccgaaatgggcgtacttgaggttaaacttgcgcgggtcaacgccctgggccctggccgcttccgcaatgttgagggcgtagctgggcgtacagaccagcgcgtccgcttccatgtcctcgagcagcatcacctgacgcggcgtattgcctgaagcgaccggcaaaaccgccgcccccactttttccaccccgtagtggaggccaaacccgcccgtgaaaagcccgtagccaaatgcaatatgcacggtgtggtgcgaccgcagcccgcccgcgtagagaaaccgggcgcagaggttggcccacgtatcgaggtcttcgcgcgtatacgcgacgaacgtgggcttgccggtggtcccggacgagccgtggaatcgggctacctgctcgcgcggcaccgccagaaaccccagcgggtattgccggcggaggtcttctttgatcgtaaacggaatccgccgcaggtcgtccagcgaacgaagatactccgccgagatcttttcgcgcgcaagcgattcccggtaaaaggggacgctgccgactcgccgtaccacgtccctgagccgatcgagttgcagatcctgcaactgcggccgatcaagcgtctcttcaggggaccagaccccgttttccaaggcaaaatccggcattacgcacctactatgcctgtgttccgcaccgcctgatcccggctaccgttcggcccgttcgtaaagctcgacgccgcccacaacattgatattcttggccttgagcagttcgatcgcggtatccgggttgtcgaaccggaacaccagcaccgctttatccccgctacggacggtgaaggcgtacatgtattcgatgttgacgcccccgccttccatgatggccaggacgttggcgaggccgccgggtttgtcggccacttcggtagccacaacctccgtcacgttcaccacgaacccggccttctcaaacacctctttcgctttcatccagtcgcggacgatcagccgcatgatgccgaactgctgggtgtcggccagcgacaacgtcagaatgttgatgcccgcatccgccaggactcggcacggctcgctcagccgccccggcttgttctccaaaaacaacgacaattggtgtattttcattgccgaaatcccttcctctttgccaacggcttacattttgcgccggtcaatcacgcgtttggctttcccctggcttcgctcgatcgtgtgaggctggaccaggctcagtttcactcgaatgcccaaaatgtgggctatttcatccgacaactttttgcggacagtttccatggcgccgatcgtgtcgccgaacacgtcggcggtaacctcgacctggacctccatgttgtcgagccctttttcccgctccagaatgatctgataatggggcagggtgccttccactttgagcagggccgattcaacctgcgacgggaacacattcacgccgcggatgatgaacatgtcgtcgctgcgccttccgatacggcgcatcctgcggatggtcctgccgcactcgcacggctcgggcatcagcgaggtgatgtcgcgtgtccggtatcggatcatcggcatggccagcttgctcagcgtcgtgatcaccagctcgccttcctggccgtccggcagcggctcgcacgtctccggatcgatgatctcgcaatagaaatggtcttcaaacaggtgcggccccgcctgctcctggcattccatggcgacgcccggaccgatgatttccgacaggccgtagatgtcgtaggccttgatgtcggcttcgggctcgatccgttcccgcatcgcctgggtccacggttccgcgccgaacacacccgctttgatgggcagtttccgcatgtcaatacccatctcccgagaccgctcgatcaggtggaggaaataactcggggtgcagcagatggcggtcacgccgaaatcctgcatgatcatgatctgacgatccgagttgccgcccgagatcggaatcacagtcgccccgagcgcctcggccccgtaatgcgcccccaaaccgcccgtaaaaagcccgtagccgtatgcgttctggatgatgtcgccctgcccaagcccgcacgccgcaaacgaacgtaccatcacgctcgaccacacgtcgatgtcgtcctgggtgtaggcgacgacgatcggtttgccggttgtcccgctggatgcgtgcagccgcacaatctcgctcatggggctggcgaacaggccgaacggataggtgtcgcgcaggtccgttttcaccgtgaacgggaggttgtggatgtcttcgagcttctgtaggtcctgtggtttcacacccttggcgtccagccgttcgcggaacagcgcctggtggtcgtacgcccgcttcacgatcgtcttaagccggtgcaattgcagcgcccgcaactggaccaccggcagataatccggtgcactcaccggattaaacgaacttccagcgtcatgcctgaatgcgttcacatcgtccctcccggggtttggctctcaagccgaatatagccaaaaaacaatcaacaaacaaaccaattataggtcctataagtcgtataggtcctattcgcccaaacccaacaaattcgtgtccaactcgactttaaaaccgcccacacttacacgactctaaccaaaaccactcttatccgtcaacccggccgaaaacgtccaggtgccggtccgtaaccatctcgacacgcagcccatccaggcccgcacaagccagttgcgcacccacctcgtccggcgtatacgccgacagcaacgagcggtaatattcttcctgcaacagggccgattccgcccccgcgtatcgccggactatctcggaggccgcctgcgccgaccgcggccgggcgagatcgcgcagaaaaatcagcgtccccggaaggcttacgcgcccgacttccccccacagccgccccgtatccgtgatatggtgaaggatgctgttcgagaaaaccacatcgaacgctctggacttaaacggcgccgccttcgcgtcttgctcgaccggccacagggaatcggccgcgccggctttcttgattgcgcttcgcgccaactccagcatcgcgtgcgacacatcccccgccacgatcttccagccgccccggcgccgccaaagccgaagcgggatatcccccgggcccgtccccaaatccagcgccagcgcccgatccaccggccccgcaagctccaccagccgctcgacaaacgcctcattcacatccgcgaaatcggccgccgcataggccgccgcctcttcctccagatccatcgcctcaggctcgggctgtcgttccattgctgctacctatgtaaagagcccatgcaagtccgggctgtattgtggtgcgggcgtctcgcctgcacatataagatttttttggtaaccttgggcagcagtttagcaggcaaggccatgaaaacgcgcgccgccaagatgccacgtgcaggcgggacgcccgcaccacaaatggcatcgaccaaactaacccgccaaagccctccaccgccgccacccggtcgcgcgggacaaactatcagcagaaatcttaggtccttttggtcccttatgtcccttgtcttgacttctcagacagcctggggaagggcgtaacccgcgcctatgccttccgccccacctcgcgcccgtaagcaaacaccgcggcattctgctcgtggagtttttccggcaggttggcataaacggcctcgatccaaacgctctcctcgaggtccaggtgcgtgctcagcacgcccagcagcgccacgttcagattgcggcggttcacgggcgaatcggggtctttgtccaggtcgccgaacgtctggccgtccttgaggaacatctcgggcttaaaaatcaacccgtcgggccgcatcacgtgctgggccgcctcgatctgcgtactgtcgagcgctaccatgaactgcgcctcgcccgacggaaccatcgggctgaacacttctttgccaaaccgcacgtcgctggtcaccgacccgccacgctggctcatcccgtggatttcgcttttcttcacgtcatgcccggaccggaacgccgcttccgccagcatgttggaagccttgataatgccctggccgcccaggccggcgaacaccacgttggtcacctcgtttttttcaggcattggctttctccgtcacggacgcagtccgggctttctgctttttcaccgacagcaggcacgggcgccgcgcgataatcagcgtcagttcctcgctggccaggctctctttgaccagcgcctcaaaacccgccgggtccacccccgtaaacacgtgcacgttcttgatgccaatcgatcgcgccaagtcttcaaagctcagcttgtgggtatcttttttgttgagcctgacgccggtgccggggtggtcctgcaagcccgtcatggcggtggtcccgttgtcgagaatgaggaccacgtggccggtcggcggcggattgtacgccatctcgacgaggcccgtaatgccgccgtgcacgaacgtgctgtccccgatcacgctgaccacccgccgcgcttcgtccggcggcagcacatgtcgcaagcccagcccgttgccgatgctcgcccccatgcacacgcacgaatccatcgcgtcgatcggcggcaggacccccagcgtatagcagccgatgtcgcccatgatgatgcaatcgagcttcttcaacaccgacagcgccgaccggtgcgggcaacccacgcacagttgcggcggcttccccggcggccggatcggctcgggcgattcatcatgcgccaggatccgtctcacccggtccacgttcatctcatcaaaccggtacatctcagccttgccttcgcacgccaccccaatcgcccggcacgcgtccaccagatacgggtcgttctcctcgataaccacgcagcgctcgacgcttttcgcgaactctttgatcatggtgtacggcagcgggtacgtcatgcccagcttcaggaagctgccggccggcgccgcttcccgcgcgtgaacgtaacacacgcccgccgtgatgatgcccagcttcttgctgccgtcgaaccgccggtggagcggcatcgtctcgccccacgcgtagatttcctcgagcttcgcacgcaggcgccggtgtgcgggccgcgcaaaccccgggatcatcacgcggccccggatatcgtgctcgaaatgcgccgccagcggctcgagccggtttgcccgcggcgtcaccaccgtctgcgaatggcaaacacgcgtcgtcatccgcagcatcaccggaagtttccaccgctccgaaatctcgaacgccgcgaacaggaactcatacgcctcctgcgagtccgacggctcgatcatcggcatgcccgcagcgactgcgtaccgccggttgtcctgctcgttctggctcgaggccatccccgggtcgtccgccgataccagcaccagacccccgctgacccccgtgtaggtcgacgtgaacaccgggtccgccgctacgttcacccccacgtgtttcatgcaagccagcgcacgcgcaccgccgaacgccgcgcccagcgccacttcatacgccaccttctcattgggcgcccattgggccggcccgcccaaagccgccagactctcgagaatctccgtggacggcgtgccgggatatgccgaagccaaagcgacccccgcgtcccgggcggcaagcgccaccgcctcattcccgctcaacaacattcggttcttaccacttgtgtcggtcataatatgtcctgcgctgttttgtagcaccgctgaaaagaaaaaaagacacccaccgcaacctaccaaaattccggcggtcaatcaaatcacccttaaattatgcctgctcgaacccgttcccgcaacggcccccgttttatttttcacagccatcgggacgcctcaacctttcggggccggggccgtatgtgctactcttataactggaaacgtctacgataaggagccgcagcatgggcctgtaccgatttcaagtcattatcgagcaagatgaagacggctactacgttgccgatgttcccgctttgcgcggttgccacactcagggcaagacgttcgaagaggcgatgacgaatatccgtgaagtcatcgagatgtgcgtgcgcgagatgcgcgaagacggcctcgagattgaaacgcagtatccggaagtgatcggcataaagaccgttgagatagcggtgtaagcacccatggcccacgaccttccgatgctgagggtaaaagaactcgtcgcagtattggaacgtttgggctttcagcctcgaccgttgggggcaaccagtcaccgccgctatgtccatcccgatgggcgcagaactaccgtcccatttcatgctggacaagacatagggcgcgggttgctgcgaaagatcttgaaggatatcgaaataacaccggaagagtttaaacgtctcttataggcgcagcgtccgaacaaggtgttctccatgcctcgaaacactgaaaaacaaattattgagatgctgaagaaccttgcgcaacggcttgggcagaaaagcctatcgaagaaagacatcgcttcggtaatggctgtgtctactttgaagtatcgatttgggaatattggaaatgcattggaggcagcaggccttgatcgagtggctccaggggagcatttaagaaaccgaggccctgttctaacggagcgcgcccttttcttagcgttgtatgaccttgaaaagaaaattggtcacgagcccggctacaatgattgttctgcccagtgcaaatattctacaaagccctacttcaaacgatttgggaaatgggccgatgtccttgcgcattaccggaaatggaaatcggagaacagccacatgatcgtctcaacccctgaaggcgaacgagtcgtcgaagaaggcagcgaaggacaggagagctccggaactcaacgtatgatttccatcggtacgacaagaaagaagacaccggaacaactatacggcgaacccattgattttcgaggtttgcgacacgcccccatcaatgaacaaggcgttgtattcctctttgcgatggtgagccgggaactgggttttaatgtcgaatcggtgcaacaaggttttccggattgcgagggaaaatatctgtttgattctaagaaaaacctttgggctaaggctcgcatagagtttgagtgccaagcgtcgaattttgagcaacacggacacgatcctaatcaatgcgatttcattgtttgctgggcaaatgattggccgggctgccccatcaaggttattgagttgaaaaacgaaatcctgaaactgccttcccgctaaatgaggatccgcgccgcgctagtccctacccgtccctgcctggtttgacgcagccagattcaccggggtactgttcttttgtgagcgaacttgcgttcaaatatgtcttcggtcccgcgctatcgcgccggcttgggcgttcgctcgggattgacgttgtcccgttcaagacctgcacctacgactgcgtctactgccaactcggccctaccaccgtccacacgctcgaacgcgtccgtttatctgggccttgcccggtcggccaaggagtgcaactattcttggccgacttccagatgcggatcctgtcgtagcgcttcaagtcataagacacggtggaaactcaggggaaaataggcgcccgcatttttggttgacacaaaataggcaatcgtatatatttgacgccgtcgcgggtgctagcgtgcttgaacagcaaggagcaggatgtgtcgagagagaaacgtcaagacaaaccggctggacgacctgtgctggagaagctgccaagcgcggaattggaagtgctggcttccctctggcaacaggggaaggccacagcccgcgagatccgcgaggcgatgcagggctaccggcccatgacgcacgggtcgatggtctcgctgctcaaacgcctggaaggcaagaacctcgtgtcgaaagagaaggggccggtgggaaaggcattcgtgtattgccctacccggccacctgagccgacgtatagacgaatcatgcgggacctatacgagcgtgtcttcggcgggagtggcgttgccatggtggcgtcgctcttcgagtcgcgcccgcctacgtccgaggaactggatgcgcttgaaaggctgctacgaaagttgcgggagaaacacaccggggagaactgaataccatgcagttgctgcattcaatcgagacgttttcagaggtcgtctggccctacgtcttccatgccacctggcagtcgatgctggccggtgcgctcatcctcggcatcgtatggctgctgcggaatcggtccgcgtcgctgcgctacgccttgttgatccttgcactggtgaagttcgccgtaccgccgcttgtggccgtcccgattgacctatcgcattggacacctgcagaggtaccggtgcgggaggccgtcgcgcctctgccgaaggagtcctcccaggtccctgtcatcgacgtgagcgctgtacctgtcgaggagcctcggccaccttcgtacgttggttcttcgcaagcgcctccagaacaaccacagactccaatgccgccgatgctgccggcggcgcctcagcaccacatggcctggcacacgagaatcttggcactgcacctggcgggggcgtttgtcgcgtgcctttggatcctcggctggacgtggcggatttgggcaatgaggagacgcgcccggatggtcaccgcaggaccattgtacgaacagttcctgagcctctgtgcggaattggacctcagccagcgcgtggacctcttcatttccgaggacaaaacgtcccccatagcgttcggtttgttccgccctaaggtcctcatgcccgcctccataatggacgaactctccacggaccaactcggcagcatcctggcccacgaactcgcccacctccgtcggtgggacctttgggttatcgtgttcgagaatctgcttctgctcttgtggtggttcaaccccgtcttctggctcgttatgcgcgcactccgccggacacgcgaggactgctgcgacgatttgatcctccatctgcgcctcgcggaaaacaccgcctactgcgaaagccttgtccgcgccgcctcgagcatcgcaggtttcggcaggctccgccccgccgtcggaaccgccgagatgctccaccccctcggtcgccgcatgaagcgcatcatggacgtgaccctccgccgttcgcccagactctccattgccggcgccatcgccgtcgtactgctgggactggccgtcctcccgggactccgccccgtcgaagcagaacacgacgcaacggggacgaaccgccgcggcgcggagacggttgttcctgaagggtatgagtatctcatgcctcaactcgagccgggtccctaccggttgcacggaacggtccgcgaccaaaacggcgcaccggcggccggggtcaaggtggcggtattccgcggggaagcgtggcagtggggttacaaggacacctttacggccgatgacgggacgtacgagatcaccggcctgcccgatggggcgtacaacgtgtttgcggtcaccgccgacgcgttcggggccgctccccttacgctgggaagtcctcttttgccagacgaaaacgtgtcgcgagacttaaccctcacgccgttcgaccccgacccgctcgaaggaaccgttttaagcaagacgggtgaacccgttcctggcacgctggttctttctatccgcgaatggagttcctacggcatgagtctggccctgcagataagaacagaccagaagggccgattcgcgatcccgagatggacatggccatacggccggggatcgcaaattctgttaccgccgaccctcgcggcgtttgctgagcggcaggaccccggcgtactcctgggtaaactgccggaaggcgagccgctcacgctcgttctcgatgacggcgtccgcgtttccggcacggtctgtttcaaggattccgggaaaccggctcgcggcattcccgtgatgttacgcggcacgcccgcggacaacgacatgcccgacatcactacgcgcaccgatgaatccgggcgctttgttttcgagcgtctctgtccttttcagtatcaactcgtcatctatgatgccgaggcgggctacacggcgctggagcatccccggctgaaccttctcgacggccaggatgttgtcggcctcgacatgcagatctcgcacggcgcaacaatctcgggaaaagtgacgtttcaagaaacgggcgagccgatacccgcagtccggctgtgggtgccgaacgtccgcccgcctacggtgttgcgagaggcggtcaccggatccgatgggacttaccggctgcagcatttgcctgcaggggaattcgccgtggcctacgccgtcccggatggcgtcgtgcgagagcctcgtccctcggacattggacccttggtggcgaagactgtctctgttggcccggacgagcagttgacggacgtggacttcaccttcgaacgcggcgcgtgcgtgtcgggccgcgtcgtcgatcaagcaggcgatcccgtcaagggtgcgcgcctgcacgcttcgaatagccatcgtaaccaactgcggcccagtcgccgcctcactacgtccgaaacggtgaccgcggaggacggggcctattgcctctggggcctggcgccttccgaggaatggacctatcagttagtcgtaagtgcggacggatatggacggattgagtctgatccattccaagtgacgggcgagattgatggcaaggacttcgtggtccagaggtgcgcgacgatctcgggccgcgtcgtggacagccagggtcgccccgtccccaccgttgccgtaagcatgaagattaccgaaggtcgtgcgtcacagcggttacccgacgctctcagcgacgttgaagggcgctttgcgatgcgggagggcgcctgtcccgggacctacacgttcgagctgtgtaccttgaatatggggttcggtccgtatcggacggtggatgcggcgaacccgccgcttcgagtcgaaggcccggatgacatcgaagggatcgaactcgtgttgcccgacgaaaaagccccgcacgatgccacgcctgcaaagccggatgctgcaccgaaggatactgccgcgaaggcgccggaaatgggtttctccgatggtgtggaacctattcccgccatagacgaacttcccggaaggctcgtgttccacggccgctatgttcaccggagccgcggccgcgagtacgaccagccctcgtctttgtgggtcaaagagcaggaaaacggggctgtcagcgccctatcgcatttgaccttcttcaacgaaacagccttggccgtgggtgatgagaatcaccggcccgcccactacgccgcgacccgcaaggcatcggaccgctatcccgcgttccaggcaaggattgacttccatgccaacaaggcggtccagatccgtcattggggtgaggagaccgacgataaggaattccctatcgacgagggcgccctgttctccctgaactcgcggcccgacccatacgcggttatcaacgttctcatacgcgggttcgggctgaaggcaggcgagggcaaggagttcatcatgtgcgattggggcaacgggccgcatggccaaggcacgtttccctcgtaccgtgtgcgcgtcgaaaacaagggcaaagaggagattgtagtcccggccggggcgttcaataccaaccacctcgtccttacgcaactcaccagcgccgacacgtggttcaagaagcgcgccggccatgtcacggacctttgggttctggacaatcacatcgtcgtgcgcatcgtccgtcaccgggaaccctacgaggtggaactcctcgactacgacgtcccggaccgtttgccgggccagatttcgcgtggtgtcccggaaggagcgcccttggaagtcctctccgcagagtacggtgcgcaggacaagtgggtcgacgtgaccgagccgttgaagcaacgcatccaaggaaacaaactgaccgtcagtagattcaatgaccttgccggcgatcccatcgacggtgtggtaaaggagttgaaggtaaagtaccgcgtgggggaccaaacccgcgtcaccacagtccgcgagggcgaaaccctcgagttggacatcgacctgagctccggggcaaccccggcgggggccgctgcggaataggggccaccggaagacaacgttacagcctggaaggagacgaaatatgaaacaggtgctgattggcgtgggcgtgctgcttgcggctttgttggtgatccctgtgatcgcgtacatgatgtcggggggcaagctggagccgagtattggtgacgccgcggttgcctcgtcgttctccgcacaattggtggatacaaacggaaaacccttcgcggatgcccgcgtctatcttcatcctgccatcggccatccggacaagcggggacaggaccgcgccagcatgcccatgcagaatacggaaaccgatggcgagggcaagttctccttcagcagcgtcagtccgggcacctacaccttgcagttctattggaaggacggaggggacaagggaaacctctacctcgacgcgcagaagttctggctggatgtctcgccgggggccgccgcctccgaactcaccattgtcgtgccatcgctggcggcccactcggtgggcggctacgtgcgggatgcgcaagcccgtcccgtcgccggcgtggcggtggaagccatgggcctcgcggactactcccgatcatcgaccaccaccgacagcgagggacactacttgataagaggcatcgcgggggatgtagcgggtgcgatctggttcaagggcgccgggaaagcggaactcaaggatatcggcatcggcacaaccgacgcaaacgttacgttgcgttagcctgcgaggacgggtggaccacgaaacacgccgaagccggccgacgttctctcttgtcgcggtccgccgtcctttcttttgacaccgctcggggccgtagggtacggtcttccctaccaggctgatctcgtcagggcccgacttccagcggatcgtttggtctatcatgtctccgtagatctcagggcagtcgttcaacgagtatccgtcgaccggtgttccgtcgatatcttcgagttcgacacgcgcgcttcccgctgcgggcgtggcgtagttgaggaccagtttttcccctttgaaccgaatcggcttcgtgacgaactcaccgcccccgagcggcgcatgcatcaaaacgaacgcatcgacgcgaaaggtgtaccgtcgcatgcaattccccgcgattacgctggtgtgcaacaaaagggtaaagactcagagtatggcgactcctgctgagtttgacttgcgccctgcccaacgggcatcgttgaaactacggcgcggaaaatctgttgggtacccgaatgtttggtgttggccgcggccctgattctgggcgcggcgcatgccacgccgataggggacgacgatggcggcactaccgtgatccgcttctcctattggggaaacatagccgatgacgccattttccgcgaagtcgcggaatcctttgagaaaagtcatcccaaagtccgtatcaagttcgagtgggtcgtcggcgactacgggatgaaactgcccctcctgctggtcagccagacggccgccgaccaggtgccgcgcgacgaagcccaagaattgcgcaagaccaatcccgaactgctcaaaaagacccgctacatttggctgaagaaccccgagaacctcaccgacaagcaacgcgcgcgacttgggcatttggagcagttgaacctgcgcagcaaccgcgcctatcttctcaaagaaagcttccgtgaattctgggactatgacagcaaagacggcgcccgccgctttctcaagaagtggttctggtgggcgacacactcccggctcaagcccatgcgcgactttgcctggacgatgaagaaccacctcgacgacctcctcaactactttgagatgcgcatcgacaaccgcgccgtcgaaggcatgaacaacaaggccaaagtcgtcagccaccgatgctacgggttccgtaccgccccccattacatcaccgccctatatcattgcctgggcgacctgccggagcccaaactcgtgcacaaattcttgtgaggaacctctttttctttgcccagcagtacttcgtgaagggcatcgtactcacagggattaagggctgaatattccaaaccttgtggccgtcgggcgcgattctctttgcgcaatgattccatgaacagcatgcccttaagagaagtctgtaatgtcatccgttctcgggccaccattgaagattcctgctgcatatgcctctccggctttttcgaatggtctttgaggtcgtgaatgggcagcgcgcgggggtagtatgtgcctggccaaccagtcgatctcctgtctgcccgtgtggttctccatcccaccagaccaagacgaagacggttactacgtcgcggatgttcccgcgttccgcggttgccacacccagggcagaacgttcgaggacggaggcaatgaccagccagcatccgcgaagtcatcgagatgtgcgtgcgcgagatgcgcgaaaacggcctcgatactaaaacccagtatccggaagtaataggcatcaaaaccgtcgaaatagccggggaagctcccatgggccacgaccttccgatcctgacggcaaaaaaacaactacgcctcctctttcgagacgcgcctgtaggtccaaaatcatttgacctgctattgccggcgattcgggtccacgattcgggtccacgcttgacgcacccgctctcccgcaggtactgtaaatctatggctcagaaatacgtattcggccccgccctttcccgccggctggggcgctcgctcgggattgacgtcgtcccgttcaagacctgcacctacgactgcgtctactgccaactcggacctactactgtccatacgctcgaacgcaagccctacgtgccactcgacgaggtactcgacgaactccggagcaagctcgaaaccggcgtcctacccgattacgtcacgatcggcgggtccggcgaacccaccctctattccgagatcggcccgctcatcaccggcatcaaatccctcacgccaacgcccgtagccgtcctcaccaacgggtcgctcctgtgggacccggaggtccgcgacgcactgaacctcgccaacgtcgtcctgccctccctcgacgcctctgacgcgcagacgttcctcgccgtcaaccagccgatagccgccattacgtatgagagaatgatcgcgggcctggaatccttccgcgagacttactccggccaaatctggctcgaaatctttctcaccgcccccatcgaacctcaaagccccgccatagaccgattcatcgactgtatcggccgcatccggcccgacaaaatccacctcaacaccctcgcccgacccgcaccaggctcgaccgccgttcccgtcgcccccaacatcatgcaaaagatcgcacgccgcatcgggcccaacgccgaagtcatcgccaactttccgaatattgtggcgcaggcgtctcgcctgcacgtctccgaagacgaaatcctcgccctcgtgcgccgacacccctgctcactccaagatatcgccgccggcctgtcaatccccgttctcgaagccatgaaacacgtcgagcacctgctccaacaaggcaaactcaccgccgaataccgaaacaacgtcgccttttacctcgccgccaaccgcaattgaaccaacgcgcgggcgaggcgttcttccgcagtcaatttaacccgctgctgctcgctgcattgccccatcgcacggacatccggccgttgccgccgtcgactacggttaggaaccgcgttgtgtcaccatccgtcagcggttcaaaaggttgtgaagcggcatcgtcgcggggcggcagcgcgaactccgtgtccggaatcggctcgttcatgccctcgtaggcaaacgtatacaggctgcgcatgcatagttgattgacggcaacctgaacgggcatcaactggtgcgagtcgatccaccatcgaatgatcctggcctccgtccagtcgccgggaaggtcggctgtagtcgacttaatcacgtgggcttggcggccgttaaaactgaccatcccttcgtattcgagatgcagttccgcagtagccgcgtctacgtcatgaccttcaaggtcaaagggatcgcatatcaagatgtttttcttgccgattgtgtcgtgcggcgcagcctgcacggattcctctgtctgcccattcttatcggtggtggtacacagccaccagcactggtccccatccccggctacaacgaacctgtttgtggataggttcacgtcgccgtagaactggcgattcccctgaaacctgaacgtgccgccatcggctttaataaacggcgccaattcgacgggcacgacgccaaacgcgtacgttaccatgacatgctcggacacagacgtcagatgctgccgcgcctggcgcatctcgctcagcaccgtgagcaaccggggatctttcgccgcctttttgaaccgttcgagtgagctctcggaaaacggttcgcgcgttgtggacaggtgcagcgggaccggcgcggctgccgccccctcgaccgtgcgaaacccccgaagttcgatatccccctgccaatcaggcggaaacgataccggcaagagaaaccgctttccacgctcgtcatactgcacgtccgccagcagttgtgcgccgcccatcaaggatctgtccttgctcaagtcaacaatgtaacccgcggacggatccatcggctggtcaaaaaccacctctatgaacgtaagacacgcaaccgtgtcacccggcgcgggcgagagcgatgcgacgcgcggttcaggggcgtccgcccggctcggtacagccgccgtctcaaagccccaacggtactgcgcggccttcacgccatccgcggaaaggaatccgtcgtcatcactgttaacggcaatgaattgttgttcacccggcgttaaccgtacgggaaccacgaactcgtacgactcggcatcgtactgtgccgccgaaaagtctctcaggccgcccttctcgaaggcaatccccattctgtccggatccataggccggtcaaattggatcctcagttccgtttgcacggccacattcttggctgcgtgcgccgggaagacaccgaccacaaccggctggccttcagcggacgcctgggcgggctcctgttttgggagggccgtcttgagtgcggccaattcctcctcactcggcatctcgacgagggccggcgaaaacgccgccgtcgagacgttcgtgacataaatgcgtttggatggcttgccttcttgcaggttgaggccctcgcgcagaatccacgcgtcatcctttttttggaactcggcccttaatacccactcccggtcgtccaacagcgtactgtggtaggccagaaccttgggcgcggattggcttccgaaggccaggaattccgggccaatttcgatcagttctcttctctcgccaccatcgggtagttgcgcgaagtcctcctcgagcacgggcacaaattccggcgtctgaatgtgcagtcgcacccggctgacggggtacgagctttttccgaaccatgttccgcccaggccgaatcccactgccgcgccagtcttctccggttccgcctcaatcactacgatgttttcagaaggcgcatcggtcgactcgacaatgcgcgcattctccggcaggccgcgcctggcaaatgcgtggagcgccgtgtgccacatcaatccctgccggtacgtcgacgcgttctccatcggcatgggactccgctggagaaggccgtagggctgcaaatagaccgcattctggctgtcaaacaccatctggctgccctcagtctcccagcggcctttatcgccgtcaatccaaacgcggtgcaccaactcgggcgtgtttcccggctcgggcccccccatgtttagcgtgtatcgcagatacgttggtcgcgggtcgagccacacgcggtttacctcaaccacctttctccagacatctttgggatcggacaggtccaccggtttctcaacggcttccgtggaggcgtcggccgattccgcagccgcagccgcgacgtcggcaactgtctcggttacagtggctgcagccggcgggacggcggccaagtccgcggtgctcgtaacaacagccggaatcggtttctcaagtgcctccatcggtccgatggctagtgtgaccacaagtccagcgacaagaagtattggaaccgcgataagtttgtgcgctatgacgagttctcccagttgtcttgccggatacagaatacgtgtcagactggctgtctccgtcagaccccacgaaaccggcgccacaacaatcgctttcatgaccgtcgagaccttttcctgggacaccctgtaccggcccgcctcgacgcgtttgagcatgcgctcgccgagggcttcccgcgcccgttgcagtcgttttgccaaagcgagacgactcacgccgagcaaggattccatctccgtgagggaacgcccggcaaagtaatgcatcaatagcacttcgcgatggttctcgccgagtttcagaagctcctcgtgcaacagcccgtccaattcagccgcctccccactcgcagatggctcgacagccaacggcggcgttgcttcatgcagggacgcttcgcgccctcgccgggccaacaaggtgttacacacgttccgtgcgattgtcagcagccacgccccgaacttctctttaacgcgaagccggtcaagagactgaaaggcccgcaggaacgtctcctgaaccacgtcctccgtatctgacacatttcggagccgggccatagctgtggcctgaacaacgggcatatatcgctcgaccagttccccgaagcgctcccgctcaccggaaaggacgtcctgtatcgcctgtttatccaatatgacttctcgcccgagcattgtttgttctcctgtagctcatataatagaccgataagcgtcattttgttgacatcttgtgtaaacgccggtcgagaaattaaacacccttgctagcctcacgtttttcgaggtacggcgccttggagtcgtcggcggactactgcttgaacgcgcgtggggctcagcttttccctaaagcgcaaagggctgtccgtatgggcaacacgcagtcgggtggtcatggcacgtaatgcttggcatgacagtatgttgcataaccattgacgatcttcagaggttcttggaagggcagaataaggccctgcataaatcggatgcaagatgagaatcggtacgcgagcaaggatgtggaaatgtatccgggcggctggatcggccttacccggggaggcttccactatgtcatccgaacatctttcctctcaatcattattcagcgcctggttagctgaccatacgggcgtaggttgctctgacttgtctgcaacgatcgcataacgaattccggggctactctctctatttttgggtcccatccttactcgcggaatcaagagcatacagacaaataaaaacccggcctccagttctgttgaaatcctgtcataatcatttcgcatcctgaccttgatttccgtacgcgccagtttccgtctacttctccaccggcaactcgggacgtgcagcccattcggtccagccagcgtcgtagtacaagacatccttgtaaccaagcaaccgtttcaagacaaagaatgtctggctcgcctggtggccggtgcggcaatggacaatcacggttgcatcttttgacggaacaatggctgcataggccgccgaaagatcggcaaccggtttgaacgtcagcactccttcgttcttcaccacgtcttcggtgtagggccggttaatggcgccggggatgtggccggcgcgggcctcgtcagacttggcgccgctgaagtattcagggggacgcacatcgatgatgatggcggatttatcctgctggtgcttgagcacagtcgcggcatcaacagtgaacgtatctgcccccggcatgggcttatactccgactcctgtaccgacggcagcacggtatccataggtcgcttttcggcggcccatttcccaaacccgccgttgagcaccgcgtagcggagatggccgagccgttcgagccccatgcagggcaaggtggcgtcatgcgccttatcgctgtagataaaaacgagcagattgtccggcgttatgcccatcaaggacaagtggcgcgccagcaggtccgccggcagcaacatcgacggtagtcctttgacgttgccgcggaagctctccacggcaaggctgagtgccccgggaatgtggctggtgttgtattcgggctgcggcctcatgtcgatcacgacaactccggatttcccaaggttgtccgcgagccactgcgtctccaccaggccaggcagtcgttgattgtccatggctacagggggtgccggtgatgctgccggtaccggcgtggcgaccgcccgagttgccgcggccgtcggtgttaccgccgtagccgatcttgccgtaaggaagaagttgcgccatgccgtcaccttcgcagccaacgcttgcgggattggttctccacgcagggacaccggtttcaggcaccgctctatgaagcccttcaaaccgtcggtgagcatatagatgttggcgtatcccattctttccagtgcgtcacgcacctgggcggggtgcgtcatgccgttcgagtagaggacaaccgtcttttgccccttgtgcgccgccaggtactgcggtaactgggcgagaccgacattaaccgctcccggcagatgaaaggccttgtattcgccatcagtccgcacatccatcaggagcaaattgggatcacccgccagcaaccgatccgcaagttcctccggctcgatatgatcgccgccctgctcgacttctttgagcagcgattcctcgccaagagccgattgctcgtgtgtcgccagttgggctaccgcggctgtggcaggggttccggttaccggcaccaggaacagtccggcggcggcaacaacaagtgcaaggctgaaggccttcaggaaaggcgaacggaatagggcgccgcccgtggcgcgcgctttttcgatgtactcggcgccccagaaacagaccacggcggcaagcgtgaaggcgacggcaaacaacggcttggacacgtggagcgtgtcgtaaacgaactgcacgcccctttcgccagaggtatacaaaggtttgaccagccagaaaagttcgttgaacaggacgctgccgccaatcgcaccaacaagaaacaagagagcgtccatcttgcctgcggcgagtcccgcggcggccgtgcccggacaccatccgcccatgacaaagccgacgccgaatatcaagcctcccactatctgggcgccgtagacggtatccataaagaagatgctttctgggcggacccagccaaacgccaggcaataacacaaacccagcatcgcggttatcagcgcggtaaacatgaccttgaggacggtcatgtcgcgaaaatagaaaatgcccgccaatttccgcgaactgctgaaccccgcgcgttcgagtgaaaacccgaagaaataccccaccagtaacgccacgaaaagagccgagctggccccgagggaatccgaaccgtagaatgtctcaatcattccattgcctcctcacgaaccacgcggcggcatagcccccggcaaacaaacacaccataaaaatgaggctgcccgtcagcagcagggccccgcctgtcaaggcttggcctgacgtgcacccttgagccaggcggctggcaaagcccacgaggagacctcccgcgacggctaaaagggctcggcgtcccgccggatacgcagcgcctcgctcgatctggaacgagactcggttggccaggagcgccgagaacaatcctcccaggaagatgcctacgagcataaacacgaggtaatacttcaagggcgagccgctccacgggccaaaatattcgctggaggccacgtggccgggaacaatacatccttcggtaaacgcggcgactcgtgcaattccgccggaagcgcccagcccggctccaagcaacaagaacgaggccaacaacgtgagtcccaacagaatgccggccaaataagggttccaataagggttcacttttgttttctcgtctatcatggttagcaccccgcgcttttcttcttggccggttgaggggcggcgggcgcctgggatgcaggcgcggacgctggcggagccgggggagctgcttgcggcatggaacttcctgccgcagcggcagatgcgcccaaagccacctctttgaccactgggttcagttccgaagccgcccagtatgcttccagtcctccatagagcgcccgaatcggccgcgtcgtcttctgcgagagaatgcccgcagccgccatggccagggaaccgtcccggtctacaatgaccaacggcgtcgtgccattcagatattctgagttggtgataaggtcgccaatatcgacgtttcgcgcccctggaagcgtgtagtcagcaaacatcgcgggcggccggatgtccacgaactcgaaggtcccgggcaaatccacaatcatccgtttcaaatccgaagccgaaatcctttccggcagattgaccgccacccttggcggcggtggcgttgccgatgcggaaaattgagccgtctgcggggccaatgccacgggatatgacgcggccgtgtcgaatgcggttggcagtgccgcatccgtccaggcggtcattccgccgagaagacttgccacattcttgaacccctttcgttccaggacacccaccgccatgctcgagcggtaccccgagttgcagagggtgacgaccggttgcgcggggtcaatctgggccgacagtgtgtcgaggtgttgaagcggcaagttgagtgaggccgcgatacgtcccttggacaattccgccgccagccgcacatccaggattatcggagcgtccgccttctctacctgtgcgttcaggtccgccggtttcacgagcgtattcttcgccaccggctggctggatttcagccaagagtcaatcgagacaacccccgcgtgatacccgaccctgtgcaaccggtagatggcctctttcatctgcggagccgtgccgcacacaaccagtctggcattccaaggcaccatgatgcccacccacgtttccagccgttccgtcagaccaatattgacggaactgggaatgtgcccgatcgcatagtcggcgtcgctccggagatcgaccacgtaggccttggccgggtccgtcaggttcacatcggctggatcttccttcggcatcggcgcgctccaatccaccaggtccggcccgttccggttcaatgccgcatcgtggtggaaatactgcggcgcttcgggcagacctgcgaggtctgccgcaatatactcgttgcggcccttgtgctggaggtagggattcttggcgcgttctgccccgatagtcgatgagggcgcatcgctcaggttggcgccacacaaggatcctgcaccatgcgccggaaatacaaccaccgcgtcaccgagcttggcaagcttgttcacccacgtgtcgaagctcatacccgcgagttccgagcccgtcatcgtcccgcccagaaggtccggtcgtccgatactccccacaaacaacatgtcgccggtcaggaccagttcaggcatatcgggtttgtctttgctgaagacataggccgtcatgctgtccggcgtatgccccggcgtggccacagccttgacggttgcctcgccgatctcaatcacggtcccgtcttcaagaggcttaaacggatattcggcttcgctgatggcgctcgcgtagatggggctgccggtcgccttcgccatttccatatggccagcgacaaaatccgcgtgcgagtgcgtcaggaaagtgcccttgaaactcagcccctccttcttcgcgtagtccagataagcgaatatatcccggccagggtcgaccatcagcgattccttgccgcttaccaccatgtaggaatagtggctcaaaacaggcaacgtaaactgcacaaggttgaatcctggatacttgtagacgtcgacaaccgagtagtgcgtagtatccggttcctgcggcgattcagcccatgcaatccgtggcgctgcaaacataaaaaacagcacagacatcaggacggcgcagacgcatacacatgctttcatgtttgacctccttggaaatcttcgaaaagctcgatattccataacgtgaaccgttgtttcataacacaaattccctgtcgcgtagggtcaaaatatccagccaacgtgtaaccaattctagccaaacgagttgcgcttaagttgtgtgtcggcactgaaccgattgactcggcctcaacatgcgggcatcatgcctcttttccatttggaaaggattgcccgttctcatgccggaattcatcctcaaaccctggcatctaatcgtgttgtttttggctttccatatcaatctggaaacgccggtcgagaagtgcagcaccgtttgtggcggtcgaagttgctgagtgattggctgttgagcacgaggtcccatgcgccatgcacttgccgtatgtgcaataagcattcatctgcttataacgcttaaaactttacattgcagtatcctgcaaaattattgacgctcggcaaaggcccgcgtaaaggcagaataaggccctggcgtgggccgtgcgcaagtagaaaatcggtgtgcgggcatggatttgaaaatgaatatccatttggtccaggaaacctcaaggctcatcatcgcgttcccgaccgtgattgcctctttcttgtgccggcatggtagcatagcgacaagagatctgaggagtcgttccatgttcaagagattgatgctcgccgcattcctcctcgcaaccatcctgacggccgctgtgctcctgcgcgccgtgctggctaagtcgcgacagtttccgcccgagacgcggcaaccaatgacgctgaacgatgaaacagcggcggcccatctctcggaggcgctgcagtgcaagaccgtttcctacatggaccaaactagatttagcggcgatgagtttcgcaaactgcatgcctgcatcaaaaaggcctatcccggtatccatgcccgcatgcagcgcgagttcgtcaaccaatacagcttgatgtacacgtggccaggaaacgaccccacgctcgagcccatccttctcctggctcacctggacgtggtcactgcggaggaaagcccactggcgtggacgcatccgccgttcggcggcgtcattgctgagggctgcgtttggggacgtggcgcactcgatgataaaggacgtctcatggcaattcttgaagccgcagaaacccttgtgcaagccggctacatgccccagcgcactatctatctcgcgttagggcacgatgaagagttgaatggggagcagggcgcagcccacatggcgtcactcctcaagatacgcggggtgcaggcagaattctccgtggatgagggtctcgtgatcacggacggaatcgtacctggcgtcgcaagaccgctcgcgctggtagcccttgccgacaaaggctatgcaagcttcgagcttctcgtcaagcaggagggcggccattcttcccaacccccacccgagacctcgatcgagattctggcggccgcattgactcgcatcaaccgtcacccgatgcccgtgcgttccgagggactgatgggcctcacgttggactacgcgactccggagatgagcctgccgtatcgcgtgcttttctccaatcgctggctgttcggcggactcatcacgcgggagcttgaacaagcgcccgccacgaatgccggcctccgaacgactattaccgccacaatgttcaacgcgggagaaaaggacaatatgctgccgtctaccgcacgggcggtcgttaactgccgacttctccctggagatacaatcgagcgcgtaaggaaccatatccgcgaagtcatgggggatgaccgcatcgagatgaatgtcctgcccggcgcacataacgcatcgcccgtttcagatcatgcggcgcggggctatcaggccattgagaaaagcattcgacacgtgtggcccgcggtcgcggtagcccccagcctcgatatcggcgacaacgattcgaggaactacgctaaagttgccgtaaaccagtaccggttcacccccttttggtttacagaacaagaactggccatgatacacggtgtaaacgagcgcgtcagcatccggcgctatatggaagcgatccagtactatattcagctcatccgctatgcagcaggatgatcattacaggcaacttccgaggaaacgctcgagattcagactggactcagtcttcatacctgaacgataccttgatcctcgctcggtaggcaacgacttggttgttgtcgaccttcatatcgagttgggccacctcagcaatgcgcatctcgcgcaaggttttgcccgccttctcgacggcgttctttgcagcctcttcccatgaattcggcgaggtgccgataatctcgacaactttgtagacgctctcactcatatttactccccttccgtggccgggtcgtgaccggcggctgaaaaccgatactctccatgacctgttccaccagtgtagacttaaaactgacaatcagcaactggtttgtgcaacccaaatccgcaccagccttcagtacgccccgatgcccgggtctccgaacctataggttgaatcgcgtgctcatcaggtagtggatgggctgctcatcattgctgtactcgtggtaggcaacgacgacggtcccatcagccagttgggtcacgctcggatacccgatgtgccaatactgctgcataactaatgcatccagaagagtacgcgaaccgctgcccagcgacggcgccggcacgcccccctccctgatcacgaactctttaccgatctcccaagtccggccgtcttgcgagatgcagccgcgaacaccccacggggccttcctgtagccgtagaccgccagtacgcgtccgtccttcaactgcacgacgtccgccggataaccccagagcgacgttctcttgggcgggctccacgtgactccatcgtcatccgaacacgtgaaccacatgttgtcctgtcgatttggtttgtggtgggtcctcatcaagcacaccagggtgccgtcgctgagccgcgccatccctggctccgagaagctgataatgccggccgcgtcatacgccactgtggaccagtactcccagttgtcaccgccatcatccgatctcaacaagaagcagcggctcggctcggctccgttttcccctttatccgacagtgttccgcccaggggcatgagcaaccccccgtcgggaagttccatgatgtgccccgctcccgacccgccgcaagcgtaccaggacaacgatgagctggcgataggattcgtgttgacctcaatggggtcagtccaggtcacgccgttgtctttggatttaagcagcgcataccccgtttgcctcttgaggcgttcgggcatcccgggaggaggcatttcaagcgattggtcgccttcgtaattgattcccctgggtgcgatgaaattacacacccgagtgtgcatcagaatagtcccgtcggacttctgggaaaaggcacagtcccagttgcccttaaactcggtgtagggccagatgacccgcttggcggcagtgttccaggttctccccccgtccgtcgatttgataaagcaagattggccgctgtcggcatggacgggatatctttcctcgttgaatcccaaaaagagctccccgttttgcagcaggacgatactgacctgattgcatgcatgggccagacttggatccttgtacacgactacatgctcgacatctttaatgcttaccttggtagttgcagtaacatcatttgaatctgccgcgtacgccgacactgtaaagcctgcaagcatcatcaaaaccgccaaaattgccattcttctcacgagacatctcccttccttccgacaagccaacgtttaccatatgttctgcctgcgaccatcgcgggcaagttctccgcgatcatacaggcccggaccgacgccctcaagaccagttcggagggcgttcaaggcccaataacacctttcgcgagcagtcctcagcgctgttcatgcgaattcgcgcagaccgcccaatcattatgagccatttacttgccgtatgtgcgacacgcagcctggtgcttatggcacgtaaagctcagcatgacagtatgttgcaaaacagttgacgctcttcgggcgcttgcgtaaaggcagaataaggccaggacaggggccgcgtacagggcgagaatcgctgcgcgggcatcgctgttgaagaaccggatcaggcgaagcagttcggacaggatgatccggctatcaccatcttggtcggctgtgtagctcgccgggggttcctcatcaccctctggtacaggcctccttcgcccttgtctaactcatgaagacccgtagggaacgggaaaagcccgcattcttgaaaaaaaattcacgcgcggctacgctggtctacgggttaggcctgtcctatcatctgcggaaggagaccggaatgcgcaagacggtccggaacattattcttgtatgggtctttctctcactcgggttgccgttatgggcagacgggatgggctttgatctgagcctgcagcaatacgatccggtcaccggtgagcgaacactggtcacggggaagcttgtcgcgaccaagacggcggtcgtcgtggttgatatgtgggaccaacactggtgcaagacctacaccgcgcgcgtgggcaatctcgtcccgcgcatgaaccagacactcgacgccgcgcggaaacttggcatccccatcgtctttgcgccgtcggacgtggtcgatttctatgcggactatccccagcgcaaggcgatgcaggccgttccgtcatatccgccgccggaaccaaatacattcgagccgccgccccaacccgtgggcaaggaccgatgcgagtgcgggccggatcagccgtgcccgacgggcactcgagtctggacccggcagcacaaggaccttgtcatcgcggagagcgatctcatcgtcgactgcaacaacggccgggagttgctgaatttctgccaggacaaaggcatcgacacacttgtctatatgggcgtggccagcaacatgtgcgtcctctatcgcgagtgcggcatgatcaacatgaaacgccacgggcttaggctatgtttcgtgtcagacctggtccaggccatcacagccaatggcatcgaccccggaagcagggaactggaccggaacttcacgccggcgaagggcagcgccatcatccagcgatatatcgaacaacacatcgcgccgtcgttcgagagccgccagttgttggccgcggccagtatgggaacgcaagaccgccgcccgcacattgtcttcgtactcgccgaacaggaatataaatcggacgcaacgttcccggccttcgttcaacgctatcttggggacgatttccgttgcacgcttctgaccccggaatcccatgtaggcacgggccgcgacaatgtgccgggactcgacgcgttgtacgacgcggatctgctggtgttgagcatgcggcggcgggcattgccggtcgtgcagatggatcatctcgaacggttcatccgcgcgggcaagccgcttgtggcggtgcgcgtcagcaccgtcccgttccagttgagcgaccccgcggaatgccccagcggccacgtggtctggcagaagttcgacgaagaagtgctggggtgccattacaagggctacgattcgcgctcacgcaagacggggtgcgacgtgtggtgcgccgcgcaggcgaaggaccatcccgtcctcaagggactggaaagcgccgcattccatagccccagttggctgtaccggcttaatccattgtcggacaccgccacgctgctgatgcaaggccgctggtcggaagacgccgcgaccgagccggtggcctggacgaacacgtataacggcggccgcgtgttctacacctcgctcggccattgggacgatttcatgaaccccgcgttcaaccaattgctcaagaacgcgatctactgggcgctggataaggacgttccttgaagacgcatttgaccgcttgcggggcgctaccggcttatctacaatcggttcgacagattcgttggggatttccagatacatatggagacaaaggacatggctgacaacaacgccttacttgacaccctcatcgctaaggtgactggcgggaacgacgacgagcggaccgaggcttggttcaacgccggcaaggtcggcgcctccgcggtcaaaccgttggccggggttatctcggcgcacagcggcgaggcggcgctggccgccaagcgggcgctgtggcagatcgcgcgttacgcggctcggcccggcgccgacgccgagcggcaatccgttgtggcggcattggccgccctcttgaacgacgaaacagagtccgttccggcacgtagcgaggcgctctggatcctgtccgagatcggggacgacgcagccgtcgaacccgtggcgagtgtgctcagagacgaggccctccgcgaagacgcgcgcatggcgttggaacgcattcccggcgaccgctcgctggccgcgctcaaggccgcgttcgatgcagcccccgacgccttcaaacccaacatcgcgcagtcgttgcgacaacggggcgtggacgtgcccggtgtgccgtgcgtgagatttgttccgacgaagaagaccgcggttcaacccaagacggagaaatagtctcgacaacttaatgaaggacatgacgtcatgacactcagtaggcgaggatttctggcaagtgcgggtgcagtgttgggctttccgtatatttcggcgatagcggcgccggggaagccgggggcaaacgaccgcctttccctggcgcatatcggcatcgggggcatggggtcgaaccatctgcagcagacattgaagttcgagcgcgatggcgacgtccacttggccgcgctatgcgacgtggacgagaaacggctcgcggcagccgtagggaaatgcggccccggtgtagacgcgtaccgcgactaccgctacatcctcgagcgcgacgacatcgacgccgtcgtgatcgccacgcccgaccactggcacgccgtgcagatggtccaggcgtgcgaatccggcaagcacgtctacgtcgagaaaccgacgtcggtcacgatcaacgacggcaaggcgatggtagcggcgacgaagaaatacaaccgggtggtccaggtggggtcgcaggcgcgatcggccgagcccgcccaccaagcgtgcacgtacatccgcaacggcatgctcggtaaggtccacaaggccacatgctggcacaagctcaatccgacgggcggcacggacccggatggcgagcccccggcgcaattggactgggacctctggctcggcccgctgcgctggcgtccctacaacaaggcctactgccccggcgtgttccggtgggtcatggaatccggcggcggcgtgattcgggatcgcggcgcgcacgtgatgagcatcatccgctggtgcctcgacgccgacgagcagatgccggttaccattgaggccaaaggctatccgcccaacaaggggatttgggactgcccgccggagatggaggtggtctacacgttcaaagaccccgattggcaactcatctgggcgcagcccggtgaccggcagagcaattaccccgacaagaacgatgatttcggcatggtattccacggcgaggacgatacgttggtgctcgatcgcgacggcacgcagtacgacgcaccggaaaaggcccgaaacttcaaagtgcctgccggcggtgtcgaagtgtatcgcatggacaaatatgccgactacaacatgaaccacaaggcagactggctgcaggccattcgaactggcgcaacgccgtgtatggacatcgagaaaggccatcggaccgccacgatgtgcaacttgggcaacctgtcctatctattgggacgcacgctgcgatgggacgccaacaaacaagagatcgtcgacgacccctatgcgaaccgcctgctcagcaagccgcagcgccatccgtatcatctgtaggcgcgcgccgtgaagcccgggctcaacctcgaattcgcccgaaccgaacgcctcgcgccggaacaagcgatggcgcgcgcggcggacgccgggtatcgctgggtcgagccctacgtgtattccgccatcgcgttgccgatcaacagccacctgaccgtgcgcgccgagtcgccctatcaccacttcgatggagggcggaccgatcccgcggcgatcaacgccgtgcgggaaggcctcggcctgtcattctcagccatcgatgcccactgtacgctgctgttgccgcagatcggcgtgccctatctcaaatcggcgatcgatttcgcggcggaagtcgcttgccccattgtaatgtccgacgagggtccggttcccgaagaatggatgacgctcgagcgcggcttcgacctgatgcgtgtaagtcttgacgaggtcgtccggcacgcccataggcggggcgtgttatatgccatggaattgcacaatgcgctgacggcgcgccccgattacctggtcaggttgcttgatgcctacggtcccggcgacctcggcgtcaatttcgataccggcaacgcgtttcttgcgggcaacgaccctgtcggttacctccagcaagttgccggccgtgtcgtacatgtccacattaaagacatcccggaatcgcaattacacgaacgcggcaaagtcaccggcacccgcgttggcgtggcggccggccaaggcgtaatcgacctgcccgggatcgtcgaggcactccggtccgcaggtttcgacggtgtgctctcagtcgagtgcgacaccctcgcgcaagcccgatcgagcttgccctatcttgaacgcttgatcggctcccgatgagcccgtaaggccagaaaagtcgaacgacgttcaagttcttgtccccgcgctgacccgctggctggatacccggcttctccccttttaactagccagcccgtggtaaaagtcgtcatggtctacacgcagtcattggctcacgacttcctgggctcgcgggcgccgcggcttctaaaagtcagaagggaaaaggttagtggtgagtcgcagggcgcaagcagccaagacgcaccaagactatcgcgagaaccgcccccaccaggtcggagaccagatcaagcgccgtgttgacgtatccgcccacgccggtctcgggtaccagcacggtcgcaatgaactcgatgatctcgttgagcgcgcctacgcccagccccgccatgaccaccacgatcgagagcgcggtccagccccgcagatccgcgcggagcagcggccgcagtaagtgatacatcaccagggtggccacgccaaacccgatgatgtggacgaactggtcgtagcgaaaaatgggaaccgtgtccgacagaggcaccagcattacgccgtaaagcaccccgtctccaatcggaatccccccgccgcacaggtgcagaatcgcccatgccacgaggccccagataatgggcaaagggtatcgcacgcgatcgttggtcagcgcgatcaccacgaggaaaaacactatcaccgccacgtacagcagaaactcgtagttccggcgatatccaaaatacacgctgaaaggcaccagcaccgaaaacagcaccgacagcggcgccacgtgtccgcgctccagcttaagcatgagttcctaccctcctttgccgaatgccgagcatcttgccacacccctccccgcccatcaagccggccactcgcgcccaacggaggcagattccgcacagaaatgttcagccggtgacgggcggcatcctacgacaaagccaaacccggaaacacgccccaacttctggtgcgggcctctcgcctgcacgtctccggtgacaatatccttgccctcatccgccgccacccccgctacaacataaaatagagcactttttgttccgctaaggtaaaatgggtgtagggcattgcgtgtcctccgttcggtctttggttgtttccaaacgctttgtaccgaacagaccgcgcaatgtccttttccattagccgagggaaaggccgtcccggagaacccgcggggaaataggggagaataggggacagcggacctggtgaaaaagtcatcttgcaccataaaatctacgtggcttccaccaaaatctggcaaaaaactgggactgactcgatttcggctgtttgaaatcgtgtctgtccctgcttttcgcggcccttcaatagagttgcctggctttttcaccaactccacagccacctattctcttgacttttctccccccaagggtgctggaaagttgtgacgcgcccacgcccgcgtgatgcccaacaacacatcgggagtaggcccgtcccacccctgcaacaccccctgccaccgcccactcgcatcccgccacaacgccacatccacacgcgccggcagttcaatctccatacgccccgccttgaaacgcttcagcccgcccgccgccatcgccgcaacctgtcccgtcctgtccagccgcaccgccgccacacccaccgcatcaaacttcacctcatgcccattcaggctcaccgttgcccggatcggatcccccatcacatcatccttgcctgacgccagaatcagcgtaccgtccagcagccggcaccggccgctcggctccggcatcaccgattgcgtaaatcccgccacacccctccgcgtacccagcgtctgcgcttccacccccgacgccctcaggtgcgcaataatatcccgcgcgcaatcggccgcactcccgttgatcatcgccgtcggcagggccgcagacccatcaaactcctcgccctcaaaatcgcgcgtccattccccgacccggtacaaccgcgtcggacctcccgccgccttcctgaaaaactccgccacagccggccgttcccactgcgggtggtacaacaccgccgctttgtaacgctgcggcccatatcgcacgctgccatcgcgggcgatcgtcaacgccccgctcgatatctcgctgctcggaatcaaatcggcgtagtagccttccgcccacatcgcatccgtgacctcgagcccaacgtccgcaaaccctgaccccgtccagttcaacgccgacggatgaccaaagatcaccgcaaccgggcaatccaccggcgccgtcgaaatcaggttcagcaggcgcacccggcaatccgctcgaagcaaatcgccccccagcagcgacgtcgcacggtccaccgcatcgttcggatacagcggatgaaaattcatccggcccccgcccagcgcgtggcgccaaagatcttcttcataagccttgatgtccccgtcgtaatacatgttgtaccagagaggcgaccgccactttttcgacagcgccgtccgcgcgcaaaacggcgtcgactcgtcggtctgcgccaaatcccgccgcaccccccaccagtccaacccgttcttgaacgcctcctccggcgtcggaaacggaaaccacgtcgggtgtgtcccgctcatcacctgcggaccaaacacctccttgatgcccgcataaaaagaattctcgacctccgcgttccgctcacggttcatctccatgtagtgattgatcgcccccgcacgctcacccacccgcccgcgctcccccacaaccatcagcaacacgtcccgcgccaggtcacgccccggccgccgccgcttgtacgccctcgccatccaatccgaataccacacgtcatccgcccgcggcttgaaccgacccggaaaaccccactcatccttacacgcccccgccaaccccacgtccctgtactgttcgagaatcccccgctcaaacccgatcaagtgcggcgcatatacgtccggtgtaaacaacgtaaatgccgccagcacaaacaccgtccgaccctcatcccccggaccgcacgggatcgcaaccgccacgccgtctttgtccgcctgctccacacgacaccggcccgtgatgtcctccaccgagtccggctcaatccccgccggccccgccacacccgaatagacccgcagcacccgcccaccaatcgagtcataaccccgcgcccggtgcgtgtaatgatcgcccaggttcaaaggttccacccccaccgtcacttcgcccaaccccaacatctccacctcacgcacccgcacaatctcctgcatctcccccggatacttgtccataaacgcctgccgagccagacgcacatccagatccatcaccatcgacatccccttctcccgcgcgtacgccgccgcagctttaatctgatcgtgtaccgcagggtccgtcacttccaccggataacggatgctcgtcgtcaacagatcaaaatccgtgtgcgacgcgtgcacgtccaagaaacgcttgtaaccctccggcccaaactcctcctccgaccagaaccagcaaccgatccccggccacgacgcctgcaccgcgttctcctcctgacccgccaacgccacacgcagcgaaccatccaaaaccgccactccgcgcgcctctgaaaccagctcactgaaaaacaagaccgccgcgatcattgtttcccctccatgccacgaagtgtgcaaaatcaccatggcccgctgcaactcgccccactgaattccgcagcgtccaccatctccactctgtccattccaccccccaaaaaaaacttgccacaacatcttgacgtgagggggccgaccgtgtacaatatctagtgtaacctcggggggacccgagaaacttaaaataaggaggagaaacgcaatgccagtaaagaagaaagcagcgcccaagaagaaagcagcgcccaagaaaaaagcagcgcccaagaagaaagccgccgcgaagaaaaaggttgtgaagaaggcggcgaaaaagcgctaagtagtattgcgcgagttttagcagggccggtgttgtttaccggcaagattgcgccggacgcgaagcagtttccgcgtccggtgctctttttctccccgcgatgaggccgaggaaggcgacgaggaacgggtcgatctcgaaccggtaccggttggtttcagcgagttcgacgatgatgctgaggccggtgacgtagatgacggtgaaggccatgaacagcagtgcggcccgctgggcggccgtgtggcggcgcgaccacaccccaagccacgcgccgtacgccatcagcagcggcatgccgatcagcagcgtgaggtaggggacgtgacgggacgctccgagttgggggatcagtcggcttacggggatgttgatcttgagagtgaggacgtcgtaggcgcgcaccagccattgaagccgcggcacggtgagcggcatcggcgagaaatacgtgagcccggcccacgcggtggtgcacaaaaacaatttcggccgcacccggatcacgtagagggcgtcctcgaggtagatgtcggacacggcgatctgggagaggtggttgtagttgacctcgccggtggatttggtggtctggcgcagcaccgggatgttttcgtaaccggcgatattgcgtatctccggggggtaatactcgattgcgtagaaccgctcgaccagcgacaccttcgagatcttcccttcatttgccaggcgcacgcgttcttcccacggcaggttgccgaccgttttgatccacgggcttttcccgagaaacgaaaacaccgaaaacttgtcgaaaagcacgtaattcttcgcgtaaaacgaaaacagaatcaccccgggtatcagcgccatccacaaaacctgcctgcggtttcctcgcatcacggcggcgactgcgcacgccatcaacacgtaatacgccaagtggtacatcgaccggattccgcacagcagaaacaggctgatgaaaaacccccagccgtacaccgcgcgccgagtccgcacgtagatctcgagtaacagcgcggcgatcacgagaagcgtcgcgcattggagcgtatagatcaggacgtgctcgaacacaaggaacgtcgggcttagcacaaacagcgtcgacgtcaggagcgcgacgcttttccggaccccgagccgcgtctgcaacagcgtcacgaggaggtacagggccagcccgttgatcagaaagagggcgtgaaacaccggcgccgcgtggcccgggaaaagttttaggatcacgccaagcgcgaggttgtacagcggcggctggacgtggaggtaaaatacgctctcgatcaggcgcgtccgcagcagcaccgggtcggcgtagtgggcgaacatccccagaggcgccatgtcgaaccgcagcccaagcgaattcaccagggcgtgaaacacaatgaacagccccgcctggaaacccaacagccacttccagcgagccgcgtcaataaatcggagcaaccgccgcatgaagagcaaggtatccgatttcgggccacgacgcaaaccggatgagaccatcgggccgttggctgcgaggtaggcggaactggttcgagttgaggcgcatgcgcatgttgttagaatctttgttcacgacatctgcgcacggcgcgtagatattgagtcaaggtcgcgaacaaagattctgaatgcgacttcttagtcgccttagtcgtcggagccggagagttctggttgttcttcttcgggatcgaccgcgatggcgttgcggtcggtggtcaggaaggtgagcacgccgaatgtgaggcaggataccgctacgccgaacacggatgcgtccacctgttccatgaagcggtaggcgccgtcgccgaggggggcgatatcgagccggtttttgagtatggcgaagcccttatagatcatggtcagggcgcttgcggtaagcatcgtgatgaatatgttgcgcgtgagcgcgggcgaccttttctttgagaggacgccaacgcacacgggcaggatgatcgcgggcgcccagaggtggtacgtgaacaggagaagtccgatgatgtcggaccacagcaccgccaccagtatggcggcgccgccgagcagcgcggagcagatgcgcgcgagccggagcatccgaccgtcgttgcggtctttccagccaagctggtgttcgaagaggtctttgatgaagatcgccgtggacgagttgagcgcggagtcggccgatgacatgacggccatcatgagcgcgccgatgacgaggccgccgatgacgggattgttcattttgcggatgaccatggggagcgcctgctggggggcgatgtcgggaaagtggatccgcgcgtagagggctatgaagaacagtacgacgggaaacgtgagcgccaggaagatcccgacgccggcaatgccgatccgcgtttcgcggatatcttttccaacgcagtatcgggtggcgtagccgggggcgaacgtttcgccgaggaagaaagcgaggaaggtggtgaccagaaaaatccagcctttcccgccttcgatctggaagaacgtgtgagggatggccgaggtggcctctttccatgaggagatgatgtcgggtatgcaggccgccagcgtgacgaggaagccgaaaataaggataacgaactggtagacgtccgtgtggatgacggccaggagcccgcccgcggtgctataggtgaccacgactgccccgccaatgatgatggcgagggcgagcaccaggggcgagttggtaaactcggggaggatagccgtcagcacacttccgaacgcggccatctgtgcggcgacgataaaaacggagaacagaagcgacagaatcagcacgagaaaacgcggaccttcgccaaaccgatgaccaaaatagcccgcgaccgtgtaaagttccgcgtcgcggaatttcggcgcgaccaccaggcccgagaacaggaagtggaggtaccagccggtggacacgacaagcatcagcacgccccactcgtaggttcgcccgatggcgccgatgctcgaaccgccgccgataacagtcgcccccatcgtgcaaaacaggaaaaaccagccgatgttgcgcccggccacgaggaaatcgtcggtgtcgcggatcttcctggctttaagcacgcctttgaagaagatgaagatcatgtaggcaatgatgatgccccaggtgatcaggccccccgccatgacgcctaggcctcccgggtcgagatgcgccagcgcccgaaaagatcggccagccgccgttgagggtcgtagacggcgatttgggcgggtgcggcccgcaacgcatccagttcgatgcccgcgaggtgccaggaggtgtcgcggccccagtatgcgtcgatccaccgggcaatcgtgtcaaacccgtaccagtacgactcgtaccgggaccacgtgcgaatgtggcccgtttcgattgtacgttccacttcgtcgttgacgcgggtgagcaggaacccgtcgcagactttttggccgttgcggtcgaacacgtcgacgaggatggatttgctggagtcccacgcccgcttgtaccggcgcgggacgagcgtgaacccgttgttgcgggcgtatgtctggggggcgagccagcgcggctgcccggagacgttcatggtggactcgtagttgccgagcgcgtgcgactggacggcttctttgcggtaggcgctgatgacggcgataccggaggcggtttcggcggcgcgccgcagcgatttgaacagttgctgcgcaccttcgggcccctgcatgacgccgatgctgttgcatacggtgacgagcacgggcagaggttccgggtccagcggttcgaggtcgaacgcggaaccctggcgaagccacaatcgctggcccagcagcgttccgaggccggcttcccccagtttcccggcggcaaggttgatcagttcggaggaaagatcgatcccgccgatcaactcgatcccgccgccggtttcaccggccaggacggggtcgtagtccaggtcgcggcgtgaggcgcgggcgcgggcgagattctcggcgtcggcagcgggcaactgatcgccgcgcgtggttttaaggccgtaacgcaggtgcaaccggcccgaaccgcagccaacatcgatcacgtgcagcggctttccggatcgttctgccagaaaagccaggacgcggtcaaggaattcttcttcaaatgcttcgtaagccacgacgtcgggatggccgtgaacgatattgcgctcgtacgcggcggcacattggtcccacacgccgcggtcgcggtcgcacgcctgcgtgagcccggtgtcgttcgtcatgggcttctcctcacgcgggtttggcggaggctaccccgtccaacatcgtggccgcgccgaaagcggcttcggataggggggatatgtggtcccgaatctcgtccagcgggggtagtatctctttggcgacgtattttgaatccatcaggcgcagcagcgcggaatagttgacgcggaaggcgatgcgctcgccgacttggagtttatcgacgttttcaccgaggttgaccacggagatatcgctgctggcgccggcaattttgtaccgggtatcgagaggcgtaatgccgttgatgtcggtgtcgagatggccgatgctgaccagtgcccggtacccgcgctggccgggcgaggtgtcggggcatgcttcggtttcgaacggcgtcatggtggtggtttcaccgagtggcgccaagccctttttcttgacttcagcgatttcggcctcgagccgcatcacgtcgtttcgcagttccgggagcgtgccgccgttgatcaggtcggtgccaaggaaggccgcctcgccgatgcgcgagtggtttacggcggatggcatctggccctccagcaaaaggggcagggtcgcggtgactcccgcggagataatgggcagcggctggcggaacttcaactcgagcagttcgcggtacagcacgagctgcatcagatggtcgacggtgggaacggtccccgccaggcacccgaggttgccgccgattccggcaacttcgatgttgggcagttcgaagactttcttgtagaagttgacgagactgccaggcaggatgccctcgcgcaggtcgccgagttcgatcatgatgatgatgcggtggatcttgtcgagccgtgccgcgtgatcgttgatggcgcggatcacctcgatttcactgttgaggctgatgtcggacagggcggccacttcgcccgccctggacaagtcgggtattcggagataccatttttcggcgcccggcatgcaccggctgacttgattcaggttcgagaggcgcgagtcgcccacgctggtgacgccgagcgcgtggagggcgcgcagcgtatcggcatggccgcacagcaccttggtaaccagcgtccacgaactgccgttggcgcggatccacctgtcgatcactttcaaattatagtggagcgcttcgatgttgatgacgagccggttcatggcgaatacctcatctccgcgtatttgctcgtgaatccgacacgctcgtacaggcgccgggccggattgtcgtattcgacgtgtagcttcacactcccttccgccagacacagcccgcgctccacaagctgccggcccaggcctttcccccgcaacggcgggtcgaccgccacaaacagcagcagattctcgggcacgtacccgcccatccccgtgcggagcatcaccagcgcccccgccgtcttcccgtcatgttccgccaccaggataaacccgccgccgttgagcgcgtcgcgcaggccccgagcaatgtcttcgaacgtgtcgctgtacggtttgagcgcctcctgcagaaatgccgccaggtcgtgcaatccgccccgcgcggcaaaatcggccggctgccgaagttcccgaagccggaactcggccgcatcgaccgatcgcggcggcgcgtcgccatccgcgggtgcggcggcatcggcatgtttcgcgccgtggccgtctgccgaccgcaacgtgtcctccgtcgcatcgagcggatagatcgccagcatgggcgccgcgtccagatgttcggcgttcatcatacaggctacgcgttccagcgacgacaggatctgcgcctgttcccactcgtgcagtttctccaactcccgcacaaaccgctcctggagcaacggcggtgcgccgcttaggacctgcctcgcgccgtccgtgcacgtcaccagcacgttgcgccggtcacgcccgttgcggccccgccgaaccagatcccgctgctcgagccggtcgactatgcccgtcgccgtggcgttgccgatgctgatgcggcgcgcaagctcgcctatcgcgatttcaccgttccgttcaatctcgcgcaacaatatgagctgcggactcgtaagactgtgagtctgcacaagacgacgggagtgaaggtctaccgcgcgcataactctgcgtaacgccaccagaatccgctcggtgagccctaacgcattgggattaaccatgaagagtcctttgcgtaaagatattttgtgtgcgaaacattgtagcggacacacactcccacgtcaactaaacaacaggatttctaaccacctcgatagatggatatcttgtaaccccaggtgtatcaataggttggctctcggccaactcccccattcaggcgtgcggatggctgtcccggtagacctgtttcagccggtcgatgctgacgtgggtgtagatctgggtgctcgagaggctttcgtgcccgaggagttcctggacgacccggaggtcggcgcccgcgttgagcatgtgcgtggcgaacgtgtggcggagcgtgtgcggcgagatttcccgccgcccaggcaggatttggcggacatatttctcgacgatccgctggacgctccgcgtcgtgagcggcccgccgcggtggttgacgaacagccggtcgtgctgcggctcacccaactgtggccgcacccggaggtagtcgcgcaacgccaggacggcgtattggccgagttggccgagccgctctttgcggcgtttgccgagcacgcgcatcaggcccgtgtcgaggtcgagactctcgatgttaagcgcggccagttccgcggcacggatgccgctgctgtacaggacctccagcaacgccctatcccggacgccgagcggctgggacgtgtccggcgcctcgacaagcgccgtgacttcggggattgtgagcgcctcgggcaggttgcggcccagtttgggcgaccggaccgtctgcgccgggttgtcctcgagcaagcccgaccggacgcagaacttgtacacggcccggatcgacgccagcttccgcgcggacgtacgcgcgctgccgccgcgcgtctggacatgcgccaggtacccccgcacgtcattccgaaccgcacggccaagcacgtcgagcgacgccggcgggtgcggctccccttcatcccgctcgaacgccgcgggcccgtgtgcgacgtagtcgcagaactggtccaggtcggaaaggtacgcacgcaacgtgtgcggcgaataacctttctcggcctcgaggtagtctacaaaaggctccaatcccgggcgcatgatcgagattatagcagcctcgaacgaagtccgaaattgtcagtcaaaaagtccgccgttatagctgctaacttaaccgtaggccagagtcctataagaggtttccggttttctggcaggggtggtgtcagaaaaactttttatctcgcgctcgttcaaccacttacgtttctcgaaccatgccaaaatggcaaaaagagagcaccaaatgcacatatgaaatagagggagttgatcaaggatcaattaagaattaagaattaagaatggtgcgaggatgacggacaaagggtaggggacgaaggatgaatggattgcggattgcagattgcggattggggattgcagattttttgaagcagaaggggcagaagagcaggctggaggaaaggatgaaggatagaaggacagcggggaaagggaaaaggcgatggaaaaggggagtgtaaagaagactcggaaacccagttacaagccgaaagctgggatgatgaatataccggtagggtggatgtttgagaaggctacgcgccgtcttgttgaaaacccggtggaacagggggcgatcgtgctggcgaaggaactggaggaagccgggctgagccagtcggcgatcatgcggaagttgaaggaggatggagtgccgaaccggggggaagggctttggacttcggcgatggtgcgaaagcttctggattacgatgggttgaaaggtcgttgggcggagcggaaggcgaaactggatgaggagtacgggacgcgtgtggccgccgccgaagccgacgcccgcgagatcgccgagggccggacgcccgcctcaccgctcgacaagtgcgaccccgtcgcctggggccagaaatggctggcgaaccgcgacgggtcggcccgcgcttattggcggcaccaaatcgaggatctccgcgcagccgacgacaacatcgtccatctcgacggccgcgacgtcggcaagacggccaacctgaccacgctggcgctccattatgcgatgaccacccggaaaggatcggggctggtagcggcggcgctcgcgggccagttgctcgccatttgggaggaaatcgagttccagctcgaaaacaacccgcggctcgaagcctgcatcgcccgcggccgcaacggccaccgcaagatgcagcggtttccctacccgcgcctcgagttcaccaacggcagcgtcctctacttccggcccgcgggcacgtacggcgaagcgttccgctccctccacgtcgaccgcgtctgggtcgacgaaggcgcgtggctcagcgaagacgcatggcgcgcgctgcgccaatgcctaaaagccggcggcaaactccgcgtatactcgacccccaacggcatgcgcaacgccacatactaccgcctcacaaactcgccccgctggcgcgtgttccgatggccgtcctggctcaaccccaactggacacccaaccacgaagccgacctgctcgaattctacggcggccgcgcaaccgccggctggcagcacgaagtcgccggcgaacacggcgcgccaagctacggcgcgttccaccccgaacacctcgcactcgcgctccaagacgtgcccgagtaccgcaaaatcgtcatcaccaacgccgaactcgaagactgccaatccgaactcgaaaccgaacaacggttcgagacgctactcaacatctggcccgactccgcccaatactacctcggcgcagacctcggatacacaaacgacccaaccgaaatcctagtcttccgccaagacacccccaaaaaatctcctgattgttctcctccagactccagactccagactccagactgcagtttaaggcttgttttgcgcgtccacatggagaaagtcgcttacccccacatcgcccaatgtctcgccgtcatcgactccctactcgcgcccgcagcaatcggcatcgacaacggcggcaacggactcgccgtcatccaggaactcatgtcgctcgacaaatacaagccacgcgcgttcgacggacgcctcttcggcttcgatttcggcggagtcacaccattcgaactccccaacggcgcccaaacgaaaaaacgaacaaaagaactcatgacctcgctcatcaacaaggcgctacaacggcgcgagatcgtcttccccgccaccgaccccgaaatacccgaccagttcctcacacaaacctactcactcaacaacggcgccgtcacctactcaaaaggaaacgaccacatcatcgacgcaacccgatgcatggtcctcgcccaagaaaaaaccgcacccaacgcaccatacaacgaccccgactacaccatccgccccccgctacccctgatggtcgaaatcttcaccctccccagcatgaaaaacttcccctggtaagcgcgaagttcaaagttctgagtgcgaagttgaccgggcgaagtgcgaacttgaccgtgcggcagcatatgacaactgatgaatgatgaatacgctgaaagcgcaagttacgccggaggcgtaagttacgctgaaggcgtaacacatattagcctggggcaacgccccaggaaatgaatacacaaccaaaaagcaccctgaaggggtgcaacaactccccccgcccctacagggccaagtgcgaacttgaccgtgcggcagcatatgacaactgatgaatgatgaatacgctgaaagcgcaagttacgccggaggcgtaacacatattagcctggggcaacgccccaggaaatgaatgcacaaccaaaaagcaccctgaagcggtgcaacaactccccccgcccctacagggccaagtgcgaagttcaccgtgcggcagcatatgacaactgatgaatgatgaatacgctgaaagcgcaagttacgccggagccgtaacacataatagcctgaggcaacgccccaggaaaggaatgcgtaaagatagtgcaccctgaaggggtgcaacaactcctgccgcttcactcttccaccccggaggggtgggtcaattgtcagcccagggttgcgaccggcccgtaccaatggccctgtacccgtcacctaccacgagcatccaacgaagaccccggcgaccactccacaccggtccagggccgggcgctaccctgggcacaagtcgcgccaacgaagtaccccggcaggggttcgacagcttgtccctccccacccgtatcatgcgttgttgcctttttctccaccgggtactaaactagcttcctcaagccactatgctaaacggggatgtttaggggccggcggccgatacccggcgccggaaaacggaacggagcggatttctgtggctacatattcaaccgccctaatcgtgaagcgggtcgccaaagccagaagaagcggctgggtaactctgagccttatggactgcggcgtgaaggacagcgacctccgcacgcttctcgacgcgccgggtgtcgaacagcttcaggggctgaacctcagcggaaatcagctttccacgcttcccccggagatcggccgcctcaccgcactcgataggctgtacctcgtcaacaatcagctttccgcgcagccgacttcgtcggccgccctgccagacagtcaacaatatcagcacataacgattctatacagcacgaccgaattttcccaccttcctgtaggtccggaataattccgggccctcgagtttctacattatcacgcggcagcggcggcagccagacccctttctgagcaacgtatgcctaagcgtaggtccggaataattccgggccctcgagtttctacattatcacgcggcagcggcggcagccagagccctttctgagcaatgtatgcctaagcgtaggtccggaataattccggacccacattcagcaaaaattatgtcgtcatatataaaggcagcgcggcccagctgtggtttgaggagaatctccgctcacgtatactcaccctggcccattcagcccttccggcttggcgagacaattcatcgagcctcccaataccgccgctgaccccaacttccacatcaaaatcgctcacttagataacccctcaatctacttgatttaaacagaacccccgcgtagactcactgcagggcgcgcaaaaaggggctgtctatgaactcgtacaacttgctttcccaaaactggattcccgttctctatcacaatggcgatttcaaacgcgtcggtatcctcaaagcattccaagacgcacacagaatccgccaagtcgccgcatccaatcccatggaccgcctcgccatactccgctttctcctcgccctgctctactggtgcaagggaaacccggcgaacggcccacaggccgcgccttacgaaccattccctccggattggttcttgaaactcgaacagaataaagaatgctttgacttgtttggagagacccggcgattttatcagtacaagaaacctgtgggcgaagataaacggctgaccgccaactaccttgtccatgaggtgccgaccggtacgaatgcgtggcattttaggcattcaacggacgaagtaaacggtttgtgtcgcgcatgttgtgcaatgggcttgctaaggcttccagcatttgcgacttccggtgggcgtggtaaaccgcctggaatcaactcaaagcctcccctttacgtcataccgctgcgcggttcacttgcggccactgtacggctttcctggcggccggtcggcccgttaggaacgcccgcatgggaaaaaccggacgtccaactgcctggcataggcgaggtgccactgctcacaggtttgacctggctgccgcggcgagtgtggttagactctcctgcggaacgggcagaaacctgcatctcatgcgggcgcagcgagaggctaatcctgcgtactgtatttgccccaattggcagcaccaagacggaagaaggagaaccggtcagggcgtggtgcgacccgcatgtcatctacgggatgtccgccaagggcgaaatcagcagcctgcatgcgcgggacgctcttggcgcaccagacgccgcggcggggcagtgggccaatatccttgccggcctgcttcgaaaggggcaaacaggaaacgcatctccttgctggatagtgggcttttctaccgtccagaacgacaagtatcttgaggctgtcgaatgccagatcccttgcgatatcgaccaggcgccacaagaacagcgggacgaatgcctcaacaacttggaacaatggcgcaagggaaaatggggtttcgccaaaaacctgggatcggacaacgaaaagggcgagcggcgtgagcatcgagagattacctctatgcttgcgtccattggaccgcacgttgaaaagcaggtgtcggagaaaagtggatcgttgatagcgggcggcgaaaccgcatggcaggaagcggccaaggcgttccgcccgatgatgcgcttagccgcacaatcgctgtccccagggtttacgatccaagcagccagaatacgcaagcgcattgccaatgccatgccaaacatgacacccaaggccgcgaagaaggggcggggaaaaggacgggataaatgaccgcgacggaagaattcattcgcgtattgagtggcctcaagtcaggggatcttggtctgctgcggacttattcccaacacggcttggatgaatccgtggatgggtttgacctcttttcggggctttggtggccgttacgggcgaagaaccagcgggcgccgcgccgggaagtggcgtggcttatagctaaactctacgctgcccacccaattccccaggcccgcgaggccacgcttgcgcgtcaactccgccggtgcctcccgaccgatgagaacggtagaaatcggtttgggcggaagctcgacaacatattgatgctgccgctcgacaagatcgaggcggaacttcgttgggcgatcgggcaggttgcctcgagaggactttcactcgattgggtaagactcacggatgaactctccgtgtgggaatacgaatccgtccacctgcgatgggcggaacaattccttcaaaccgaagattaaggatgaaaggggtccatcatgctgatcgagattcacgcaatacaaaaccatagtccgtcaaacctaaatcgggacgacctgggtgcgccgaagacgtgctattttggcggtgctctgcgctcgcgcatctcaagtcaatgcatcaaacgaagcatccggatgagcagggagttccaagcgctttgcgggggaattcgcacgcgccagttggccagactgatcgccgagaaggttcaagggaagccagacgtccagaagcgcgccgagaagatactcgaactatgcggtttcaagcccaagaaggcgaagaaggaagaaacggacgacgcagcagatagcgaaaaaagcaagatgctcgtttatacgagccgccaagccatcgaggaaatggccgcactactccaaaacggggacggaaggactgagaaacaactggccgcggacttctgcgcgttgatcagtaagcatgtggcagtccccgatatggcactatccggacggatgctggagccggacaaatcttcaaacgacctttggaaggagcttgacaagaccgtcgaggccgcccttcaggttgctcacgcgatttcaacgcacgaggcgctgcccgaggtggactattatgtggccgccgatgacattccaggcgaagatgcaggggcgggctacgtggatgaatccatgtttgcctcggcatgtttctacaagtacttctcgatcaattgggacaagcttgtggaaaacctcaatggccagaaagaacttgccgcacatacggtaggggcttttatccgtggagcagcgctggcaaatccttcgggcaaacagaatagttttgcggcgcacaatccgcccgatggcctgctgatccaattcgccgacaccccgacgagctatgcgaatgccttcgccgctcccgtgtcgggcaagggcaatcctgacgtcatttcacaaagtgtggcgcagttggcgcattatgttcgcgacttggacacggggtacggcaagccccagaagcgtttctggttctcgccgaatctgcgttatccgctttgcgtcatcgaagccaagaaaacgattccggtggccgaggtaaacctcaaatcgctcgatcaactgattccggccgtcatcggcggcttgggctttgattggaattcggttcagaagaaagtgacaagccaacaggtggcgccatgacggccaacacgctgtttcttcggtttgaaggaccgctgcaggcgtggggtaatcaggagtcgaagttcgttgtacggcgcacggctgaagggcccactaaatcgggcgtgatcggactgttgtgtgcggctttgggcgtgacgcgggcggaagcgcaggaatgccggttgcctcaactggccgaactgcgtatgggcgtccgggtggatgcgcccggataccggtggtgggactatcacacggtaggcgcggggatggacatgcgcatcgccgaagccgaggggaagacaaaacccggcgcaatgctcacgcggcgggagtatctttgcgacgccactttcctggtggtgcttcaggggaatccggccctgatcaaagaactccggcaggtgatcgaaaagccgcgctggacgctctatttgggcaggaaatgctgtccgccgtcgcggcgggtgctcgaggaggcgccggcggcgcatccggacctgatttcggcgcttgtgtcggttccgtggcagcggcgctttgaaagggataatcccccggaaacactcgagtatctgctggattggtttccgtcgcccgaccagccggaggcgccggatgacgccgaggtgtggtacgacgtgccgttgacgttcgagccgccgtcgcatggtgcgcgctttgttgtgcgcgggcagttccgcgtgggcgccggggggcaggtcccggtggcggaatcggcgttgcagcgccaggtgccctcgccacaacgcccgcgggcagattatggcaattccgagtaccggaagatgcgcgcgcagcggctcgagaaggactcgcatctttgcgtgttctgcagatcgcgtgcaacgaccgtgcagcacgtcacgtaccgccacgccggcggcgatgagcggatcggcgagctgcgttccctttgccgcttgtgccacgacgccgtcaccatgctcgagtatgggctgaacatggggctggaccgcatcgacccggaggatgctcgatggcgggagcggattatcgagaaacgcgacgagatcgtcaagttccggtcgctcgagacgcggcggcgtcggcttagccccgaggaggtcgagtgatgtatctatcgagtctgatgatcaacaccggcgacaatccggatcgggagcggccgggccggcggtggctgcgcgacatctaccacgtccaccagcggctgtcgatggcgtttccatcgaggtcgcacggaagcccgtccggttttctgttccgcatcgacaaccagatcgaggagaactcgccgcgcgcgatcgttcttgttcagtctcaattggccccggactgggatagcgcattttacaatgcgggcatgcttctggcggcgccgccggaggttcgcgaatatgccccgtctttcgcgcccggcgaccaccttcggtttcgcatcagaatgaatttaagcaagaagaccaagacggcgcgcgatggtacagatctgtgcacgccgcacgagggtgtcgacaccttcggccgccccaaatctcagtcgaaacgcgtggccgtgacctgggacggcgatcaaggcgaaaccccggaccgggcaatccgccaatggtttgccgcgaaggcccaacacgccgggtttgcactccagaacgaattcaacgtggttcacctcggctgggtggcgggacacaagccgggaacggccgagaaccggctgcggtttcgttccgcgctgctcgagggagacttgacggtggcggacgggccggctttcatgctatcggtcgagagcgggctgggctcggcgaaagggtttgggttcgggctgctgtctgtggttcgtgcaggcgggacgcccgcaccacaatcgaggcgtggcgaatgctgacgcgtgacttgcacgacctcgccaaggtgcgcgaccggctcagctacctttatgtcgagcacgcccggatcgatcaggaagacaaagccatcgccattcacgacgcccagggactcaccccggtgccgtgcgccacgctcgccctgttgatgctggggcccggcaccgccatcacacacgccgccgtcctcgccctcgccgacaacggctgcctcgtcgtgtggtgcggcgagcagggggtccggttctatgccgcggggcacggaaccacgcgaaactcccagaaccttctgctccaggcgcgcctctcgagccgccgctccacgcgcctcgccgtggttcgccgcctgtacgagatgcgctttccgggaaagctcgattcgagtctgacgctccaacagatccgcggcatggaaggcgtgcgcgtgcgcgaagcctactcgagcctgtcccgccaattcggcataccgtggacgggccgggcgtacgaccgccagaactggcgcgacgccgatcccgtcaaccgcgctctctccaccgccaattcctgcctctacggaatctgccacgccgccatagtcggcgcaggctattcgcccgcgctcgggttcatccacaccggcaaacagttgtcgtttgtctacgatatcgccgacctatacaaggccacgaccaccgcccccgccgcgttcgaaaccgccgcccgctcggcccgaaacatcgagcgagaggtccgaatcctgtgccgcgatgcttttgcggcgcagcgcctcctcgaacgcgttgtgaaggacctcgagtacgcgctggacgtgaagccggccgatgacgacgaagccgagaccgatttcgactcggatcccggcacgcccggaggcctgtgggaccctgacgccggcgaagtggccggcggcgtgtcctatgccgaacccgacgaacacacagaggatgaaccctaatggtcgtcatggtgctcgaacgcgtatcgccttcgctccgcggtgaactcactcgatggctgctcgaaccaaaatccggcgtgtttgtcggcaccgtctccgccatggtaagagaaaaactatgggaaaaggtttgccggaaaaccggcgaaggaggatctatcctcatttggaccgcaaataacgaacaggggttcaaaatcgacttctggggcgatccctcgagacacgtcctcagttgggatggacttcagctcattacaaagccaaaataaccaataaataccaagtgtaatccccacgcgcgtggggatgaaccgtcctggttgttatgcgctcgcccgcctccttcgtaatccccacgcgcgtggggatgaaccggcgatgcagatcgtgacaacgggagtacggaggtaatccccacgcgcgtggggatgaaccagtagcggcgggatgctcaagcccgaagatgtagtaatccccacgcgcgtggggatgaaccggaggatgggatggagacgatacgtttaaatgagtaatccccacgcgcgtggggatgaaccgttcacgttcgcgttcgatagccgcagcctgtggtaatccccacgcgcgtggggatgaaccgatcagtcgccagatcgatgatcgcgtcttcagtaatccccac

SEQ ID NO: 968 - DNA, 103351 bp, Artificial Sequence
  Synthetic Oligonucleotide
  misc_feature (1)..(40481): n is a, c, g, or t
nnnnnnnnnnnnnnnnnnnnnnnnnnnnnnnnnnnnnnnnnnnnnnnnnnnnnnnnnnnnnnnnnnnnnnnnnnnnnnnnnnnnnnnnnnnnnnnnnnnnnnnnnnnnnnnnnnnnnnnnnnnnnnnnnnnnnnnnnnnnnnnnnnnnnnnnnnnnnnnnnnnnnnnnnnnnnnnnnnnnnnnnnnnnnnnnnnnnnnnnnnnnnnnnnnnnnnnnnnnnnnnnnnnnnnnnnnnnnnnnnnnnnnnnnnnnnnnnnnnnnnnnnnnnnnnnnnnnnnnnnnnnnnnnnnnnnnnnnnnnnnnnnnnnnnnnnnnnnnnnnnnnnnnnnnnnnnnnnnnnnnnnnnnnnnnnnnnnnnnnnnnnnnnnnnnnnnnnnnnnnnnnnnnnnnnnnnnnnnnnnnnnnnnnnnnnnnnnnnnnnnnnnnnnnnnnnnnnnnnnnnnnnnnnnnnnnnnnnnnnnnnnnnnnnnnnnnnnnnnnnnnnnnnnnnnnnnnnnnnnnnnnnnnnnnnnnnnnnnnnnnnnnnnnnnnnnnnnnnnnnnnnnnnnnnnnnnnnnnnnnnnnnnnnnnnnnnnnnnnnnnnnnnnnnnnnnnnnnnnnnnnnnnnnnnnnnnnnnnnnnnnnnnnnnnnnnnnnnnnnnnnnnnnnnnnnnnnnnnnnnnnnnnnnnnnnnnnnnnnnnnnnnnnnnnnnnnnnnnnnnnnnnnnnnnnnnnnnnnnnnnnnnnnnnnnnnnnnnnnnnnnnnnnnnnnnnnnnnnnnnnnnnnnnnnnnnnnnnnnnnnnnnnnnnnnnnnnnnnnnnnnnnnnnnnnnnnnnnnnnnnnnnnnnnnnnnnnnnnnnnnnnnnnnnnnnnnnnnnnnnnnnnnnnnnnnnnnnnnnnnnnnnnnnnnnnnnnnnnnnnnnnnnnnnnnnnnnnnnnnnnnnnnnnnnnnnnnnnnnnnnnnnnnnnnnnnnnnnnnnnnnnnnnnnnnnnnnnnnnnnnnnnnnnnnnnnnnnnnnnnnnnnnnnnnnnnnnnnnnnnnnnnnnnnnnnnnnnnnnnnnnnnnnnnnnnnnnnnnnnnnnnnnnnnnnnnnnnnnnnnnnnnnnnnnnnnnnnnnnnnnnnnnnnnnnnnnnnnnnnnnnnnnnnnnnnnnnnnnnnnnnnnnnnnnnnnnnnnnnnnnnnnnnnnnnnnnnnnnnnnnnnnnnnnnnnnnnnnnnnnnnnnnnnnnnnnnnnnnnnnnnnnnnnnnnnnnnnnnnnnnnnnnnnnnnnnnnnnnnnnnnnnnnnnnnnnnnnnnnnnnnnnnnnnnnnnnnnnnnnnnnnnnnnnnnnnnnnnnnnnnnnnnnnnnnnnnnnnnnnnnnnnnnnnnnnnnnnnnnnnnnnnnnnnnnnnnnnnnnnnnnnnnnnnnnnnnnnnnnnnnnnnnnnnnnnnnnnnnnnnnnnnnnnnnnnnnnnnnnnnnnnnnnnnnnnnnnnnnnnnnnnnnnnnnnnnnnnnnnnnnnnnnnnnnnnnnnnnnnnnnnnnnnnnnnnnnnnnnnnnnnnnnnnnnnnnnnnnnnnnnnnnnnnnnnnnnnnnnnnnnnnnnnnnnnnnnnnnnnnnnnnnnnnnnnnnnnnnnnnnnnnnnnnnnnnnnnnnnnnnnnnnnnnnnnnnnnnnnnnnnnnnnnnnnnnnnnnnnnnnnnnnnnnnnnnnnnnnnnnnnnnnnnnnnnnnnnnnnnnnnnnnnnnnnnnnnnnnnnnnnnnnnnnnnnnnnnnnnnnnnnnnnnnnnnnnnnnnnnnnnnnnnnnnnnnnnnnnnnnnnnnnnnnnnnnnnnnnnnnnnnnnnnnnnnnnnnnnnnnnnnnnnnnnnnnnnnnnnnnnnnnnnnnnnnnnnnnnnnnnnnnnnnnnnnnnnnnnnnnnnnnnnnnnnnnnnnnnnnnnnnnnnnnnnnnnnnnnnnnnnnnnnnnnnnnnnnnnnnnnnnnnnnnnnnnnnnnnnnnnnnnnnnnnnnnnnnnnnnnnnnnnnnnnnnnnnnnnnnnnnnnnnnnnnnnnnnnnnnnnnnnnnnnnnnnnnnnnnnnnnnnnnnnnnnnnnnnnnnnnnnnnnnnnnnnnnnnnnnnnnnnnnnnnnnnnnnnnnnnnnnnnnnnnnnnnnnnnnnnnnnnnnnnnnnnnnnnnnnnnnnnnnnnnnnnnnnnnnnnnnnnnnnnnnnnnnnnnnnnnnnnnnnnnnnnnnnnnnnnnnnnnnnnnnnnnnnnnnnnnnnnnnnnnnnnnnnnnnnnnnnnnnnnnnnnnnnnnnnnnnnnnnnnnnnnnnnnnnnnnnnnnnnnnnnnnnnnnnnnnnnnnnnnnnnnnnnnnnnnnnnnnnnnnnnnnnnnnnnnnnnnnnnnnnnnnnnnnnnnnnnnnnnnnnnnnnnnnnnnnnnnnnnnnnnnnnnnnnnnnnnnnnnnnnnnnnnnnnnnnnnnnnnnnnnnnnnnnnnnnnnnnnnnnnnnnnnnnnnnnnnnnnnnnnnnnnnnnnnnnnnnnnnnnnnnnnnnnnnnnnnnnnnnnnnnnnnnnnnnnnnnnnnnnnnnnnnnnnnnnnnnnnnnnnnnnnnnnnnnnnnnnnnnnnnnnnnnnnnnnnnnnnnnnnnnnnnnnnnnnnnnnnnnnnnnnnnnnnnnnnnnnnnnnnnnnnnnnnnnnnnnnnnnnnnnnnnnnnnnnnnnnnnnnnnnnnnnnnnnnnnnnnnnnnnnnnnnnnnnnnnnnnnnnnnnnnnnnnnnnnnnnnnnnnnnnnnnnnnnnnnnnnnnnnnnnnnnnnnnnnnnnnnnnnnnnnnnnnnnnnnnnnnnnnnnnnnnnnnnnnnnnnnnnnnnnnnnnnnnnnnnnnnnnnnnnnnnnnnnnnnnnnnnnnnnnnnnnnnnnnnnnnnnnnnnnnnnnnnnnnnnnnnnnnnnnnnnnnnnnnnnnnnnnnnnnnnnnnnnnnnnnnnnnnnnnnnnnnnnnnnnnnnnnnnnnnnnnnnnnnnnnnnnnnnnnnnnnnnnnnnnnnnnnnnnnnnnnnnnnnnnnnnnnnnnnnnnnnnnnnnnnnnnnnnnnnnnnnnnnnnnnnnnnnnnnnnnnnnnnnnnnnnnnnnnnnnnnnnnnnnnnnnnnnnnnnnnnnnnnnnnnnnnnnnnnnnnnnnnnnnnnnnnnnnnnnnnnnnnnnnnnnnnnnnnnnnnnnnnnnnnnnnnnnnnnnnnnnnnnnnnnnnnnnnnnnnnnnnnnnnnnnnnnnnnnnnnnnnnnnnnnnnnnnnnnnnnnnnnnnnnnnnnnnnnnnnnnnnnnnnnnnnnnnnnnnnnnnnnnnnnnnnnnnnnnnnnnnnnnnnnnnnnnnnnnnnnnnnnnnnnnnnnnnnnnnnnnnnnnnnnnnnnnnnnnnnnnnnnnnnnnnnnnnnnnnnnnnnnnnnnnnnnnnnnnnnnnnnnnnnnnnnnnnnnnnnnnnnnnnnnnnnnnnnnnnnnnnnnnnnnnnnnnnnnnnnnnnnnnnnnnnnnnnnnnnnnnnnnnnnnnnnnnnnnnnnnnnnnnnnnnnnnnnnnnnnnnnnnnnnnnnnnnnnnnnnnnnnnnnnnnnnnnnnnnnnnnnnnnnnnnnnnnnnnnnnnnnnnnnnnnnnnnnnnnnnnnnnnnnnnnnnnnnnnnnnnnnnnnnnnnnnnnnnnnnnnnnnnnnnnnnnnnnnnnnnnnnnnnnnnnnnnnnnnnnnnnnnnnnnnnnnnnnnnnnnnnnnnnnnnnnnnnnnnnnnnnnnnnnnnnnnnnnnnnnnnnnnnnnnnnnnnnnnnnnnnnnnnnnnnnnnnnnnnnnnnnnnnnnnnnnnnnnnnnnnnnnnnnnnnnnnnnnnnnnnnnnnnnnnnnnnnnnnnnnnnnnnnnnnnnnnnnnnnnnnnnnnnnnnnnnnnnnnnnnnnnnnnnnnnnnnnnnnnnnnnnnnnnnnnnnnnnnnnnnnnnnnnnnnnnnnnnnnnnnnnnnnnnnnnnnnnnnnnnnnnnnnnnnnnnnnnnnnnnnnnnnnnnnnnnnnnnnnnnnnnnnnnnnnnnnnnnnnnnnnnnnnnnnnnnnnnnnnnnnnnnnnnnnnnnnnnnnnnnnnnnnnnnnnnnnnnnnnnnnnnnnnnnnnnnnnnnnnnnnnnnnnnnnnnnnnnnnnnnnnnnnnnnnnnnnnnnnnnnnnnnnnnnnnnnnnnnnnnnnnnnnnnnnnnnnnnnnnnnnnnnnnnnnnnnnnnnnnnnnnnnnnnnnnnnnnnnnnnnnnnnnnnnnnnnnnnnnnnnnnnnnnnnnnnnnnnnnnnnnnnnnnnnnnnnnnnnnnnnnnnnnnnnnnnnnnnnnnnnnnnnnnnnnnnnnnnnnnnnnnnnnnnnnnnnnnnnnnnnnnnnnnnnnnnnnnnnnnnnnnnnnnnnnnnnnnnnnnnnnnnnnnnnnnnnnnnnnnnnnnnnnnnnnnnnnnnnnnnnnnnnnnnnnnnnnnnnnnnnnnnnnnnnnnnnnnnnnnnnnnnnnnnnnnnnnnnnnnnnnnnnnnnnnnnnnnnnnnnnnnnnnnnnnnnnnnnnnnnnnnnnnnnnnnnnnnnnnnnnnnnnnnnnnnnnnnnnnnnnnnnnnnnnnnnnnnnnnnnnnnnnnnnnnnnnnnnnnnnnnnnnnnnnnnnnnnnnnnnnnnnnnnnnnnnnnnnnnnnnnnnnnnnnnnnnnnnnnnnnnnnnnnnnnnnnnnnnnnnnnnnnnnnnnnnnnnnnnnnnnnnnnnnnnnnnnnnnnnnnnnnnnnnnnnnnnnnnnnnnnnnnnnnnnnnnnnnnnnnnnnnnnnnnnnnnnnnnnnnnnnnnnnnnnnnnnnnnnnnnnnnnnnnnnnnnnnnnnnnnnnnnnnnnnnnnnnnnnnnnnnnnnnnnnnnnnnnnnnnnnnnnnnnnnnnnnnnnnnnnnnnnnnnnnnnnnnnnnnnnnnnnnnnnnnnnnnnnnnnnnnnnnnnnnnnnnnnnnnnnnnnnnnnnnnnnnnnnnnnnnnnnnnnnnnnnnnnnnnnnnnnnnnnnnnnnnnnnnnnnnnnnnnnnnnnnnnnnnnnnnnnnnnnnnnnnnnnnnnnnnnnnnnnnnnnnnnnnnnnnnnnnnnnnnnnnnnnnnnnnnnnnnnnnnnnnnnnnnnnnnnnnnnnnnnnnnnnnnnnnnnnnnnnnnnnnnnnnnnnnnnnnnnnnnnnnnnnnnnnnnnnnnnnnnnnnnnnnnnnnnnnnnnnnnnnnnnnnnnnnnnnnnnnnnnnnnnnnnnnnnnnnnnnnnnnnnnnnnnnnnnnnnnnnnnnnnnnnnnnnnnnnnnnnnnnnnnnnnnnnnnnnnnnnnnnnnnnnnnnnnnnnnnnnnnnnnnnnnnnnnnnnnnnnnnnnnnnnnnnnnnnnnnnnnnnnnnnnnnnnnnnnnnnnnnnnnnnnnnnnnnnnnnnnnnnnnnnnnnnnnnnnnnnnnnnnnnnnnnnnnnnnnnnnnnnnnnnnnnnnnnnnnnnnnnnnnnnnnnnnnnnnnnnnnnnnnnnnnnnnnnnnnnnnnnnnnnnnnnnnnnnnnnnnnnnnnnnnnnnnnnnnnnnnnnnnnnnnnnnnnnnnnnnnnnnnnnnnnnnnnnnnnnnnnnnnnnnnnnnnnnnnnnnnnnnnnnnnnnnnnnnnnnnnnnnnnnnnnnnnnnnnnnnnnnnnnnnnnnnnnnnnnnnnnnnnnnnnnnnnnnnnnnnnnnnnnnnnnnnnnnnnnnnnnnnnnnnnnnnnnnnnnnnnnnnnnnnnnnnnnnnnnnnnnnnnnnnnnnnnnnnnnnnnnnnnnnnnnnnnnnnnnnnnnnnnnnnnnnnnnnnnnnnnnnnnnnnnnnnnnnnnnnnnnnnnnnnnnnnnnnnnnnnnnnnnnnnnnnnnnnnnnnnnnnnnnnnnnnnnnnnnnnnnnnnnnnnnnnnnnnnnnnnnnnnnnnnnnnnnnnnnnnnnnnnnnnnnnnnnnnnnnnnnnnnnnnnnnnnnnnnnnnnnnnnnnnnnnnnnnnnnnnnnnnnnnnnnnnnnnnnnnnnnnnnnnnnnnnnnnnnnnnnnnnnnnnnnnnnnnnnnnnnnnnnnnnnnnnnnnnnnnnnnnnnnnnnnnnnnnnnnnnnnnnnnnnnnnnnnnnnnnnnnnnnnnnnnnnnnnnnnnnnnnnnnnnnnnnnnnnnnnnnnnnnnnnnnnnnnnnnnnnnnnnnnnnnnnnnnnnnnnnnnnnnnnnnnnnnnnnnnnnnnnnnnnnnnnnnnnnnnnnnnnnnnnnnnnnnnnnnnnnnnnnnnnnnnnnnnnnnnnnnnnnnnnnnnnnnnnnnnnnnnnnnnnnnnnnnnnnnnnnnnnnnnnnnnnnnnnnnnnnnnnnnnnnnnnnnnnnnnnnnnnnnnnnnnnnnnnnnnnnnnnnnnnnnnnnnnnnnnnnnnnnnnnnnnnnnnnnnnnnnnnnnnnnnnnnnnnnnnnnnnnnnnnnnnnnnnnnnnnnnnnnnnnnnnnnnnnnnnnnnnnnnnnnnnnnnnnnnnnnnnnnnnnnnnnnnnnnnnnnnnnnnnnnnnnnnnnnnnnnnnnnnnnnnnnnnnnnnnnnnnnnnnnnnnnnnnnnnnnnnnnnnnnnnnnnnnnnnnnnnnnnnnnnnnnnnnnnnnnnnnnnnnnnnnnnnnnnnnnnnnnnnnnnnnnnnnnnnnnnnnnnnnnnnnnnnnnnnnnnnnnnnnnnnnnnnnnnnnnnnnnnnnnnnnnnnnnnnnnnnnnnnnnnnnnnnnnnnnnnnnnnnnnnnnnnnnnnnnnnnnnnnnnnnnnnnnnnnnnnnnnnnnnnnnnnnnnnnnnnnnnnnnnnnnnnnnnnnnnnnnnnnnnnnnnnnnnnnnnnnnnnnnnnnnnnnnnnnnnnnnnnnnnnnnnnnnnnnnnnnnnnnnnnnnnnnnnnnnnnnnnnnnnnnnnnnnnnnnnnnnnnnnnnnnnnnnnnnnnnnnnnnnnnnnnnnnnnnnnnnnnnnnnnnnnnnnnnnnnnnnnnnnnnnnnnnnnnnnnnnnnnnnnnnnnnnnnnnnnnnnnnnnnnnnnnnnnnnnnnnnnnnnnnnnnnnnnnnnnnnnnnnnnnnnnnnnnnnnnnnnnnnnnnnnnnnnnnnnnnnnnnnnnnnnnnnnnnnnnnnnnnnnnnnnnnnnnnnnnnnnnnnnnnnnnnnnnnnnnnnnnnnnnnnnnnnnnnnnnnnnnnnnnnnnnnnnnnnnnnnnnnnnnnnnnnnnnnnnnnnnnnnnnnnnnnnnnnnnnnnnnnnnnnnnnnnnnnnnnnnnnnnnnnnnnnnnnnnnnnnnnnnnnnnnnnnnnnnnnnnnnnnnnnnnnnnnnnnnnnnnnnnnnnnnnnnnnnnnnnnnnnnnnnnnnnnnnnnnnnnnnnnnnnnnnnnnnnnnnnnnnnnnnnnnnnnnnnnnnnnnnnnnnnnnnnnnnnnnnnnnnnnnnnnnnnnnnnnnnnnnnnnnnnnnnnnnnnnnnnnnnnnnnnnnnnnnnnnnnnnnnnnnnnnnnnnnnnnnnnnnnnnnnnnnnnnnnnnnnnnnnnnnnnnnnnnnnnnnnnnnnnnnnnnnnnnnnnnnnnnnnnnnnnnnnnnnnnnnnnnnnnnnnnnnnnnnnnnnnnnnnnnnnnnnnnnnnnnnnnnnnnnnnnnnnnnnnnnnnnnnnnnnnnnnnnnnnnnnnnnnnnnnnnnnnnnnnnnnnnnnnnnnnnnnnnnnnnnnnnnnnnnnnnnnnnnnnnnnnnnnnnnnnnnnnnnnnnnnnnnnnnnnnnnnnnnnnnnnnnnnnnnnnnnnnnnnnnnnnnnnnnnnnnnnnnnnnnnnnnnnnnnnnnnnnnnnnnnnnnnnnnnnnnnnnnnnnnnnnnnnnnnnnnnnnnnnnnnnnnnnnnnnnnnnnnnnnnnnnnnnnnnnnnnnnnnnnnnnnnnnnnnnnnnnnnnnnnnnnnnnnnnnnnnnnnnnnnnnnnnnnnnnnnnnnnnnnnnnnnnnnnnnnnnnnnnnnnnnnnnnnnnnnnnnnnnnnnnnnnnnnnnnnnnnnnnnnnnnnnnnnnnnnnnnnnnnnnnnnnnnnnnnnnnnnnnnnnnnnnnnnnnnnnnnnnnnnnnnnnnnnnnnnnnnnnnnnnnnnnnnnnnnnnnnnnnnnnnnnnnnnnnnnnnnnnnnnnnnnnnnnnnnnnnnnnnnnnnnnnnnnnnnnnnnnnnnnnnnnnnnnnnnnnnnnnnnnnnnnnnnnnnnnnnnnnnnnnnnnnnnnnnnnnnnnnnnnnnnnnnnnnnnnnnnnnnnnnnnnnnnnnnnnnnnnnnnnnnnnnnnnnnnnnnnnnnnnnnnnnnnnnnnnnnnnnnnnnnnnnnnnnnnnnnnnnnnnnnnnnnnnnnnnnnnnnnnnnnnnnnnnnnnnnnnnnnnnnnnnnnnnnnnnnnnnnnnnnnnnnnnnnnnnnnnnnnnnnnnnnnnnnnnnnnnnnnnnnnnnnnnnnnnnnnnnnnnnnnnnnnnnnnnnnnnnnnnnnnnnnnnnnnnnnnnnnnnnnnnnnnnnnnnnnnnnnnnnnnnnnnnnnnnnnnnnnnnnnnnnnnnnnnnnnnnnnnnnnnnnnnnnnnnnnnnnnnnnnnnnnnnnnnnnnnnnnnnnnnnnnnnnnnnnnnnnnnnnnnnnnnnnnnnnnnnnnnnnnnnnnnnnnnnnnnnnnnnnnnnnnnnnnnnnnnnnnnnnnnnnnnnnnnnnnnnnnnnnnnnnnnnnnnnnnnnnnnnnnnnnnnnnnnnnnnnnnnnnnnnnnnnnnnnnnnnnnnnnnnnnnnnnnnnnnnnnnnnnnnnnnnnnnnnnnnnnnnnnnnnnnnnnnnnnnnnnnnnnnnnnnnnnnnnnnnnnnnnnnnnnnnnnnnnnnnnnnnnnnnnnnnnnnnnnnnnnnnnnnnnnnnnnnnnnnnnnnnnnnnnnnnnnnnnnnnnnnnnnnnnnnnnnnnnnnnnnnnnnnnnnnnnnnnnnnnnnnnnnnnnnnnnnnnnnnnnnnnnnnnnnnnnnnnnnnnnnnnnnnnnnnnnnnnnnnnnnnnnnnnnnnnnnnnnnnnnnnnnnnnnnnnnnnnnnnnnnnnnnnnnnnnnnnnnnnnnnnnnnnnnnnnnnnnnnnnnnnnnnnnnnnnnnnnnnnnnnnnnnnnnnnnnnnnnnnnnnnnnnnnnnnnnnnnnnnnnnnnnnnnnnnnnnnnnnnnnnnnnnnnnnnnnnnnnnnnnnnnnnnnnnnnnnnnnnnnnnnnnnnnnnnnnnnnnnnnnnnnnnnnnnnnnnnnnnnnnnnnnnnnnnnnnnnnnnnnnnnnnnnnnnnnnnnnnnnnnnnnnnnnnnnnnnnnnnnnnnnnnnnnnnnnnnnnnnnnnnnnnnnnnnnnnnnnnnnnnnnnnnnnnnnnnnnnnnnnnnnnnnnnnnnnnnnnnnnnnnnnnnnnnnnnnnnnnnnnnnnnnnnnnnnnnnnnnnnnnnnnnnnnnnnnnnnnnnnnnnnnnnnnnnnnnnnnnnnnnnnnnnnnnnnnnnnnnnnnnnnnnnnnnnnnnnnnnnnnnnnnnnnnnnnnnnnnnnnnnnnnnnnnnnnnnnnnnnnnnnnnnnnnnnnnnnnnnnnnnnnnnnnnnnnnnnnnnnnnnnnnnnnnnnnnnnnnnnnnnnnnnnnnnnnnnnnnnnnnnnnnnnnnnnnnnnnnnnnnnnnnnnnnnnnnnnnnnnnnnnnnnnnnnnnnnnnnnnnnnnnnnnnnnnnnnnnnnnnnnnnnnnnnnnnnnnnnnnnnnnnnnnnnnnnnnnnnnnnnnnnnnnnnnnnnnnnnnnnnnnnnnnnnnnnnnnnnnnnnnnnnnnnnnnnnnnnnnnnnnnnnnnnnnnnnnnnnnnnnnnnnnnnnnnnnnnnnnnnnnnnnnnnnnnnnnnnnnnnnnnnnnnnnnnnnnnnnnnnnnnnnnnnnnnnnnnnnnnnnnnnnnnnnnnnnnnnnnnnnnnnnnnnnnnnnnnnnnnnnnnnnnnnnnnnnnnnnnnnnnnnnnnnnnnnnnnnnnnnnnnnnnnnnnnnnnnnnnnnnnnnnnnnnnnnnnnnnnnnnnnnnnnnnnnnnnnnnnnnnnnnnnnnnnnnnnnnnnnnnnnnnnnnnnnnnnnnnnnnnnnnnnnnnnnnnnnnnnnnnnnnnnnnnnnnnnnnnnnnnnnnnnnnnnnnnnnnnnnnnnnnnnnnnnnnnnnnnnnnnnnnnnnnnnnnnnnnnnnnnnnnnnnnnnnnnnnnnnnnnnnnnnnnnnnnnnnnnnnnnnnnnnnnnnnnnnnnnnnnnnnnnnnnnnnnnnnnnnnnnnnnnnnnnnnnnnnnnnnnnnnnnnnnnnnnnnnnnnnnnnnnnnnnnnnnnnnnnnnnnnnnnnnnnnnnnnnnnnnnnnnnnnnnnnnnnnnnnnnnnnnnnnnnnnnnnnnnnnnnnnnnnnnnnnnnnnnnnnnnnnnnnnnnnnnnnnnnnnnnnnnnnnnnnnnnnnnnnnnnnnnnnnnnnnnnnnnnnnnnnnnnnnnnnnnnnnnnnnnnnnnnnnnnnnnnnnnnnnnnnnnnnnnnnnnnnnnnnnnnnnnnnnnnnnnnnnnnnnnnnnnnnnnnnnnnnnnnnnnnnnnnnnnnnnnnnnnnnnnnnnnnnnnnnnnnnnnnnnnnnnnnnnnnnnnnnnnnnnnnnnnnnnnnnnnnnnnnnnnnnnnnnnnnnnnnnnnnnnnnnnnnnnnnnnnnnnnnnnnnnnnnnnnnnnnnnnnnnnnnnnnnnnnnnnnnnnnnnnnnnnnnnnnnnnnnnnnnnnnnnnnnnnnnnnnnnnnnnnnnnnnnnnnnnnnnnnnnnnnnnnnnnnnnnnnnnnnnnnnnnnnnnnnnnnnnnnnnnnnnnnnnnnnnnnnnnnnnnnnnnnnnnnnnnnnnnnnnnnnnnnnnnnnnnnnnnnnnnnnnnnnnnnnnnnnnnnnnnnnnnnnnnnnnnnnnnnnnnnnnnnnnnnnnnnnnnnnnnnnnnnnnnnnnnnnnnnnnnnnnnnnnnnnnnnnnnnnnnnnnnnnnnnnnnnnnnnnnnnnnnnnnnnnnnnnnnnnnnnnnnnnnnnnnnnnnnnnnnnnnnnnnnnnnnnnnnnnnnnnnnnnnnnnnnnnnnnnnnnnnnnnnnnnnnnnnnnnnnnnnnnnnnnnnnnnnnnnnnnnnnnnnnnnnnnnnnnnnnnnnnnnnnnnnnnnnnnnnnnnnnnnnnnnnnnnnnnnnnnnnnnnnnnnnnnnnnnnnnnnnnnnnnnnnnnnnnnnnnnnnnnnnnnnnnnnnnnnnnnnnnnnnnnnnnnnnnnnnnnnnnnnnnnnnnnnnnnnnnnnnnnnnnnnnnnnnnnnnnnnnnnnnnnnnnnnnnnnnnnnnnnnnnnnnnnnnnnnnnnnnnnnnnnnnnnnnnnnnnnnnnnnnnnnnnnnnnnnnnnnnnnnnnnnnnnnnnnnnnnnnnnnnnnnnnnnnnnnnnnnnnnnnnnnnnnnnnnnnnnnnnnnnnnnnnnnnnnnnnnnnnnnnnnnnnnnnnnnnnnnnnnnnnnnnnnnnnnnnnnnnnnnnnnnnnnnnnnnnnnnnnnnnnnnnnnnnnnnnnnnnnnnnnnnnnnnnnnnnnnnnnnnnnnnnnnnnnnnnnnnnnnnnnnnnnnnnnnnnnnnnnnnnnnnnnnnnnnnnnnnnnnnnnnnnnnnnnnnnnnnnnnnnnnnnnnnnnnnnnnnnnnnnnnnnnnnnnnnnnnnnnnnnnnnnnnnnnnnnnnnnnnnnnnnnnnnnnnnnnnnnnnnnnnnnnnnnnnnnnnnnnnnnnnnnnnnnnnnnnnnnnnnnnnnnnnnnnnnnnnnnnnnnnnnnnnnnnnnnnnnnnnnnnnnnnnnnnnnnnnnnnnnnnnnnnnnnnnnnnnnnnnnnnnnnnnnnnnnnnnnnnnnnnnnnnnnnnnnnnnnnnnnnnnnnnnnnnnnnnnnnnnnnnnnnnnnnnnnnnnnnnnnnnnnnnnnnnnnnnnnnnnnnnnnnnnnnnnnnnnnnnnnnnnnnnnnnnnnnnnnnnnnnnnnnnnnnnnnnnnnnnnnnnnnnnnnnnnnnnnnnnnnnnnnnnnnnnnnnnnnnnnnnnnnnnnnnnnnnnnnnnnnnnnnnnnnnnnnnnnnnnnnnnnnnnnnnnnnnnnnnnnnnnnnnnnnnnnnnnnnnnnnnnnnnnnnnnnnnnnnnnnnnnnnnnnnnnnnnnnnnnnnnnnnnnnnnnnnnnnnnnnnnnnnnnnnnnnnnnnnnnnnnnnnnnnnnnnnnnnnnnnnnnnnnnnnnnnnnnnnnnnnnnnnnnnnnnnnnnnnnnnnnnnnnnnnnnnnnnnnnnnnnnnnnnnnnnnnnnnnnnnnnnnnnnnnnnnnnnnnnnnnnnnnnnnnnnnnnnnnnnnnnnnnnnnnnnnnnnnnnnnnnnnnnnnnnnnnnnnnnnnnnnnnnnnnnnnnnnnnnnnnnnnnnnnnnnnnnnnnnnnnnnnnnnnnnnnnnnnnnnnnnnnnnnnnnnnnnnnnnnnnnnnnnnnnnnnnnnnnnnnnnnnnnnnnnnnnnnnnnnnnnnnnnnnnnnnnnnnnnnnnnnnnnnnnnnnnnnnnnnnnnnnnnnnnnnnnnnnnnnnnnnnnnnnnnnnnnnnnnnnnnnnnnnnnnnnnnnnnnnnnnnnnnnnnnnnnnnnnnnnnnnnnnnnnnnnnnnnnnnnnnnnnnnnnnnnnnnnnnnnnnnnnnnnnnnnnnnnnnnnnnnnnnnnnnnnnnnnnnnnnnnnnnnnnnnnnnnnnnnnnnnnnnnnnnnnnnnnnnnnnnnnnnnnnnnnnnnnnnnnnnnnnnnnnnnnnnnnnnnnnnnnnnnnnnnnnnnnnnnnnnnnnnnnnnnnnnnnnnnnnnnnnnnnnnnnnnnnnnnnnnnnnnnnnnnnnnnnnnnnnnnnnnnnnnnnnnnnnnnnnnnnnnnnnnnnnnnnnnnnnnnnnnnnnnnnnnnnnnnnnnnnnnnnnnnnnnnnnnnnnnnnnnnnnnnnnnnnnnnnnnnnnnnnnnnnnnnnnnnnnnnnnnnnnnnnnnnnnnnnnnnnnnnnnnnnnnnnnnnnnnnnnnnnnnnnnnnnnnnnnnnnnnnnnnnnnnnnnnnnnnnnnnnnnnnnnnnnnnnnnnnnnnnnnnnnnnnnnnnnnnnnnnnnnnnnnnnnnnnnnnnnnnnnnnnnnnnnnnnnnnnnnnnnnnnnnnnnnnnnnnnnnnnnnnnnnnnnnnnnnnnnnnnnnnnnnnnnnnnnnnnnnnnnnnnnnnnnnnnnnnnnnnnnnnnnnnnnnnnnnnnnnnnnnnnnnnnnnnnnnnnnnnnnnnnnnnnnnnnnnnnnnnnnnnnnnnnnnnnnnnnnnnnnnnnnnnnnnnnnnnnnnnnnnnnnnnnnnnnnnnnnnnnnnnnnnnnnnnnnnnnnnnnnnnnnnnnnnnnnnnnnnnnnnnnnnnnnnnnnnnnnnnnnnnnnnnnnnnnnnnnnnnnnnnnnnnnnnnnnnnnnnnnnnnnnnnnnnnnnnnnnnnnnnnnnnnnnnnnnnnnnnnnnnnnnnnnnnnnnnnnnnnnnnnnnnnnnnnnnnnnnnnnnnnnnnnnnnnnnnnnnnnnnnnnnnnnnnnnnnnnnnnnnnnnnnnnnnnnnnnnnnnnnnnnnnnnnnnnnnnnnnnnnnnnnnnnnnnnnnnnnnnnnnnnnnnnnnnnnnnnnnnnnnnnnnnnnnnnnnnnnnnnnnnnnnnnnnnnnnnnnnnnnnnnnnnnnnnnnnnnnnnnnnnnnnnnnnnnnnnnnnnnnnnnnnnnnnnnnnnnnnnnnnnnnnnnnnnnnnnnnnnnnnnnnnnnnnnnnnnnnnnnnnnnnnnnnnnnnnnnnnnnnnnnnnnnnnnnnnnnnnnnnnnnnnnnnnnnnnnnnnnnnnnnnnnnnnnnnnnnnnnnnnnnnnnnnnnnnnnnnnnnnnnnnnnnnnnnnnnnnnnnnnnnnnnnnnnnnnnnnnnnnnnnnnnnnnnnnnnnnnnnnnnnnnnnnnnnnnnnnnnnnnnnnnnnnnnnnnnnnnnnnnnnnnnnnnnnnnnnnnnnnnnnnnnnnnnnnnnnnnnnnnnnnnnnnnnnnnnnnnnnnnnnnnnnnnnnnnnnnnnnnnnnnnnnnnnnnnnnnnnnnnnnnnnnnnnnnnnnnnnnnnnnnnnnnnnnnnnnnnnnnnnnnnnnnnnnnnnnnnnnnnnnnnnnnnnnnnnnnnnnnnnnnnnnnnnnnnnnnnnnnnnnnnnnnnnnnnnnnnnnnnnnnnnnnnnnnnnnnnnnnnnnnnnnnnnnnnnnnnnnnnnnnnnnnnnnnnnnnnnnnnnnnnnnnnnnnnnnnnnnnnnnnnnnnnnnnnnnnnnnnnnnnnnnnnnnnnnnnnnnnnnnnnnnnnnnnnnnnnnnnnnnnnnnnnnnnnnnnnnnnnnnnnnnnnnnnnnnnnnnnnnnnnnnnnnnnnnnnnnnnnnnnnnnnnnnnnnnnnnnnnnnnnnnnnnnnnnnnnnnnnnnnnnnnnnnnnnnnnnnnnnnnnnnnnnnnnnnnnnnnnnnnnnnnnnnnnnnnnnnnnnnnnnnnnnnnnnnnnnnnnnnnnnnnnnnnnnnnnnnnnnnnnnnnnnnnnnnnnnnnnnnnnnnnnnnnnnnnnnnnnnnnnnnnnnnnnnnnnnnnnnnnnnnnnnnnnnnnnnnnnnnnnnnnnnnnnnnnnnnnnnnnnnnnnnnnnnnnnnnnnnnnnnnnnnnnnnnnnnnnnnnnnnnnnnnnnnnnnnnnnnnnnnnnnnnnnnnnnnnnnnnnnnnnnnnnnnnnnnnnnnnnnnnnnnnnnnnnnnnnnnnnnnnnnnnnnnnnnnnnnnnnnnnnnnnnnnnnnnnnnnnnnnnnnnnnnnnnnnnnnnnnnnnnnnnnnnnnnnnnnnnnnnnnnnnnnnnnnnnnnnnnnnnnnnnnnnnnnnnnnnnnnnnnnnnnnnnnnnnnnnnnnnnnnnnnnnnnnnnnnnnnnnnnnnnnnnnnnnnnnnnnnnnnnnnnnnnnnnnnnnnnnnnnnnnnnnnnnnnnnnnnnnnnnnnnnnnnnnnnnnnnnnnnnnnnnnnnnnnnnnnnnnnnnnnnnnnnnnnnnnnnnnnnnnnnnnnnnnnnnnnnnnnnnnnnnnnnnnnnnnnnnnnnnnnnnnnnnnnnnnnnnnnnnnnnnnnnnnnnnnnnnnnnnnnnnnnnnnnnnnnnnnnnnnnnnnnnnnnnnnnnnnnnnnnnnnnnnnnnnnnnnnnnnnnnnnnnnnnnnnnnnnnnnnnnnnnnnnnnnnnnnnnnnnnnnnnnnnnnnnnnnnnnnnnnnnnnnnnnnnnnnnnnnnnnnnnnnnnnnnnnnnnnnnnnnnnnnnnnnnnnnnnnnnnnnnnnnnnnnnnnnnnnnnnnnnnnnnnnnnnnnnnnnnnnnnnnnnnnnnnnnnnnnnnnnnnnnnnnnnnnnnnnnnnnnnnnnnnnnnnnnnnnnnnnnnnnnnnnnnnnnnnnnnnnnnnnnnnnnnnnnnnnnnnnnnnnnnnnnnnnnnnnnnnnnnnnnnnnnnnnnnnnnnnnnnnnnnnnnnnnnnnnnnnnnnnnnnnnnnnnnnnnnnnnnnnnnnnnnnnnnnnnnnnnnnnnnnnnnnnnnnnnnnnnnnnnnnnnnnnnnnnnnnnnnnnnnnnnnnnnnnnnnnnnnnnnnnnnnnnnnnnnnnnnnnnnnnnnnnnnnnnnnnnnnnnnnnnnnnnnnnnnnnnnnnnnnnnnnnnnnnnnnnnnnnnnnnnnnnnnnnnnnnnnnnnnnnnnnnnnnnnnnnnnnnnnnnnnnnnnnnnnnnnnnnnnnnnnnnnnnnnnnnnnnnnnnnnnnnnnnnnnnnnnnnnnnnnnnnnnnnnnnnnnnnnnnnnnnnnnnnnnnnnnnnnnnnnnnnnnnnnnnnnnnnnnnnnnnnnnnnnnnnnnnnnnnnnnnnnnnnnnnnnnnnnnnnnnnnnnnnnnnnnnnnnnnnnnnnnnnnnnnnnnnnnnnnnnnnnnnnnnnnnnnnnnnnnnnnnnnnnnnnnnnnnnnnnnnnnnnnnnnnnnnnnnnnnnnnnnnnnnnnnnnnnnnnnnnnnnnnnnnnnnnnnnnnnnnnnnnnnnnnnnnnnnnnnnnnnnnnnnnnnnnnnnnnnnnnnnnnnnnnnnnnnnnnnnnnnnnnnnnnnnnnnnnnnnnnnnnnnnnnnnnnnnnnnnnnnnnnnnnnnnnnnnnnnnnnnnnnnnnnnnnnnnnnnnnnnnnnnnnnnnnnnnnnnnnnnnnnnnnnnnnnnnnnnnnnnnnnnnnnnnnnnnnnnnnnnnnnnnnnnnnnnnnnnnnnnnnnnnnnnnnnnnnnnnnnnnnnnnnnnnnnnnnnnnnnnnnnnnnnnnnnnnnnnnnnnnnnnnnnnnnnnnnnnnnnnnnnnnnnnnnnnnnnnnnnnnnnnnnnnnnnnnnnnnnnnnnnnnnnnnnnnnnnnnnnnnnnnnnnnnnnnnnnnnnnnnnnnnnnnnnnnnnnnnnnnnnnnnnnnnnnnnnnnnnnnnnnnnnnnnnnnnnnnnnnnnnnnnnnnnnnnnnnnnnnnnnnnnnnnnnnnnnnnnnnnnnnnnnnnnnnnnnnnnnnnnnnnnnnnnnnnnnnnnnnnnnnnnnnnnnnnnnnnnnnnnnnnnnnnnnnnnnnnnnnnnnnnnnnnnnnnnnnnnnnnnnnnnnnnnnnnnnnnnnnnnnnnnnnnnnnnnnnnnnnnnnnnnnnnnnnnnnnnnnnnnnnnnnnnnnnnnnnnnnnnnnnnnnnnnnnnnnnnnnnnnnnnnnnnnnnnnnnnnnnnnnnnnnnnnnnnnnnnnnnnnnnnnnnnnnnnnnnnnnnnnnnnnnnnnnnnnnnnnnnnnnnnnnnnnnnnnnnnnnnnnnnnnnnnnnnnnnnnnnnnnnnnnnnnnnnnnnnnnnnnnnnnnnnnnnnnnnnnnnnnnnnnnnnnnnnnnnnnnnnnnnnnnnnnnnnnnnnnnnnnnnnnnnnnnnnnnnnnnnnnnnnnnnnnnnnnnnnnnnnnnnnnnnnnnnnnnnnnnnnnnnnnnnnnnnnnnnnnnnnnnnnnnnnnnnnnnnnnnnnnnnnnnnnnnnnnnnnnnnnnnnnnnnnnnnnnnnnnnnnnnnnnnnnnnnnnnnnnnnnnnnnnnnnnnnnnnnnnnnnnnnnnnnnnnnnnnnnnnnnnnnnnnnnnnnnnnnnnnnnnnnnnnnnnnnnnnnnnnnnnnnnnnnnnnnnnnnnnnnnnnnnnnnnnnnnnnnnnnnnnnnnnnnnnnnnnnnnnnnnnnnnnnnnnnnnnnnnnnnnnnnnnnnnnnnnnnnnnnnnnnnnnnnnnnnnnnnnnnnnnnnnnnnnnnnnnnnnnnnnnnnnnnnnnnnnnnnnnnnnnnnnnnnnnnnnnnnnnnnnnnnnnnnnnnnnnnnnnnnnnnnnnnnnnnnnnnnnnnnnnnnnnnnnnnnnnnnnnnnnnnnnnnnnnnnnnnnnnnnnnnnnnnnnnnnnnnnnnnnnnnnnnnnnnnnnnnnnnnnnnnnnnnnnnnnnnnnnnnnnnnnnnnnnnnnnnnnnnnnnnnnnnnnnnnnnnnnnnnnnnnnnnnnnnnnnnnnnnnnnnnnnnnnnnnnnnnnnnnnnnnnnnnnnnnnnnnnnnnnnnnnnnnnnnnnnnnnnnnnnnnnnnnnnnnnnnnnnnnnnnnnnnnnnnnnnnnnnnnnnnnnnnnnnnnnnnnnnnnnnnnnnnnnnnnnnnnnnnnnnnnnnnnnnnnnnnnnnnnnnnnnnnnnnnnnnnnnnnnnnnnnnnnnnnnnnnnnnnnnnnnnnnnnnnnnnnnnnnnnnnnnnnnnnnnnnnnnnnnnnnnnnnnnnnnnnnnnnnnnnnnnnnnnnnnnnnnnnnnnnnnnnnnnnnnnnnnnnnnnnnnnnnnnnnnnnnnnnnnnnnnnnnnnnnnnnnnnnnnnnnnnnnnnnnnnnnnnnnnnnnnnnnnnnnnnnnnnnnnnnnnnnnnnnnnnnnnnnnnnnnnnnnnnnnnnnnnnnnnnnnnnnnnnnnnnnnnnnnnnnnnnnnnnnnnnnnnnnnnnnnnnnnnnnnnnnnnnnnnnnnnnnnnnnnnnnnnnnnnnnnnnnnnnnnnnnnnnnnnnnnnnnnnnnnnnnnnnnnnnnnnnnnnnnnnnnnnnnnnnnnnnnnnnnnnnnnnnnnnnnnnnnnnnnnnnnnnnnnnnnnnnnnnnnnnnnnnnnnnnnnnnnnnnnnnnnnnnnnnnnnnnnnnnnnnnnnnnnnnnnnnnnnnnnnnnnnnnnnnnnnnnnnnnnnnnnnnnnnnnnnnnnnnnnnnnnnnnnnnnnnnnnnnnnnnnnnnnnnnnnnnnnnnnnnnnnnnnnnnnnnnnnnnnnnnnnnnnnnnnnnnnnnnnnnnnnnnnnnnnnnnnnnnnnnnnnnnnnnnnnnnnnnnnnnnnnnnnnnnnnnnnnnnnnnnnnnnnnnnnnnnnnnnnnnnnnnnnnnnnnnnnnnnnnnnnnnnnnnnnnnnnnnnnnnnnnnnnnnnnnnnnnnnnnnnnnnnnnnnnnnnnnnnnnnnnnnnnnnnnnnnnnnnnnnnnnnnnnnnnnnnnnnnnnnnnnnnnnnnnnnnnnnnnnnnnnnnnnnnnnnnnnnnnnnnnnnnnnnnnnnnnnnnnnnnnnnnnnnnnnnnnnnnnnnnnnnnnnnnnnnnnnnnnnnnnnnnnnnnnnnnnnnnnnnnnnnnnnnnnnnnnnnnnnnnnnnnnnnnnnnnnnnnnnnnnnnnnnnnnnnnnnnnnnnnnnnnnnnnnnnnnnnnnnnnnnnnnnnnnnnnnnnnnnnnnnnnnnnnnnnnnnnnnnnnnnnnnnnnnnnnnnnnnnnnnnnnnnnnnnnnnnnnnnnnnnnnnnnnnnnnnnnnnnnnnnnnnnnnnnnnnnnnnnnnnnnnnnnnnnnnnnnnnnnnnnnnnnnnnnnnnnnnnnnnnnnnnnnnnnnnnnnnnnnnnnnnnnnnnnnnnnnnnnnnnnnnnnnnnnnnnnnnnnnnnnnnnnnnnnnnnnnnnnnnnnnnnnnnnnnnnnnnnnnnnnnnnnnnnnnnnnnnnnnnnnnnnnnnnnnnnnnnnnnnnnnnnnnnnnnnnnnnnnnnnnnnnnnnnnnnnnnnnnnnnnnnnnnnnnnnnnnnnnnnnnnnnnnnnnnnnnnnnnnnnnnnnnnnnnnnnnnnnnnnnnnnnnnnnnnnnnnnnnnnnnnnnnnnnnnnnnnnnnnnnnnnnnnnnnnnnnnnnnnnnnnnnnnnnnnnnnnnnnnnnnnnnnnnnnnnnnnnnnnnnnnnnnnnnnnnnnnnnnnnnnnnnnnnnnnnnnnnnnnnnnnnnnnnnnnnnnnnnnnnnnnnnnnnnnnnnnnnnnnnnnnnnnnnnnnnnnnnnnnnnnnnnnnnnnnnnnnnnnnnnnnnnnnnnnnnnnnnnnnnnnnnnnnnnnnnnnnnnnnnnnnnnnnnnnnnnnnnnnnnnnnnnnnnnnnnnnnnnnnnnnnnnnnnnnnnnnnnnnnnnnnnnnnnnnnnnnnnnnnnnnnnnnnnnnnnnnnnnnnnnnnnnnnnnnnnnnnnnnnnnnnnnnnnnnnnnnnnnnnnnnnnnnnnnnnnnnnnnnnnnnnnnnnnnnnnnnnnnnnnnnnnnnnnnnnnnnnnnnnnnnnnnnnnnnnnnnnnnnnnnnnnnnnnnnnnnnnnnnnnnnnnnnnnnnnnnnnnnnnnnnnnnnnnnnnnnnnnnnnnnnnnnnnnnnnnnnnnnnnnnnnnnnnnnnnnnnnnnnnnnnnnnnnnnnnnnnnnnnnnnnnnnnnnnnnnnnnnnnnnnnnnnnnnnnnnnnnnnnnnnnnnnnnnnnnnnnnnnnnnnnnnnnnnnnnnnnnnnnnnnnnnnnnnnnnnnnnnnnnnnnnnnnnnnnnnnnnnnnnnnnnnnnnnnnnnnnnnnnnnnnnnnnnnnnnnnnnnnnnnnnnnnnnnnnnnnnnnnnnnnnnnnnnnnnnnnnnnnnnnnnnnnnnnnnnnnnnnnnnnnnnnnnnnnnnnnnnnnnnnnnnnnnnnnnnnnnnnnnnnnnnnnnnnnnnnnnnnnnnnnnnnnnnnnnnnnnnnnnnnnnnnnnnnnnnnnnnnnnnnnnnnnnnnnnnnnnnnnnnnnnnnnnnnnnnnnnnnnnnnnnnnnnnnnnnnnnnnnnnnnnnnnnnnnnnnnnnnnnnnnnnnnnnnnnnnnnnnnnnnnnnnnnnnnnnnnnnnnnnnnnnnnnnnnnnnnnnnnnnnnnnnnnnnnnnnnnnnnnnnnnnnnnnnnnnnnnnnnnnnnnnnnnnnnnnnnnnnnnnnnnnnnnnnnnnnnnnnnnnnnnnnnnnnnnnnnnnnnnnnnnnnnnnnnnnnnnnnnnnnnnnnnnnnnnnnnnnnnnnnnnnnnnnnnnnnnnnnnnnnnnnnnnnnnnnnnnnnnnnnnnnnnnnnnnnnnnnnnnnnnnnnnnnnnnnnnnnnnnnnnnnnnnnnnnnnnnnnnnnnnnnnnnnnnnnnnnnnnnnnnnnnnnnnnnnnnnnnnnnnnnnnnnnnnnnnnnnnnnnnnnnnnnnnnnnnnnnnnnnnnnnnnnnnnnnnnnnnnnnnnnnnnnnnnnnnnnnnnnnnnnnnnnnnnnnnnnnnnnnnnnnnnnnnnnnnnnnnnnnnnnnnnnnnnnnnnnnnnnnnnnnnnnnnnnnnnnnnnnnnnnnnnnnnnnnnnnnnnnnnnnnnnnnnnnnnnnnnnnnnnnnnnnnnnnnnnnnnnnnnnnnnnnnnnnnnnnnnnnnnnnnnnnnnnnnnnnnnnnnnnnnnnnnnnnnnnnnnnnnnnnnnnnnnnnnnnnnnnnnnnnnnnnnnnnnnnnnnnnnnnnnnnnnnnnnnnnnnnnnnnnnnnnnnnnnnnnnnnnnnnnnnnnnnnnnnnnnnnnnnnnnnnnnnnnnnnnnnnnnnnnnnnnnnnnnnnnnnnnnnnnnnnnnnnnnnnnnnnnnnnnnnnnnnnnnnnnnnnnnnnnnnnnnnnnnnnnnnnnnnnnnnnnnnnnnnnnnnnnnnnnnnnnnnnnnnnnnnnnnnnnnnnnnnnnnnnnnnnnnnnnnnnnnnnnnnnnnnnnnnnnnnnnnnnnnnnnnnnnnnnnnnnnnnnnnnnnnnnnnnnnnnnnnnnnnnnnnnnnnnnnnnnnnnnnnnnnnnnnnnnnnnnnnnnnnnnnnnnnnnnnnnnnnnnnnnnnnnnnnnnnnnnnnnnnnnnnnnnnnnnnnnnnnnnnnnnnnnnnnnnnnnnnnnnnnnnnnnnnnnnnnnnnnnnnnnnnnnnnnnnnnnnnnnnnnnnnnnnnnnnnnnnnnnnnnnnnnnnnnnnnnnnnnnnnnnnnnnnnnnnnnnnnnnnnnnnnnnnnnnnnnnnnnnnnnnnnnnnnnnnnnnnnnnnnnnnnnnnnnnnnnnnnnnnnnnnnnnnnnnnnnnnnnnnnnnnnnnnnnnnnnnnnnnnnnnnnnnnnnnnnnnnnnnnnnnnnnnnnnnnnnnnnnnnnnnnnnnnnnnnnnnnnnnnnnnnnnnnnnnnnnnnnnnnnnnnnnnnnnnnnnnnnnnnnnnnnnnnnnnnnnnnnnnnnnnnnnnnnnnnnnnnnnnnnnnnnnnnnnnnnnnnnnnnnnnnnnnnnnnnnnnnnnnnnnnnnnnnnnnnnnnnnnnnnnnnnnnnnnnnnnnnnnnnnnnnnnnnnnnnnnnnnnnnnnnnnnnnnnnnnnnnnnnnnnnnnnnnnnnnnnnnnnnnnnnnnnnnnnnnnnnnnnnnnnnnnnnnnnnnnnnnnnnnnnnnnnnnnnnnnnnnnnnnnnnnnnnnnnnnnnnnnnnnnnnnnnnnnnnnnnnnnnnnnnnnnnnnnnnnnnnnnnnnnnnnnnnnnnnnnnnnnnnnnnnnnnnnnnnnnnnnnnnnnnnnnnnnnnnnnnnnnnnnnnnnnnnnnnnnnnnnnnnnnnnnnnnnnnnnnnnnnnnnnnnnnnnnnnnnnnnnnnnnnnnnnnnnnnnnnnnnnnnnnnnnnnnnnnnnnnnnnnnnnnnnnnnnnnnnnnnnnnnnnnnnnnnnnnnnnnnnnnnnnnnnnnnnnnnnnnnnnnnnnnnnnnnnnnnnnnnnnnnnnnnnnnnnnnnnnnnnnnnnnnnnnnnnnnnnnnnnnnnnnnnnnnnnnnnnnnnnnnnnnnnnnnnnnnnnnnnnnnnnnnnnnnnnnnnnnnnnnnnnnnnnnnnnnnnnnnnnnnnnnnnnnnnnnnnnnnnnnnnnnnnnnnnnnnnnnnnnnnnnnnnnnnnnnnnnnnnnnnnnnnnnnnnnnnnnnnnnnnnnnnnnnnnnnnnnnnnnnnnnnnnnnnnnnnnnnnnnnnnnnnnnnnnnnnnnnnnnnnnnnnnnnnnnnnnnnnnnnnnnnnnnnnnnnnnnnnnnnnnnnnnnnnnnnnnnnnnnnnnnnnnnnnnnnnnnnnnnnnnnnnnnnnnnnnnnnnnnnnnnnnnnnnnnnnnnnnnnnnnnnnnnnnnnnnnnnnnnnnnnnnnnnnnnnnnnnnnnnnnnnnnnnnnnnnnnnnnnnnnnnnnnnnnnnnnnnnnnnnnnnnnnnnnnnnnnnnnnnnnnnnnnnnnnnnnnnnnnnnnnnnnnnnnnnnnnnnnnnnnnnnnnnnnnnnnnnnnnnnnnnnnnnnnnnnnnnnnnnnnnnnnnnnnnnnnnnnnnnnnnnnnnnnnnnnnnnnnnnnnnnnnnnnnnnnnnnnnnnnnnnnnnnnnnnnnnnnnnnnnnnnnnnnnnnnnnnnnnnnnnnnnnnnnnnnnnnnnnnnnnnnnnnnnnnnnnnnnnnnnnnnnnnnnnnnnnnnnnnnnnnnnnnnnnnnnnnnnnnnnnnnnnnnnnnnnnnnnnnnnnnnnnnnnnnnnnnnnnnnnnnnnnnnnnnnnnnnnnnnnnnnnnnnnnnnnnnnnnnnnnnnnnnnnnnnnnnnnnnnnnnnnnnnnnnnnnnnnnnnnnnnnnnnnnnnnnnnnnnnnnnnnnnnnnnnnnnnnnnnnnnnnnnnnnnnnnnnnnnnnnnnnnnnnnnnnnnnnnnnnnnnnnnnnnnnnnnnnnnnnnnnnnnnnnnnnnnnnnnnnnnnnnnnnnnnnnnnnnnnnnnnnnnnnnnnnnnnnnnnnnnnnnnnnnnnnnnnnnnnnnnnnnnnnnnnnnnnnnnnnnnnnnnnnnnnnnnnnnnnnnnnnnnnnnnnnnnnnnnnnnnnnnnnnnnnnnnnnnnnnnnnnnnnnnnnnnnnnnnnnnnnnnnnnnnnnnnnnnnnnnnnnnnnnnnnnnnnnnnnnnnnnnnnnnnnnnnnnnnnnnnnnnnnnnnnnnnnnnnnnnnnnnnnnnnnnnnnnnnnnnnnnnnnnnnnnnnnnnnnnnnnnnnnnnnnnnnnnnnnnnnnnnnnnnnnnnnnnnnnnnnnnnnnnnnnnnnnnnnnnnnnnnnnnnnnnnnnnnnnnnnnnnnnnnnnnnnnnnnnnnnnnnnnnnnnnnnnnnnnnnnnnnnnnnnnnnnnnnnnnnnnnnnnnnnnnnnnnnnnnnnnnnnnnnnnnnnnnnnnnnnnnnnnnnnnnnnnnnnnnnnnnnnnnnnnnnnnnnnnnnnnnnnnnnnnnnnnnnnnnnnnnnnnnnnnnnnnnnnnnnnnnnnnnnnnnnnnnnnnnnnnnnnnnnnnnnnnnnnnnnnnnnnnnnnnnnnnnnnnnnnnnnnnnnnnnnnnnnnnnnnnnnnnnnnnnnnnnnnnnnnnnnnnnnnnnnnnnnnnnnnnnnnnnnnnnnnnnnnnnnnnnnnnnnnnnnnnnnnnnnnnnnnnnnnnnnnnnnnnnnnnnnnnnnnnnnnnnnnnnnnnnnnnnnnnnnnnnnnnnnnnnnnnnnnnnnnnnnnnnnnnnnnnnnnnnnnnnnnnnnnnnnnnnnnnnnnnnnnnnnnnnnnnnnnnnnnnnnnnnnnnnnnnnnnnnnnnnnnnnnnnnnnnnnnnnnnnnnnnnnnnnnnnnnnnnnnnnnnnnnnnnnnnnnnnnnnnnnnnnnnnnnnnnnnnnnnnnnnnnnnnnnnnnnnnnnnnnnnnnnnnnnnnnnnnnnnnnnnnnnnnnnnnnnnnnnnnnnnnnnnnnnnnnnnnnnnnnnnnnnnnnnnnnnnnnnnnnnnnnnnnnnnnnnnnnnnnnnnnnnnnnnnnnnnnnnnnnnnnnnnnnnnnnnnnnnnnnnnnnnnnnnnnnnnnnnnnnnnnnnnnnnnnnnnnnnnnnnnnnnnnnnnnnnnnnnnnnnnnnnnnnnnnnnnnnnnnnnnnnnnnnnnnnnnnnnnnnnnnnnnnnnnnnnnnnnnnnnnnnnnnnnnnnnnnnnnnnnnnnnnnnnnnnnnnnnnnnnnnnnnnnnnnnnnnnnnnnnnnnnnnnnnnnnnnnnnnnnnnnnnnnnnnnnnnnnnnnnnnnnnnnnnnnnnnnnnnnnnnnnnnnnnnnnnnnnnnnnnnnnnnnnnnnnnnnnnnnnnnnnnnnnnnnnnnnnnnnnnnnnnnnnnnnnnnnnnnnnnnnnnnnnnnnnnnnnnnnnnnnnnnnnnnnnnnnnnnnnnnnnnnnnnnnnnnnnnnnnnnnnnnnnnnnnnnnnnnnnnnnnnnnnnnnnnnnnnnnnnnnnnnnnnnnnnnnnnnnnnnnnnnnnnnnnnnnnnnnnnnnnnnnnnnnnnnnnnnnnnnnnnnnnnnnnnnnnnnnnnnnnnnnnnnnnnnnnnnnnnnnnnnnnnnnnnnnnnnnnnnnnnnnnnnnnnnnnnnnnnnnnnnnnnnnnnnnnnnnnnnnnnnnnnnnnnnnnnnnnnnnnnnnnnnnnnnnnnnnnnnnnnnnnnnnnnnnnnnnnnnnnnnnnnnnnnnnnnnnnnnnnnnnnnnnnnnnnnnnnnnnnnnnnnnnnnnnnnnnnnnnnnnnnnnnnnnnnnnnnnnnnnnnnnnnnnnnnnnnnnnnnnnnnnnnnnnnnnnnnnnnnnnnnnnnnnnnnnnnnnnnnnnnnnnnnnnnnnnnnnnnnnnnnnnnnnnnnnnnnnnnnnnnnnnnnnnnnnnnnnnnnnnnnnnnnnnnnnnnnnnnnnnnnnnnnnnnnnnnnnnnnnnnnnnnnnnnnnnnnnnnnnnnnnnnnnnnnnnnnnnnnnnnnnnnnnnnnnnnnnnnnnnnnnnnnnnnnnnnnnnnnnnnnnnnnnnnnnnnnnnnnnnnnnnnnnnnnnnnnnnnnnnnnnnnnnnnnnnnnnnnnnnnnnnnnnnnnnnnnnnnnnnnnnnnnnnnnnnnnnnnnnnnnnnnnnnnnnnnnnnnnnnnnnnnnnnnnnnnnnnnnnnnnnnnnnnnnnnnnnnnnnnnnnnnnnnnnnnnnnnnnnnnnnnnnnnnnnnnnnnnnnnnnnnnnnnnnnnnnnnnnnnnnnnnnnnnnnnnnnnnnnnnnnnnnnnnnnnnnnnnnnnnnnnnnnnnnnnnnnnnnnnnnnnnnnnnnnnnnnnnnnnnnnnnnnnnnnnnnnnnnnnnnnnnnnnnnnnnnnnnnnnnnnnnnnnnnnnnnnnnnnnnnnnnnnnnnnnnnnnnnnnnnnnnnnnnnnnnnnnnnnnnnnnnnnnnnnnnnnnnnnnnnnnnnnnnnnnnnnnnnnnnnnnnnnnnnnnnnnnnnnnnnnnnnnnnnnnnnnnnnnnnnnnnnnnnnnnnnnnnnnnnnnnnnnnnnnnnnnnnnnnnnnnnnnnnnnnnnnnnnnnnnnnnnnnnnnnnnnnnnnnnnnnnnnnnnnnnnnnnnnnnnnnnnnnnnnnnnnnnnnnnnnnnnnnnnnnnnnnnnnnnnnnnnnnnnnnnnnnnnnnnnnnnnnnnnnnnnnnnnnnnnnnnnnnnnnnnnnnnnnnnnnnnnnnnnnnnnnnnnnnnnnnnnnnnnnnnnnnnnnnnnnnnnnnnnnnnnnnnnnnnnnnnnnnnnnnnnnnnnnnnnnnnnnnnnnnnnnnnnnnnnnnnnnnnnnnnnnnnnnnnnnnnnnnnnnnnnnnnnnnnnnnnnnnnnnnnnnnnnnnnnnnnnnnnnnnnnnnnnnnnnnnnnnnnnnnnnnnnnnnnnnnnnnnnnnnnnnnnnnnnnnnnnnnnnnnnnnnnnnnnnnnnnnnnnnnnnnnnnnnnnnnnnnnnnnnnnnnnnnnnnnnnnnnnnnnnnnnnnnnnnnnnnnnnnnnnnnnnnnnnnnnnnnnnnnnnnnnnnnnnnnnnnnnnnnnnnnnnnnnnnnnnnnnnnnnnnnnnnnnnnnnnnnnnnnnnnnnnnnnnnnnnnnnnnnnnnnnnnnnnnnnnnnnnnnnnnnnnnnnnnnnnnnnnnnnnnnnnnnnnnnnnnnnnnnnnnnnnnnnnnnnnnnnnnnnnnnnnnnnnnnnnnnnnnnnnnnnnnnnnnnnnnnnnnnnnnnnnnnnnnnnnnnnnnnnnnnnnnnnnnnnnnnnnnnnnnnnnnnnnnnnnnnnnnnnnnnnnnnnnnnnnnnnnnnnnnnnnnnnnnnnnnnnnnnnnnnnnnnnnnnnnnnnnnnnnnnnnnnnnnnnnnnnnnnnnnnnnnnnnnnnnnnnnnnnnnnnnnnnnnnnnnnnnnnnnnnnnnnnnnnnnnnnnnnnnnnnnnnnnnnnnnnnnnnnnnnnnnnnnnnnnnnnnnnnnnnnnnnnnnnnnnnnnnnnnnnnnnnnnnnnnnnnnnnnnnnnnnnnnnnnnnnnnnnnnnnnnnnnnnnnnnnnnnnnnnnnnnnnnnnnnnnnnnnnnnnnnnnnnnnnnnnnnnnnnnnnnnnnnnnnnnnnnnnnnnnnnnnnnnnnnnnnnnnnnnnnnnnnnnnnnnnnnnnnnnnnnnnnnnnnnnnnnnnnnnnnnnnnnnnnnnnnnnnnnnnnnnnnnnnnnnnnnnnnnnnnnnnnnnnnnnnnnnnnnnnnnnnnnnnnnnnnnnnnnnnnnnnnnnnnnnnnnnnnnnnnnnnnnnnnnnnnnnnnnnnnnnnnnnnnnnnnnnnnnnnnnnnnnnnnnnnnnnnnnnnnnnnnnnnnnnnnnnnnnnnnnnnnnnnnnnnnnnnnnnnnnnnnnnnnnnnnnnnnnnnnnnnnnnnnnnnnnnnnnnnnnnnnnnnnnnnnnnnnnnnnnnnnnnnnnnnnnnnnnnnnnnnnnnnnnnnnnnnnnnnnnnnnnnnnnnnnnnnnnnnnnnnnnnnnnnnnnnnnnnnnnnnnnnnnnnnnnnnnnnnnnnnnnnnnnnnnnnnnnnnnnnnnnnnnnnnnnnnnnnnnnnnnnnnnnnnnnnnnnnnnnnnnnnnnnnnnnnnnnnnnnnnnnnnnnnnnnnnnnnnnnnnnnnnnnnnnnnnnnnnnnnnnnnnnnnnnnnnnnnnnnnnnnnnnnnnnnnnnnnnnnnnnnnnnnnnnnnnnnnnnnnnnnnnnnnnnnnnnnnnnnnnnnnnnnnnnnnnnnnnnnnnnnnnnnnnnnnnnnnnnnnnnnnnnnnnnnnnnnnnnnnnnnnnnnnnnnnnnnnnnnnnnnnnnnnnnnnnnnnnnnnnnnnnnnnnnnnnnnnnnnnnnnnnnnnnnnnnnnnnnnnnnnnnnnnnnnnnnnnnnnnnnnnnnnnnnnnnnnnnnnnnnnnnnnnnnnnnnnnnnnnnnnnnnnnnnnnnnnnnnnnnnnnnnnnnnnnnnnnnnnnnnnnnnnnnnnnnnnnnnnnnnnnnnnnnnnnnnnnnnnnnnnnnnnnnnnnnnnnnnnnnnnnnnnnnnnnnnnnnnnnnnnnnnnnnnnnnnnnnnnnnnnnnnnnnnnnnnnnnnnnnnnnnnnnnnnnnnnnnnnnnnnnnnnnnnnnnnnnnnnnnnnnnnnnnnnnnnnnnnnnnnnnnnnnnnnnnnnnnnnnnnnnnnnnnnnnnnnnnnnnnnnnnnnnnnnnnnnnnnnnnnnnnnnnnnnnnnnnnnnnnnnnnnnnnnnnnnnnnnnnnnnnnnnnnnnnnnnnnnnnnnnnnnnnnnnnnnnnnnnnnnnnnnnnnnnnnnnnnnnnnnnnnnnnnnnnnnnnnnnnnnnnnnnnnnnnnnnnnnnnnnnnnnnnnnnnnnnnnnnnnnnnnnnnnnnnnnnnnnnnnnnnnnnnnnnnnnnnnnnnnnnnnnnnnnnnnnnnnnnnnnnnnnnnnnnnnnnnnnnnnnnnnnnnnnnnnnnnnnnnnnnnnnnnnnnnnnnnnnnnnnnnnnnnnnnnnnnnnnnnnnnnnnnnnnnnnnnnnnnnnnnnnnnnnnnnnnnnnnnnnnnnnnnnnnnnnnnnnnnnnnnnnnnnnnnnnnnnnnnnnnnnnnnnnnnnnnnnnnnnnnnnnnnnnnnnnnnnnnnnnnnnnnnnnnnnnnnnnnnnnnnnnnnnnnnnnnnnnnnnnnnnnnnnnnnnnnnnnnnnnnnnnnnnnnnnnnnnnnnnnnnnnnnnnnnnnnnnnnnnnnnnnnnnnnnnnnnnnnnnnnnnnnnnnnnnnnnnnnnnnnnnnnnnnnnnnnnnnnnnnnnnnnnnnnnnnnnnnnnnnnnnnnnnnnnnnnnnnnnnnnnnnnnnnnnnnnnnnnnnnnnnnnnnnnnnnnnnnnnnnnnnnnnnnnnnnnnnnnnnnnnnnnnnnnnnnnnnnnnnnnnnnnnnnnnnnnnnnnnnnnnnnnnnnnnnnnnnnnnnnnnnnnnnnnnnnnnnnnnnnnnnnnnnnnnnnnnnnnnnnnnnnnnnnnnnnnnnnnnnnnnnnnnnnnnnnnnnnnnnnnnnnnnnnnnnnnnnnnnnnnnnnnnnnnnnnnnnnnnnnnnnnnnnnnnnnnnnnnnnnnnnnnnnnnnnnnnnnnnnnnnnnnnnnnnnnnnnnnnnnnnnnnnnnnnnnnnnnnnnnnnnnnnnnnnnnnnnnnnnnnnnnnnnnnnnnnnnnnnnnnnnnnnnnnnnnnnnnnnnnnnnnnnnnnnnnnnnnnnnnnnnnnnnnnnnnnnnnnnnnnnnnnnnnnnnnnnnnnnnnnnnnnnnnnnnnnnnnnnnnnnnnnnnnnnnnnnnnnnnnnnnnnnnnnnnnnnnnnnnnnnnnnnnnnnnnnnnnnnnnnnnnnnnnnnnnnnnnnnnnnnnnnnnnnnnnnnnnnnnnnnnnnnnnnnnnnnnnnnnnnnnnnnnnnnnnnnnnnnnnnnnnnnnnnnnnnnnnnnnnnnnnnnnnnnnnnnnnnnnnnnnnnnnnnnnnnnnnnnnnnnnnnnnnnnnnnnnnnnnnnnnnnnnnnnnnnnnnnnnnnnnnnnnnnnnnnnnnnnnnnnnnnnnnnnnnnnnnnnnnnnnnnnnnnnnnnnnnnnnnnnnnnnnnnnnnnnnnnnnnnnnnnnnnnnnnnnnnnnnnnnnnnnnnnnnnnnnnnnnnnnnnnnnnnnnnnnnnnnnnnnnnnnnnnnnnnnnnnnnnnnnnnnnnnnnnnnnnnnnnnnnnnnnnnnnnnnnnnnnnnnnnnnnnnnnnnnnnnnnnnnnnnnnnnnnnnnnnnnnnnnnnnnnnnnnnnnnnnnnnnnnnnnnnnnnnnnnnnnnnnnnnnnnnnnnnnnnnnnnnnnnnnnnnnnnnnnnnnnnnnnnnnnnnnnnnnnnnnnnnnnnnnnnnnnnnnnnnnnnnnnnnnnnnnnnnnnnnnnnnnnnnnnnnnnnnnnnnnnnnnnnnnnnnnnnnnnnnnnnnnnnnnnnnnnnnnnnnnnnnnnnnnnnnnnnnnnnnnnnnnnnnnnnnnnnnnnnnnnnnnnnnnnnnnnnnnnnnnnnnnnnnnnnnnnnnnnnnnnnnnnnnnnnnnnnnnnnnnnnnnnnnnnnnnnnnnnnnnnnnnnnnnnnnnnnnnnnnnnnnnnnnnnnnnnnnnnnnnnnnnnnnnnnnnnnnnnnnnnnnnnnnnnnnnnnnnnnnnnnnnnnnnnnnnnnnnnnnnnnnnnnnnnnnnnnnnnnnnnnnnnnnnnnnnnnnnnnnnnnnnnnnnnnnnnnnnnnnnnnnnnnnnnnnnnnnnnnnnnnnnnnnnnnnnnnnnnnnnnnnnnnnnnnnnnnnnnnnnnnnnnnnnnnnnnnnnnnnnnnnnnnnnnnnnnnnnnnnnnnnnnnnnnnnnnnnnnnnnnnnnnnnnnnnnnnnnnnnnnnnnnnnnnnnnnnnnnnnnnnnnnnnnnnnnnnnnnnnnnnnnnnnnnnnnnnnnnnnnnnnnnnnnnnnnnnnnnnnnnnnnnnnnnnnnnnnnnnnnnnnnnnnnnnnnnnnnnnnnnnnnnnnnnnnnnnnnnnnnnnnnnnnnnnnnnnnnnnnnnnnnnnnnnnnnnnnnnnnnnnnnnnnnnnnnnnnnnnnnnnnnnnnnnnnnnnnnnnnnnnnnnnnnnnnnnnnnnnnnnnnnnnnnnnnnnnnnnnnnnnnnnnnnnnnnnnnnnnnnnnnnnnnnnnnnnnnnnnnnnnnnnnnnnnnnnnnnnnnnnnnnnnnnnnnnnnnnnnnnnnnnnnnnnnnnnnnnnnnnnnnnnnnnnnnnnnnnnnnnnnnnnnnnnnnnnnnnnnnnnnnnnnnnnnnnnnnnnnnnnnnnnnnnnnnnnnnnnnnnnnnnnnnnnnnnnnnnnnnnnnnnnnnnnnnnnnnnnnnnnnnnnnnnnnnnnnnnnnnnnnnnnnnnnnnnnnnnnnnnnnnnnnnnnnnnnnnnnnnnnnnnnnnnnnnnnnnnnnnnnnnnnnnnnnnnnnnnnnnnnnnnnnnnnnnnnnnnnnnnnnnnnnnnnnnnnnnnnnnnnnnnnnnnnnnnnnnnnnnnnnnnnnnnnnnnnnnnnnnnnnnnnnnnnnnnnnnnnnnnnnnnnnnnnnnnnnnnnnnnnnnnnnnnnnnnnnnnnnnnnnnnnnnnnnnnnnnnnnnnnnnnnnnnnnnnnnnnnnnnnnnnnnnnnnnnnnnnnnnnnnnnnnnnnnnnnnnnnnnnnnnnnnnnnnnnnnnnnnnnnnnnnnnnnnnnnnnnnnnnnnnnnnnnnnnnnnnnnnnnnnnnnnnnnnnnnnnnnnnnnnnnnnnnnnnnnnnnnnnnnnnnnnnnnnnnnnnnnnnnnnnnnnnnnnnnnnnnnnnnnnnnnnnnnnnnnnnnnnnnnnnnnnnnnnnnnnnnnnnnnnnnnnnnnnnnnnnnnnnnnnnnnnnnnnnnnnnnnnnnnnnnnnnnnnnnnnnnnnnnnnnnnnnnnnnnnnnnnnnnnnnnnnnnnnnnnnnnnnnnnnnnnnnnnnnnnnnnnnnnnnnnnnnnnnnnnnnnnnnnnnnnnnnnnnnnnnnnnnnnnnnnnnnnnnnnnnnnnnnnnnnnnnnnnnnnnnnnnnnnnnnnnnnnnnnnnnnnnnnnnnnnnnnnnnnnnnnnnnnnnnnnnnnnnnnnnnnnnnnnnnnnnnnnnnnnnnnnnnnnnnnnnnnnnnnnnnnnnnnnnnnnnnnnnnnnnnnnnnnnnnnnnnnnnnnnnnnnnnnnnnnnnnnnnnnnnnnnnnnnnnnnnnnnnnnnnnnnnnnnnnnnnnnnnnnnnnnnnnnnnnnnnnnnnnnnnnnnnnnnnnnnnnnnnnnnnnnnnnnnnnnnnnnnnnnnnnnnnnnnnnnnnnnnnnnnnnnnnnnnnnnnnnnnnnnnnnnnnnnnnnnnnnnnnnnnnnnnnnnnnnnnnnnnnnnnnnnnnnnnnnnnnnnnnnnnnnnnnnnnnnnnnnnnnnnnnnnnnnnnnnnnnnnnnnnnnnnnnnnnnnnnnnnnnnnnnnnnnnnnnnnnnnnnnnnnnnnnnnnnnnnnnnnnnnnnnnnnnnnnnnnnnnnnnnnnnnnnnnnnnnnnnnnnnnnnnnnnnnnnnnnnnnnnnnnnnnnnnnnnnnnnnnnnnnnnnnnnnnnnnnnnnnnnnnnnnnnnnnnnnnnnnnnnnnnnnnnnnnnnnnnnnnnnnnnnnnnnnnnnnnnnnnnnnnnnnnnnnnnnnnnnnnnnnnnnnnnnnnnnnnnnnnnnnnnnnnnnnnnnnnnnnnnnnnnnnnnnnnnnnnnnnnnnnnnnnnnnnnnnnnnnnnnnnnnnnnnnnnnnnnnnnnnnnnnnnnnnnnnnnnnnnnnnnnnnnnnnnnnnnnnnnnnnnnnnnnnnnnnnnnnnnnnnnnnnnnnnnnnnnnnnnnnnnnnnnnnnnnnnnnnnnnnnnnnnnnnnnnnnnnnnnnnnnnnnnnnnnnnnnnnnnnnnnnnnnnnnnnnnnnnnnnnnnnnnnnnnnnnnnnnnnnnnnnnnnnnnnnnnnnnnnnnnnnnnnnnnnnnnnnnnnnnnnnnnnnnnnnnnnnnnnnnnnnnnnnnnnnnnnnnnnnnnnnnnnnnnnnnnnnnnnnnnnnnnnnnnnnnnnnnnnnnnnnnnnnnnnnnnnnnnnnnnnnnnnnnnnnnnnnnnnnnnnnnnnnnnnnnnnnnnnnnnnnnnnnnnnnnnnnnnnnnnnnnnnnnnnnnnnnnnnnnnnnnnnnnnnnnnnnnnnnnnnnnnnnnnnnnnnnnnnnnnnnnnnnnnnnnnnnnnnnnnnnnnnnnnnnnnnnnnnnnnnnnnnnnnnnnnnnnnnnnnnnnnnnnnnnnnnnnnnnnnnnnnnnnnnnnnnnnnnnnnnnnnnnnnnnnnnnnnnnnnnnnnnnnnnnnnnnnnnnnnnnnnnnnnnnnnnnnnnnnnnnnnnnnnnnnnnnnnnnnnnnnnnnnnnnnnnnnnnnnnnnnnnnnnnnnnnnnnnnnnnnnnnnnnnnnnnnnnnnnnnnnnnnnnnnnnnnnnnnnnnnnnnnnnnnnnnnnnnnnnnnnnnnnnnnnnnnnnnnnnnnnnnnnnnnnnnnnnnnnnnnnnnnnnnnnnnnnnnnnnnnnnnnnnnnnnnnnnnnnnnnnnnnnnnnnnnnnnnnnnnnnnnnnnnnnnnnnnnnnnnnnnnnnnnnnnnnnnnnnnnnnnnnnnnnnnnnnnnnnnnnnnnnnnnnnnnnnnnnnnnnnnnnnnnnnnnnnnnnnnnnnnnnnnnnnnnnnnnnnnnnnnnnnnnnnnnnnnnnnnnnnnnnnnnnnnnnnnnnnnnnnnnnnnnnnnnnnnnnnnnnnnnnnnnnnnnnnnnnnnnnnnnnnnnnnnnnnnnnnnnnnnnnnnnnnnnnnnnnnnnnnnnnnnnnnnnnnnnnnnnnnnnnnnnnnnnnnnnnnnnnnnnnnnnnnnnnnnnnnnnnnnnnnnnnnnnnnnnnnnnnnnnnnnnnnnnnnnnnnnnnnnnnnnnnnnnnnnnnnnnnnnnnnnnnnnnnnnnnnnnnnnnnnnnnnnnnnnnnnnnnnnnnnnnnnnnnnnnnnnnnnnnnnnnnnnnnnnnnnnnnnnnnnnnnnnnnnnnnnnnnnnnnnnnnnnnnnnnnnnnnnnnnnnnnnnnnnnnnnnnnnnnnnnnnnnnnnnnnnnnnnnnnnnnnnnnnnnnnnnnnnnnnnnnnnnnnnnnnnnnnnnnnnnnnnnnnnnnnnnnnnnnnnnnnnnnnnnnnnnnnnnnnnnnnnnnnnnnnnnnnnnnnnnnnnnnnnnnnnnnnnnnnnnnnnnnnnnnnnnnnnnnnnnnnnnnnnnnnnnnnnnnnnnnnnnnnnnnnnnnnnnnnnnnnnnnnnnnnnnnnnnnnnnnnnnnnnnnnnnnnnnnnnnnnnnnnnnnnnnnnnnnnnnnnnnnnnnnnnnnnnnnnnnnnnnnnnnnnnnnnnnnnnnnnnnnnnnnnnnnnnnnnnnnnnnnnnnnnnnnnnnnnnnnnnnnnnnnnnnnnnnnnnnnnnnnnnnnnnnnnnnnnnnnnnnnnnnnnnnnnnnnnnnnnnnnnnnnnnnnnnnnnnnnnnnnnnnnnnnnnnnnnnnnnnnnnnnnnnnnnnnnnnnnnnnnnnnnnnnnnnnnnnnnnnnnnnnnnnnnnnnnnnnnnnnnnnnnnnnnnnnnnnnnnnnnnnnnnnnnnnnnnnnnnnnnnnnnnnnnnnnnnnnnnnnnnnnnnnnnnnnnnnnnnnnnnnnnnnnnnnnnnnnnnnnnnnnnnnnnnnnnnnnnnnnnnnnnnnnnnnnnnnnnnnnnnnnnnnnnnnnnnnnnnnnnnnnnnnnnnnnnnnnnnnnnnnnnnnnnnnnnnnnnnnnnnnnnnnnnnnnnnnnnnnnnnnnnnnnnnnnnnnnnnnnnnnnnnnnnnnnnnnnnnnnnnnnnnnnnnnnnnnnnnnnnnnnnnnnnnnnnnnnnnnnnnnnnnnnnnnnnnnnnnnnnnnnnnnnnnnnnnnnnnnnnnnnnnnnnnnnnnnnnnnnnnnnnnnnnnnnnnnnnnnnnnnnnnnnnnnnnnnnnnnnnnnnnnnnnnnnnnnnnnnnnnnnnnnnnnnnnnnnnnnnnnnnnnnnnnnnnnnnnnnnnnnnnnnnnnnnnnnnnnnnnnnnnnnnnnnnnnnnnnnnnnnnnnnnnnnnnnnnnnnnnnnnnnnnnnnnnnnnnnnnnnnnnnnnnnnnnnnnnnnnnnnnnnnnnnnnnnnnnnnnnnnnnnnnnnnnnnnnnnnnnnnnnnnnnnnnnnnnnnnnnnnnnnnnnnnnnnnnnnnnnnnnnnnnnnnnnnnnnnnnnnnnnnnnnnnnnnnnnnnnnnnnnnnnnnnnnnnnnnnnnnnnnnnnnnnnnnnnnnnnnnnnnnnnnnnnnnnnnnnnnnnnnnnnnnnnnnnnnnnnnnnnnnnnnnnnnnnnnnnnnnnnnnnnnnnnnnnnnnnnnnnnnnnnnnnnnnnnnnnnnnnnnnnnnnnnnnnnnnnnnnnnnnnnnnnnnnnnnnnnnnnnnnnnnnnnnnnnnnnnnnnnnnnnnnnnnnnnnnnnnnnnnnnnnnnnnnnnnnnnnnnnnnnnnnnnnnnnnnnnnnnnnnnnnnnnnnnnnnnnnnnnnnnnnnnnnnnnnnnnnnnnnnnnnnnnnnnnnnnnnnnnnnnnnnnnnnnnnnnnnnnnnnnnnnnnnnnnnnnnnnnnnnnnnnnnnnnnnnnnnnnnnnnnnnnnnnnnnnnnnnnnnnnnnnnnnnnnnnnnnnnnnnnnnnnnnnnnnnnnnnnnnnnnnnnnnnnnnnnnnnnnnnnnnnnnnnnnnnnnnnnnnnnnnnnnnnnnnnnnnnnnnnnnnnnnnnnnnnnnnnnnnnnnnnnnnnnnnnnnnnnnnnnnnnnnnnnnnnnnnnnnnnnnnnnnnnnnnnnnnnnnnnnnnnnnnnnnnnnnnnnnnnnnnnnnnnnnnnnnnnnnnnnnnnnnnnnnnnnnnnnnnnnnnnnnnnnnnnnnnnnnnnnnnnnnnnnnnnnnnnnnnnnnnnnnnnnnnnnnnnnnnnnnnnnnnnnnnnnnnnnnnnnnnnnnnnnnnnnnnnnnnnnnnnnnnnnnnnnnnnnnnnnnnnnnnnnnnnnnnnnnnnnnnnnnnnnnnnnnnnnnnnnnnnnnnnnnnnnnnnnnnnnnnnnnnnnnnnnnnnnnnnnnnnnnnnnnnnnnnnnnnnnnnnnnnnnnnnnnnnnnnnnnnnnnnnnnnnnnnnnnnnnnnnnnnnnnnnnnnnnnnnnnnnnnnnnnnnnnnnnnnnnnnnnnnnnnnnnnnnnnnnnnnnnnnnnnnnnnnnnnnnnnnnnnnnnnnnnnnnnnnnnnnnnnnnnnnnnnnnnnnnnnnnnnnnnnnnnnnnnnnnnnnnnnnnnnnnnnnnnnnnnnnnnnnnnnnnnnnnnnnnnnnnnnnnnnnnnnnnnnnnnnnnnnnnnnnnnnnnnnnnnnnnnnnnnnnnnnnnnnnnnnnnnnnnnnnnnnnnnnnnnnnnnnnnnnnnnnnnnnnnnnnnnnnnnnnnnnnnnnnnnnnnnnnnnnnnnnnnnnnnnnnnnnnnnnnnnnnnnnnnnnnnnnnnnnnnnnnnnnnnnnnnnnnnnnnnnnnnnnnnnnnnnnnnnnnnnnnnnnnnnnnnnnnnnnnnnnnnnnnnnnnnnnnnnnnnnnnnnnnnnnnnnnnnnnnnnnnnnnnnnnnnnnnnnnnnnnnnnnnnnnnnnnnnnnnnnnnnnnnnnnnnnnnnnnnnnnnnnnnnnnnnnnnnnnnnnnnnnnnnnnnnnnnnnnnnnnnnnnnnnnnnnnnnnnnnnnnnnnnnnnnnnnnnnnnnnnnnnnnnnnnnnnnnnnnnnnnnnnnnnnnnnnnnnnnnnnnnnnnnnnnnnnnnnnnnnnnnnnnnnnnnnnnnnnnnnnnnnnnnnnnnnnnnnnnnnnnnnnnnnnnnnnnnnnnnnnnnnnnnnnnnnnnnnnnnnnnnnnnnnnnnnnnnnnnnnnnnnnnnnnnnnnnnnnnnnnnnnnnnnnnnnnnnnnnnnnnnnnnnnnnnnnnnnnnnnnnnnnnnnnnnnnnnnnnnnnnnnnnnnnnnnnnnnnnnnnnnnnnnnnnnnnnnnnnnnnnnnnnnnnnnnnnnnnnnnnnnnnnnnnnnnnnnnnnnnnnnnnnnnnnnnnnnnnnnnnnnnnnnnnnnnnnnnnnnnnnnnnnnnnnnnnnnnnnnnnnnnnnnnnnnnnnnnnnnnnnnnnnnnnnnnnnnnnnnnnnnnnnnnnnnnnnnnnnnnnnnnnnnnnnnnnnnnnnnnnnnnnnnnnnnnnnnnnnnnnnnnnnnnnnnnnnnnnnnnnnnnnnnnnnnnnnnnnnnnnnnnnnnnnnnnnnnnnnnnnnnnnnnnnnnnnnnnnnnnnnnnnnnnnnnnnnnnnnnnnnnnnnnnnnnnnnnnnnnnnnnnnnnnnnnnnnnnnnnnnnnnnnnnnnnnnnnnnnnnnnnnnnnnnnnnnnnnnnnnnnnnnnnnnnnnnnnnnnnnnnnnnnnnnnnnnnnnnnnnnnnnnnnnnnnnnnnnnnnnnnnnnnnnnnnnnnnnnnnnnnnnnnnnnnnnnnnnnnnnnnnnnnnnnnnnnnnnnnnnnnnnnnnnnnnnnnnnnnnnnnnnnnnnnnnnnnnnnnnnnnnnnnnnnnnnnnnnnnnnnnnnnnnnnnnnnnnnnnnnnnnnnnnnnnnnnnnnnnnnnnnnnnnnnnnnnnnnnnnnnnnnnnnnnnnnnnnnnnnnnnnnnnnnnnnnnnnnnnnnnnnnnnnnnnnnnnnnnnnnnnnnnnnnnnnnnnnnnnnnnnnnnnnnnnnnnnnnnnnnnnnnnnnnnnnnnnnnnnnnnnnnnnnnnnnnnnnnnnnnnnnnnnnnnnnnnnnnnnnnnnnnnnnnnnnnnnnnnnnnnnnnnnnnnnnnnnnnnnnnnnnnnnnnnnnnnnnnnnnnnnnnnnnnnnnnnnnnnnnnnnnnnnnnnnnnnnnnnnnnnnnnnnnnnnnnnnnnnnnnnnnnnnnnnnnnnnnnnnnnnnnnnnnnnnnnnnnnnnnnnnnnnnnnnnnnnnnnnnnnnnnnnnnnnnnnnnnnnnnnnnnnnnnnnnnnnnnnnnnnnnnnnnnnnnnnnnnnnnnnnnnnnnnnnnnnnnnnnnnnnnnnnnnnnnnnnnnnnnnnnnnnnnnnnnnnnnnnnnnnnnnnnnnnnnnnnnnnnnnnnnnnnnnnnnnnnnnnnnnnnnnnnnnnnnnnnnnnnnnnnnnnnnnnnnnnnnnnnnnnnnnnnnnnnnnnnnnnnnnnnnnnnnnnnnnnnnnnnnnnnnnnnnnnnnnnnnnnnnnnnnnnnnnnnnnnnnnnnnnnnnnnnnnnnnnnnnnnnnnnnnnnnnnnnnnnnnnnnnnnnnnnnnnnnnnnnnnnnnnnnnnnnnnnnnnnnnnnnnnnnnnnnnnnnnnnnnnnnnnnnnnnnnnnnnnnnnnnnnnnnnnnnnnnnnnnnnnnnnnnnnnnnnnnnnnnnnnnnnnnnnnnnnnnnnnnnnnnnnnnnnnnnnnnnnnnnnnnnnnnnnnnnnnnnnnnnnnnnnnnnnnnnnnnnnnnnnnnnnnnnnnnnnnnnnnnnnnnnnnnnnnnnnnnnnnnnnnnnnnnnnnnnnnnnnnnnnnnnnnnnnnnnnnnnnnnnnnnnnnnnnnnnnnnnnnnnnnnnnnnnnnnnnnnnnnnnnnnnnnnnnnnnnnnnnnnnnnnnnnnnnnnnnnnnnnnnnnnnnnnnnnnnnnnnnnnnnnnnnnnnnnnnnnnnnnnnnnnnnnnnnnnnnnnnnnnnnnnnnnnnnnnnnnnnnnnnnnnnnnnnnnnnnnnnnnnnnnnnnnnnnnnnnnnnnnnnnnnnnnnnnnnnnnnnnnnnnnnnnnnnnnnnnnnnnnnnnnnnnnnnnnnnnnnnnnnnnnnnnnnnnnnnnnnnnnnnnnnnnnnnnnnnnnnnnnnnnnnnnnnnnnnnnnnnnnnnnnnnnnnnnnnnnnnnnnnnnnnnnnnnnnnnnnnnnnnnnnnnnnnnnnnnnnnnnnnnnnnnnnnnnnnnnnnnnnnnnnnnnnnnnnnnnnnnnnnnnnnnnnnnnnnnnnnnnnnnnnnnnnnnnnnnnnnnnnnnnnnnnnnnnnnnnnnnnnnnnnnnnnnnnnnnnnnnnnnnnnnnnnnnnnnnnnnnnnnnnnnnnnnnnnnnnnnnnnnnnnnnnnnnnnnnnnnnnnnnnnnnnnnnnnnnnnnnnnnnnnnnnnnnnnnnnnnnnnnnnnnnnnnnnnnnnnnnnnnnnnnnnnnnnnnnnnnnnnnnnnnnnnnnnnnnnnnnnnnnnnnnnnnnnnnnnnnnnnnnnnnnnnnnnnnnnnnnnnnnnnnnnnnnnnnnnnnnnnnnnnnnnnnnnnnnnnnnnnnnnnnnnnnnnnnnnnnnnnnnnnnnnnnnnnnnnnnnnnnnnnnnnnnnnnnnnnnnnnnnnnnnnnnnnnnnnnnnnnnnnnnnnnnnnnnnnnnnnnnnnnnnnnnnnnnnnnnnnnnnnnnnnnnnnnnnnnnnnnnnnnnnnnnnnnnnnnnnnnnnnnnnnnnnnnnnnnnnnnnnnnnnnnnnnnnnnnnnnnnnnnnnnnnnnnnnnnnnnnnnnnnnnnnnnnnnnnnnnnnnnnnnnnnnnnnnnnnnnnnnnnnnnnnnnnnnnnnnnnnnnnnnnnnnnnnnnnnnnnnnnnnnnnnnnnnnnnnnnnnnnnnnnnnnnnnnnnnnnnnnnnnnnnnnnnnnnnnnnnnnnnnnnnnnnnnnnnnnnnnnnnnnnnnnnnnnnnnnnnnnnnnnnnnnnnnnnnnnnnnnnnnnnnnnnnnnnnnnnnnnnnnnnnnnnnnnnnnnnnnnnnnnnnnnnnnnnnnnnnnnnnnnnnnnnnnnnnnnnnnnnnnnnnnnnnnnnnnnnnnnnnnnnnnnnnnnnnnnnnnnnnnnnnnnnnnnnnnnnnnnnnnnnnnnnnnnnnnnnnnnnnnnnnnnnnnnnnnnnnnnnnnnnnnnnnnnnnnnnnnnnnnnnnnnnnnnnnnnnnnnnnnnnnnnnnnnnnnnnnnnnnnnnnnnnnnnnnnnnnnnnnnnnnnnnnnnnnnnnnnnnnnnnnnnnnnnnnnnnnnnnnnnnnnnnnnnnnnnnnnnnnnnnnnnnnnnnnnnnnnnnnnnnnnnnnnnnnnnnnnnnnnnnnnnnnnnnnnnnnnnnnnnnnnnnnnnnnnnnnnnnnnnnnnnnnnnnnnnnnnnnnnnnnnnnnnnnnnnnnnnnnnnnnnnnnnnnnnnnnnnnnnnnnnnnnnnnnnnnnnnnnnnnnnnnnnnnnnnnnnnnnnnnnnnnnnnnnnnnnnnnnnnnnnnnnnnnnnnnnnnnnnnnnnnnnnnnnnnnnnnnnnnnnnnnnnnnnnnnnnnnnnnnnnnnnnnnnnnnnnnnnnnnnnnnnnnnnnnnnnnnnnnnnnnnnnnnnnnnnnnnnnnnnnnnnnnnnnnnnnnnnnnnnnnnnnnnnnnnnnnnnnnnnnnnnnnnnnnnnnnnnnnnnnnnnnnnnnnnnnnnnnnnnnnnnnnnnnnnnnnnnnnnnnnnnnnnnnnnnnnnnnnnnnnnnnnnnnnnnnnnnnnnnnnnnnnnnnnnnnnnnnnnnnnnnnnnnnnnnnnnnnnnnnnnnnnnnnnnnnnnnnnnnnnnnnnnnnnnnnnnnnnnnnnnnnnnnnnnnnnnnnnnnnnnnnnnnnnnnnnnnnnnnnnnnnnnnnnnnnnnnnnnnnnnnnnnnnnnnnnnnnnnnnnnnnnnnnnnnnnnnnnnnnnnnnnnnnnnnnnnnnnnnnnnnnnnnnnnnnnnnnnnnnnnnnnnnnnnnnnnnnnnnnnnnnnnnnnnnnnnnnnnnnnnnnnnnnnnnnnnnnnnnnnnnnnnnnnnnnnnnnnnnnnnnnnnnnnnnnnnnnnnnnnnnnnnnnnnnnnnnnnnnnnnnnnnnnnnnnnnnnnnnnnnnnnnnnnnnnnnnnnnnnnnnnnnnnnnnnnnnnnnnnnnnnnnnnnnnnnnnnnnnnnnnnnnnnnnnnnnnnnnnnnnnnnnnnnnnnnnnnnnnnnnnnnnnnnnnnnnnnnnnnnnnnnnnnnnnnnnnnnnnnnnnnnnnnnnnnnnnnnnnnnnnnnnnnnnnnnnnnnnnnnnnnnnnnnnnnnnnnnnnnnnnnnnnnnnnnnnnnnnnnnnnnnnnnnnnnnnnnnnnnnnnnnnnnnnnnnnnnnnnnnnnnnnnnnnnnnnnnnnnnnnnnnnnnnnnnnnnnnnnnnnnnnnnnnnnnnnnnnnnnnnnnnnnnnnnnnnnnnnnnnnnnnnnnnnnnnnnnnnnnnnnnnnnnnnnnnnnnnnnnnnnnnnnnnnnnnnnnnnnnnnnnnnnnnnnnnnnnnnnnnnnnnnnnnnnnnnnnnnnnnnnnnnnnnnnnnnnnnnnnnnnnnnnnnnnnnnnnnnnnnnnnnnggtggaagaatcatggcctctagactgcgccgaattgaaatcgatatcgcccaaactcatttgtaagaccttgttaaaatatgctttacagcaacaacagcagtttttaacgggacagtactgattgtcgattgcggattgaagattagccggaggacgggaaggtaatcggttttggttaacgcagtttttgctgtcgttgtgttgttgggtgggttgccgggggcggattcgtacctcgccggacataatgctgaacgcaccggaaagttcaaagaagccatcggcgcctatacggccagtgcatccgcggatccgttgctggcgccctacgcccggatcagtgcggccaggtgcctgggcgcgaccggcagccgcacacaggcggtgcaggcgttacgcagcgtgctcgccgaggtgccggaggggccgtgggttcttccagcgaaactcgatctggcgggcctgctggcgctggactcgcagtttcccgcggccgcggccctttatgccgaatcgctcgactttgcgccgaagacggcggcgccgaagacggcggccccgaagacgtggagcccgaaaacgtggatcgtcgatcagtatgattgggcggcggcggaggtgtacgtccgcgtgccggaatttgaacagcgggcctatgcctacttccgcgataacgtggcaaccaccgtgctccgtcagcggcgcatcgatgcggcgcgttacctcgagaagtcgcctgatatggccgaccggtttgtggcgctcgatgggctgatcaagtcagccgaatgcaccgatgcgtggaaactggcgttgcggctcctgcccgaggcggttggcggcggtagcccggtgaacattaacgtgctcgcgcccctgctgacgtcgaacaaacgggccctgacggacgcgcagcgcgaagcgttccagaaactcgtcaacgagcacggcgacagcgacgcgcgcgcgcgctggatgcgcctggttctggcctgcgtcgcccgcagccattcgagcgttggcaagccggaggtcgcggcgttggcgtgcgacctgctcctcaagcatttcgaaaaatcggatcaggccggggatgcgctgtattggctggcaagccgttttgcccgagacgaaaaagacaagagcgccgtcgagcagtacctgcgcctggccaaacattgtcccgatcatgcgcgggccgatttcgccctgctcgccgccgccggactccagaagaaaaccggcgacctcaagggctgcgtccactcgctcgaacaactggtcggccgctatccccaggggcgccatgccgccaacgcatggtattggctgggaaaacaccacgaggccgcggggcataaaaaagacgccgctaaagcctttcagaacgcagcccaattcgggccgggcaactattacgcccattgcgccgcataccgtctggccaaggcgcgcgcgcgcgacgacgacagcccatccaatggccaaaacctccgggtggacggcaccggctcgtacatagcgccgctggaaatcgccgcggaagaacgtgtaaacgttcctgaccccgccatggacccgcagttcgagcggctgatgttttttggcaagaacgggctcgaagagggcgagtgggaagcgttgtacctcggcaagcggctcggcaacggggccgaagacgcccccgtttaccgggtcatgtgtgaagccgggtatgccaaggcggcgatggatttcgccgaggcgtacaactggggggtggccgacggcaagcggacacccgcgcgcatgcggatcgagtatccccggtcgtactggcaacaggtgcgggccaaatgccgcggcaccggaatcgacccgtacctcgtgctggccattgcccggcaggaaagcacgttccggcccgccctgacctcccacgccggcgcccgcggcatcatgcaggtcatgccgcccaccgcccagtggctggccaaggttgatccctcgattgacgcggcctgcatcgccaacctcgaaaaccccgacaactcgttccggctcgggattggttacctgttgcggatggtcgagcgctcgagcggcaacctcgtgcacgccctggcgtcgtacaacgccggccccggaaactgctcgaaatggctcaaaaggtggccgaaagccgacctcgagacgttcgtcgaaaacatcccgttcggcgagacccgcaactacgtcaaaaccgtcctgggcgcctacgccgcctaccactcgctctatccggctgtggaatgatgtggcacgcctatttggcgggtgaggcgtgatctgctatagtttttgggcttgggttcatcctgttacgggaaacggcggttacggagaggccccgctttttcttgcggaacaaaaagtcatgaccggtacagcacaccacgaaccaaggaagcgtgcaaagaccagagggggtcaagaagtggtcttgcatgacgacaattaccgctaccgcgcgttgtttgacaggatgacggaagggtttgcgctgcacgaaatcgttacggatgcgcaaggcaagccctgcgactatgtttttctcgatatcaacccggcattcgaagtcctcacggggctgaagcgcgaagatgtgatagggcgccgcgttaaggaagtgctgccaacggtcgagccgtactgggtggagcattttgggcaggtggcactcaccggcacgcccgcccgttttgagaattacgccgcgcctttgggccgctggtacgaggtttatgcgtacagccctgcgccgcggcaggtcgcggtcgtcttcctggatgtaaccaggcgcaagcaggctgaggaagtcttgcagcgatacgaactgctggcggcgaacagccgtgacattattctatttatgcggcgggacgacggccgcatcctcgaggccaacgccgccgccatccgcgcctacggctattcgcgcgaggaactgctcgaaatgatggggcgcgacctgtggagcgatcgcgatcgcgatgccgtcgaagcgcaaatggcgaaagccggtgccacgggtatcctcttcgagaccttccacaagcgcaaggacgggtcgatattccccgtggaagtcagttcgcacggcgaaataattgccgggattcgcatccgcgacatcaccgaacgtcaggaagccgaaaaagccctccgcgaaagccaaaccgacctcaagcacgcgcaggctgttgcccatacaggcagttggcgcctcaacgtccaacacaaccgattgtcgtggtcggacgagacgtacaggatgttcggcattgccacgggcacccccttgacctatgagacgttcctggatgccgtacaccccgatgatcggcagtacgtcgacgaaaactggatggcagccatccggggggaaacagcgtacgatatcgagcaccggattgtggtcggcggggccgtgaagtgggtccgggagcgggccgaactcgaggtcggtccagaaggcgagttgttaggggggtttgggacagtccaagacgtcaccgaacgcaagcaggcggcagaggcgttgcgcgaagccaatgaaaacctcgaaacccgcgtcagcgaacgaacggctgaactcgaactggccaacgtcacgctcgagcgggaaatggccgagcgccggcgcgcggaaggagccgtgctggccgagcggcaattattctacgacgttctggagacgctgccggtttacgttgtcctgttgactcccgactaccgggtcagtttcgcgaaccgcgtattccgagagcgtttcgggcagtccgaaaagcgctgttacgaacacctgtttgggcgcagcgagccgtgcgaaatctgcgaagcctatggcgtcctccagacgatggcgccccatgactgggaatgggtcgggcccgatgcacgcacctaccaggtctttgactttcctttcaccgacaccacgggcgctgttcttattctggaaatgggcatcgacatcaccgaacgcaagaggtcggaagacgaagtccgtcactaccaggaacatctcgaacaggaggttcgccagcgcaccgccgaggtggaaaacaggaacatccaactggccgccgagatcgcggaacgtaaacgcgccgaggatgccctccgccaaaacgaagccgtcctgatgcggtccaacgaggacctcgaacagtttgcctatgtcgcgtcgcacgatctgcaggagccgttgcgccagatcggcgggtttgtccaactcctgcggcgggattatgcccccttgttcgacgccaccgccggcgagtactttgcctttgtcacggatgccgccttacggatgcaattgctcatccagggcctgctcgattactcgagggttggacgaagcggcgtggtcgcctccaaggtgagcctcgagaaggccgcacggaccgccatgatcaatctggccgcccgaatcagcgaaaccggcgcaaaaatcactctcggcgaattgccctccgttcccggcaactccacactcctcacccaagtcttccaaaacttgattggaaacagcctcaaattccgcgccgaacgccccttggacatccagatcggatcccggatcgacggcaacgagtggcaggtttgggtaaaagacaacgggatcggattccaacaggagtacgccgagagaatcttccaggtgtttcagcgcctgcacgggcgcggggagtatccgggcaccggaatcgggttggccatctgcaaacgggccgtcgaacagcacggcggccgtatctgggccgaatccacacccggcgtaggcgctaccttctacttcacgctgcccgccggttgagcagggaaaacgacggcatatccgccgccccgtaagacttaaactgaagttccagagccagatcgaatgcacgttttatcctgcatgggaaataaccttgtattcaaatgcaggtttactgggaacaggcgtttctatccacacttgagtccgagcaggtcgaagatgtggcgctggaaatcggtgggttccgtgaatgtggtaaaccgtgcggcgtttttcccttggccgactcggcagatgtttttgcagcgcgtggcgagtgcatccatcagggtctgtaagctgtggacgggccacccgtcttgagtctgcttggttcgcttttcccgttgtacggcctcgccgggctgaggcttggcgacggggtcgcgggtccagcgagcggcgtgaagttcttcgtcttggaaccgaacgggcgcgagtttcctgcacaactcccattcgacgtagtaagccagcatgcagagaaagacgtgggctttcacgtggtccacggtgcggtggtggatgggccggatgcggatatcgaggcgcttgatgcaccggaacgcctgctcgacttgccccaggctcttgtacgcacgaacggtgtcttcggcgctgagcgcttgtttcgactcgctcgtgcggataatgtagatgccgtcgagccgctcttcgtgctggatgcgtttggcgttgcgggtgaacgcgaaatggccgtcttgtatgtcgagcacgaagtgtttgccggccttgaagtggttgagaaccttgccgactttcaggccgatctcggcggccttaagcggtttgttggtgcgccgcttccgtttgaccatgaggtgttgttcgagtcggtcaagaagactgccaagctcatcctggccagcgacgccggtgaacgcggaagttatctccacaccatcgcggggcagatcgcgcagatcgcgttcgaccaccttgacgcgcctgtatgcgttgtcggggccaacaacgggatcgtgccgccggccgagttggaaaaagagtacttcccgcagccggcctggctcctcgacgcgtatcacgcacaaataaagcctctacccggttaccagccttcgacagagcgcacggccgcagagtttgtgcggcagtccaagtacggcgtgctgtaacggaaattgaaaaccacaaagaacgcaaagagcacggcgcggcatagccgcaaccaaaaggcgcccgaacgtgtcattccgaggagcgctggcacatggcctctattcttaattcaaaagcctgagtccagcgcgacgtgggaatccccccggtatttttcccgacatcggtatgggaggagcgcttttattcggttttgggatagcttctagttgcatgggcgcattgttcacacaacaacacgcctataaccatgcaacaaaccaatgtttacgccccctcacacactacaagaaatgaaaccagcctctggaacttcgggctaatgaaatggacttcagaatacccacaaggcatggcgctgtgtggagcgcggcagcttgctgccgctttttcggcagggaggccttgcctgacaagtgcgacattgttcgcgaggaaagccttgcactataaaaagcggtggcaaacgcgctaagagcgtccacactccatacgtcaccgtatttacgaatagacgtactaagccgcgccaaatatgtcgggccccatatcgcatccggtatgcgtagggacgtaatcgagactcttgccacgggtccctactggatccgcaggttgcgattatcaataactctcctggccttgcctgccgatcgttcgagcgtctgtgggggcacaagttcaaccgtagcgcggatattcgtgatggcctggattttccggtcgatacggtcccgcagggcctgcatctggctcattttgtctgaaaacatctcggggcggacctcgactttaacggtcatttggtcgagcgcacccggacggtcaatttctataacatagtgcggcgcaataccttccacctgtagcagcgcctcctcgatttgcgacggaaacacgttgacgccccggattatcagcatgtcgtccgtccggccggcgactcggctcatccggacggtcgtccgcccgcaggggcacggctggctgtccagggcggcaatgtcgcgggtgcggtaacgcaaaatgggcatagcctgtttggtcaacgtcgtaaaaaccaactccccgtactcgccatccgccacaggctcgagcgtggtggggtcaacgcactcaacgatgaagtgatcttcctggatgtgcatgccgtcgcgtttgtagcactcgccgctgacgcccggcccgataacttcgcttaacccgtagttgttaaacgcatagacatcaagctcatcttcgattttgcggcgcatgtcttcggtccacatctcgccgccgaaatgggcgtacttgaggttaaacttgcgcgggtcaacgccctgggccctggccgcttccgcaatgttgagggcgtagctgggcgtacagaccagcgcgtccgcttccatgtcctcgagcagcatcacctgacgcggcgtattgcctgaagcgaccggcaaaaccgccgcccccactttttccaccccgtagtggaggccaaacccgcccgtgaaaagcccgtagccaaatgcaatatgcacggtgtggtgcgaccgcagcccgcccgcgtagagaaaccgggcgcagaggttggcccacgtatcgaggtcttcgcgcgtatacgcgacgaacgtgggcttgccggtggtcccggacgagccgtggaatcgggctacctgctcgcgcggcaccgccagaaaccccagcgggtattgccggcggaggtcttctttgatcgtaaacggaatccgccgcaggtcgtccagcgaacgaagatactccgccgagatcttttcgcgcgcaagcgattcccggtaaaaggggacgctgccgactcgccgtaccacgtccctgagccgatcgagttgcagatcctgcaactgcggccgatcaagcgtctcttcaggggaccagaccccgttttccaaggcaaaatccggcattacgcacctactatgcctgtgttccgcaccgcctgatcccggctaccgttcggcccgttcgtaaagctcgacgccgcccacaacattgatattcttggccttgagcagttcgatcgcggtatccgggttgtcgaaccggaacaccagcaccgctttatccccgctacggacggtgaaggcgtacatgtattcgatgttgacgcccccgccttccatgatggccaggacgttggcgaggccgccgggtttgtcggccacttcggtagccacaacctccgtcacgttcaccacgaacccggccttctcaaacacctctttcgctttcatccagtcgcggacgatcagccgcatgatgccgaactgctgggtgtcggccagcgacaacgtcagaatgttgatgcccgcatccgccaggactcggcacggctcgctcagccgccccggcttgttctccaaaaacaacgacaattggtgtattttcattgccgaaatcccttcctctttgccaacggcttacattttgcgccggtcaatcacgcgtttggctttcccctggcttcgctcgatcgtgtgaggctggaccaggctcagtttcactcgaatgcccaaaatgtgggctatttcatccgacaactttttgcggacagtttccatggcgccgatcgtgtcgccgaacacgtcggcggtaacctcgacctggacctccatgttgtcgagccctttttcccgctccagaatgatctgataatggggcagggtgccttccactttgagcagggccgattcaacctgcgacgggaacacattcacgccgcggatgatgaacatgtcgtcgctgcgccttccgatacggcgcatcctgcggatggtcctgccgcactcgcacggctcgggcatcagcgaggtgatgtcgcgtgtccggtatcggatcatcggcatggccagcttgctcagcgtcgtgatcaccagctcgccttcctggccgtccggcagcggctcgcacgtctccggatcgatgatctcgcaatagaaatggtcttcaaacaggtgcggccccgcctgctcctggcattccatggcgacgcccggaccgatgatttccgacaggccgtagatgtcgtaggccttgatgtcggcttcgggctcgatccgttcccgcatcgcctgggtccacggttccgcgccgaacacacccgctttgatgggcagtttccgcatgtcaatacccatctcccgagaccgctcgatcaggtggaggaaataactcggggtgcagcagatggcggtcacgccgaaatcctgcatgatcatgatctgacgatccgagttgccgcccgagatcggaatcacagtcgccccgagcgcctcggccccgtaatgcgcccccaaaccgcccgtaaaaagcccgtagccgtatgcgttctggatgatgtcgccctgcccaagcccgcacgccgcaaacgaacgtaccatcacgctcgaccacacgtcgatgtcgtcctgggtgtaggcgacgacgatcggtttgccggttgtcccgctggatgcgtgcagccgcacaatctcgctcatggggctggcgaacaggccgaacggataggtgtcgcgcaggtccgttttcaccgtgaacgggaggttgtggatgtcttcgagcttctgtaggtcctgtggtttcacacccttggcgtccagccgttcgcggaacagcgcctggtggtcgtacgcccgcttcacgatcgtcttaagccggtgcaattgcagcgcccgcaactggaccaccggcagataatccggtgcactcaccggattaaacgaacttccagcgtcatgcctgaatgcgttcacatcgtccctcccggggtttggctctcaagccgaatatagccaaaaaacaatcaacaaacaaaccaattataggtcctataagtcgtataggtcctattcgcccaaacccaacaaattcgtgtccaactcgactttaaaaccgcccacacttacacgactctaaccaaaaccactcttatccgtcaacccggccgaaaacgtccaggtgccggtccgtaaccatctcgacacgcagcccatccaggcccgcacaagccagttgcgcacccacctcgtccggcgtatacgccgacagcaacgagcggtaatattcttcctgcaacagggccgattccgcccccgcgtatcgccggactatctcggaggccgcctgcgccgaccgcggccgggcgagatcgcgcagaaaaatcagcgtccccggaaggcttacgcgcccgacttccccccacagccgccccgtatccgtgatatggtgaaggatgctgttcgagaaaaccacatcgaacgctctggacttaaacggcgccgccttcgcgtcttgctcgaccggccacagggaatcggccgcgccggctttcttgattgcgcttcgcgccaactccagcatcgcgtgcgacacatcccccgccacgatcttccagccgccccggcgccgccaaagccgaagcgggatatcccccgggcccgtccccaaatccagcgccagcgcccgatccaccggccccgcaagctccaccagccgctcgacaaacgcctcattcacatccgcgaaatcggccgccgcataggccgccgcctcttcctccagatccatcgcctcaggctcgggctgtcgttccattgctgctacctatgtaaagagcccatgcaagtccgggctgtattgtggtgcgggcgtctcgcctgcacatataagatttttttggtaaccttgggcagcagtttagcaggcaaggccatgaaaacgcgcgccgccaagatgccacgtgcaggcgggacgcccgcaccacaaatggcatcgaccaaactaacccgccaaagccctccaccgccgccacccggtcgcgcgggacaaactatcagcagaaatcttaggtccttttggtcccttatgtcccttgtcttgacttctcagacagcctggggaagggcgtaacccgcgcctatgccttccgccccacctcgcgcccgtaagcaaacaccgcggcattctgctcgtggagtttttccggcaggttggcataaacggcctcgatccaaacgctctcctcgaggtccaggtgcgtgctcagcacgcccagcagcgccacgttcagattgcggcggttcacgggcgaatcggggtctttgtccaggtcgccgaacgtctggccgtccttgaggaacatctcgggcttaaaaatcaacccgtcgggccgcatcacgtgctgggccgcctcgatctgcgtactgtcgagcgctaccatgaactgcgcctcgcccgacggaaccatcgggctgaacacttctttgccaaaccgcacgtcgctggtcaccgacccgccacgctggctcatcccgtggatttcgcttttcttcacgtcatgcccggaccggaacgccgcttccgccagcatgttggaagccttgataatgccctggccgcccaggccggcgaacaccacgttggtcacctcgtttttttcaggcattggctttctccgtcacggacgcagtccgggctttctgctttttcaccgacagcaggcacgggcgccgcgcgataatcagcgtcagttcctcgctggccaggctctctttgaccagcgcctcaaaacccgccgggtccacccccgtaaacacgtgcacgttcttgatgccaatcgatcgcgccaagtcttcaaagctcagcttgtgggtatcttttttgttgagcctgacgccggtgccggggtggtcctgcaagcccgtcatggcggtggtcccgttgtcgagaatgaggaccacgtggccggtcggcggcggattgtacgccatctcgacgaggcccgtaatgccgccgtgcacgaacgtgctgtccccgatcacgctgaccacccgccgcgcttcgtccggcggcagcacatgtcgcaagcccagcccgttgccgatgctcgcccccatgcacacgcacgaatccatcgcgtcgatcggcggcaggacccccagcgtatagcagccgatgtcgcccatgatgatgcaatcgagcttcttcaacaccgacagcgccgaccggtgcgggcaacccacgcacagttgcggcggcttccccggcggccggatcggctcgggcgattcatcatgcgccaggatccgtctcacccggtccacgttcatctcatcaaaccggtacatctcagccttgccttcgcacgccaccccaatcgcccggcacgcgtccaccagatacgggtcgttctcctcgataaccacgcagcgctcgacgcttttcgcgaactctttgatcatggtgtacggcagcgggtacgtcatgcccagcttcaggaagctgccggccggcgccgcttcccgcgcgtgaacgtaacacacgcccgccgtgatgatgcccagcttcttgctgccgtcgaaccgccggtggagcggcatcgtctcgccccacgcgtagatttcctcgagcttcgcacgcaggcgccggtgtgcgggccgcgcaaaccccgggatcatcacgcggccccggatatcgtgctcgaaatgcgccgccagcggctcgagccggtttgcccgcggcgtcaccaccgtctgcgaatggcaaacacgcgtcgtcatccgcagcatcaccggaagtttccaccgctccgaaatctcgaacgccgcgaacaggaactcatacgcctcctgcgagtccgacggctcgatcatcggcatgcccgcagcgactgcgtaccgccggttgtcctgctcgttctggctcgaggccatccccgggtcgtccgccgataccagcaccagacccccgctgacccccgtgtaggtcgacgtgaacaccgggtccgccgctacgttcacccccacgtgtttcatgcaagccagcgcacgcgcaccgccgaacgccgcgcccagcgccacttcatacgccaccttctcattgggcgcccattgggccggcccgcccaaagccgccagactctcgagaatctccgtggacggcgtgccgggatatgccgaagccaaagcgacccccgcgtcccgggcggcaagcgccaccgcctcattcccgctcaacaacattcggttcttaccacttgtgtcggtcataatatgtcctgcgctgttttgtagcaccgctgaaaagaaaaaaagacacccaccgcaacctaccaaaattccggcggtcaatcaaatcacccttaaattatgcctgctcgaacccgttcccgcaacggcccccgttttatttttcacagccatcgggacgcctcaacctttcggggccggggccgtatgtgctactcttataactggaaacgtctacgataaggagccgcagcatgggcctgtaccgatttcaagtcattatcgagcaagatgaagacggctactacgttgccgatgttcccgctttgcgcggttgccacactcagggcaagacgttcgaagaggcgatgacgaatatccgtgaagtcatcgagatgtgcgtgcgcgagatgcgcgaagacggcctcgagattgaaacgcagtatccggaagtgatcggcataaagaccgttgagatagcggtgtaagcacccatggcccacgaccttccgatgctgagggtaaaagaactcgtcgcagtattggaacgtttgggctttcagcctcgaccgttgggggcaaccagtcaccgccgctatgtccatcccgatgggcgcagaactaccgtcccatttcatgctggacaagacatagggcgcgggttgctgcgaaagatcttgaaggatatcgaaataacaccggaagagtttaaacgtctcttataggcgcagcgtccgaacaaggtgttctccatgcctcgaaacactgaaaaacaaattattgagatgctgaagaaccttgcgcaacggcttgggcagaaaagcctatcgaagaaagacatcgcttcggtaatggctgtgtctactttgaagtatcgatttgggaatattggaaatgcattggaggcagcaggccttgatcgagtggctccaggggagcatttaagaaaccgaggccctgttctaacggagcgcgcccttttcttagcgttgtatgaccttgaaaagaaaattggtcacgagcccggctacaatgattgttctgcccagtgcaaatattctacaaagccctacttcaaacgatttgggaaatgggccgatgtccttgcgcattaccggaaatggaaatcggagaacagccacatgatcgtctcaacccctgaaggcgaacgagtcgtcgaagaaggcagcgaaggacaggagagctccggaactcaacgtatgatttccatcggtacgacaagaaagaagacaccggaacaactatacggcgaacccattgattttcgaggtttgcgacacgcccccatcaatgaacaaggcgttgtattcctctttgcgatggtgagccgggaactgggttttaatgtcgaatcggtgcaacaaggttttccggattgcgagggaaaatatctgtttgattctaagaaaaacctttgggctaaggctcgcatagagtttgagtgccaagcgtcgaattttgagcaacacggacacgatcctaatcaatgcgatttcattgtttgctgggcaaatgattggccgggctgccccatcaaggttattgagttgaaaaacgaaatcctgaaactgccttcccgctaaatgaggatccgcgccgcgctagtccctacccgtccctgcctggtttgacgcagccagattcaccggggtactgttcttttgtgagcgaacttgcgttcaaatatgtcttcggtcccgcgctatcgcgccggcttgggcgttcgctcgggattgacgttgtcccgttcaagacctgcacctacgactgcgtctactgccaactcggccctaccaccgtccacacgctcgaacgcgtccgtttatctgggccttgcccggtcggccaaggagtgcaactattcttggccgacttccagatgcggatcctgtcgtagcgcttcaagtcataagacacggtggaaactcaggggaaaataggcgcccgcatttttggttgacacaaaataggcaatcgtatatatttgacgccgtcgcgggtgctagcgtgcttgaacagcaaggagcaggatgtgtcgagagagaaacgtcaagacaaaccggctggacgacctgtgctggagaagctgccaagcgcggaattggaagtgctggcttccctctggcaacaggggaaggccacagcccgcgagatccgcgaggcgatgcagggctaccggcccatgacgcacgggtcgatggtctcgctgctcaaacgcctggaaggcaagaacctcgtgtcgaaagagaaggggccggtgggaaaggcattcgtgtattgccctacccggccacctgagccgacgtatagacgaatcatgcgggacctatacgagcgtgtcttcggcgggagtggcgttgccatggtggcgtcgctcttcgagtcgcgcccgcctacgtccgaggaactggatgcgcttgaaaggctgctacgaaagttgcgggagaaacacaccggggagaactgaataccatgcagttgctgcattcaatcgagacgttttcagaggtcgtctggccctacgtcttccatgccacctggcagtcgatgctggccggtgcgctcatcctcggcatcgtatggctgctgcggaatcggtccgcgtcgctgcgctacgccttgttgatccttgcactggtgaagttcgccgtaccgccgcttgtggccgtcccgattgacctatcgcattggacacctgcagaggtaccggtgcgggaggccgtcgcgcctctgccgaaggagtcctcccaggtccctgtcatcgacgtgagcgctgtacctgtcgaggagcctcggccaccttcgtacgttggttcttcgcaagcgcctccagaacaaccacagactccaatgccgccgatgctgccggcggcgcctcagcaccacatggcctggcacacgagaatcttggcactgcacctggcgggggcgtttgtcgcgtgcctttggatcctcggctggacgtggcggatttgggcaatgaggagacgcgcccggatggtcaccgcaggaccattgtacgaacagttcctgagcctctgtgcggaattggacctcagccagcgcgtggacctcttcatttccgaggacaaaacgtcccccatagcgttcggtttgttccgccctaaggtcctcatgcccgcctccataatggacgaactctccacggaccaactcggcagcatcctggcccacgaactcgcccacctccgtcggtgggacctttgggttatcgtgttcgagaatctgcttctgctcttgtggtggttcaaccccgtcttctggctcgttatgcgcgcactccgccggacacgcgaggactgctgcgacgatttgatcctccatctgcgcctcgcggaaaacaccgcctactgcgaaagccttgtccgcgccgcctcgagcatcgcaggtttcggcaggctccgccccgccgtcggaaccgccgagatgctccaccccctcggtcgccgcatgaagcgcatcatggacgtgaccctccgccgttcgcccagactctccattgccggcgccatcgccgtcgtactgctgggactggccgtcctcccgggactccgccccgtcgaagcagaacacgacgcaacggggacgaaccgccgcggcgcggagacggttgttcctgaagggtatgagtatctcatgcctcaactcgagccgggtccctaccggttgcacggaacggtccgcgaccaaaacggcgcaccggcggccggggtcaaggtggcggtattccgcggggaagcgtggcagtggggttacaaggacacctttacggccgatgacgggacgtacgagatcaccggcctgcccgatggggcgtacaacgtgtttgcggtcaccgccgacgcgttcggggccgctccccttacgctgggaagtcctcttttgccagacgaaaacgtgtcgcgagacttaaccctcacgccgttcgaccccgacccgctcgaaggaaccgttttaagcaagacgggtgaacccgttcctggcacgctggttctttctatccgcgaatggagttcctacggcatgagtctggccctgcagataagaacagaccagaagggccgattcgcgatcccgagatggacatggccatacggccggggatcgcaaattctgttaccgccgaccctcgcggcgtttgctgagcggcaggaccccggcgtactcctgggtaaactgccggaaggcgagccgctcacgctcgttctcgatgacggcgtccgcgtttccggcacggtctgtttcaaggattccgggaaaccggctcgcggcattcccgtgatgttacgcggcacgcccgcggacaacgacatgcccgacatcactacgcgcaccgatgaatccgggcgctttgttttcgagcgtctctgtccttttcagtatcaactcgtcatctatgatgccgaggcgggctacacggcgctggagcatccccggctgaaccttctcgacggccaggatgttgtcggcctcgacatgcagatctcgcacggcgcaacaatctcgggaaaagtgacgtttcaagaaacgggcgagccgatacccgcagtccggctgtgggtgccgaacgtccgcccgcctacggtgttgcgagaggcggtcaccggatccgatgggacttaccggctgcagcatttgcctgcaggggaattcgccgtggcctacgccgtcccggatggcgtcgtgcgagagcctcgtccctcggacattggacccttggtggcgaagactgtctctgttggcccggacgagcagttgacggacgtggacttcaccttcgaacgcggcgcgtgcgtgtcgggccgcgtcgtcgatcaagcaggcgatcccgtcaagggtgcgcgcctgcacgcttcgaatagccatcgtaaccaactgcggcccagtcgccgcctcactacgtccgaaacggtgaccgcggaggacggggcctattgcctctggggcctggcgccttccgaggaatggacctatcagttagtcgtaagtgcggacggatatggacggattgagtctgatccattccaagtgacgggcgagattgatggcaaggacttcgtggtccagaggtgcgcgacgatctcgggccgcgtcgtggacagccagggtcgccccgtccccaccgttgccgtaagcatgaagattaccgaaggtcgtgcgtcacagcggttacccgacgctctcagcgacgttgaagggcgctttgcgatgcgggagggcgcctgtcccgggacctacacgttcgagctgtgtaccttgaatatggggttcggtccgtatcggacggtggatgcggcgaacccgccgcttcgagtcgaaggcccggatgacatcgaagggatcgaactcgtgttgcccgacgaaaaagccccgcacgatgccacgcctgcaaagccggatgctgcaccgaaggatactgccgcgaaggcgccggaaatgggtttctccgatggtgtggaacctattcccgccatagacgaacttcccggaaggctcgtgttccacggccgctatgttcaccggagccgcggccgcgagtacgaccagccctcgtctttgtgggtcaaagagcaggaaaacggggctgtcagcgccctatcgcatttgaccttcttcaacgaaacagccttggccgtgggtgatgagaatcaccggcccgcccactacgccgcgacccgcaaggcatcggaccgctatcccgcgttccaggcaaggattgacttccatgccaacaaggcggtccagatccgtcattggggtgaggagaccgacgataaggaattccctatcgacgagggcgccctgttctccctgaactcgcggcccgacccatacgcggttatcaacgttctcatacgcgggttcgggctgaaggcaggcgagggcaaggagttcatcatgtgcgattggggcaacgggccgcatggccaaggcacgtttccctcgtaccgtgtgcgcgtcgaaaacaagggcaaagaggagattgtagtcccggccggggcgttcaataccaaccacctcgtccttacgcaactcaccagcgccgacacgtggttcaagaagcgcgccggccatgtcacggacctttgggttctggacaatcacatcgtcgtgcgcatcgtccgtcaccgggaaccctacgaggtggaactcctcgactacgacgtcccggaccgtttgccgggccagatttcgcgtggtgtcccggaaggagcgcccttggaagtcctctccgcagagtacggtgcgcaggacaagtgggtcgacgtgaccgagccgttgaagcaacgcatccaaggaaacaaactgaccgtcagtagattcaatgaccttgccggcgatcccatcgacggtgtggtaaaggagttgaaggtaaagtaccgcgtgggggaccaaacccgcgtcaccacagtccgcgagggcgaaaccctcgagttggacatcgacctgagctccggggcaaccccggcgggggccgctgcggaataggggccaccggaagacaacgttacagcctggaaggagacgaaatatgaaacaggtgctgattggcgtgggcgtgctgcttgcggctttgttggtgatccctgtgatcgcgtacatgatgtcggggggcaagctggagccgagtattggtgacgccgcggttgcctcgtcgttctccgcacaattggtggatacaaacggaaaacccttcgcggatgcccgcgtctatcttcatcctgccatcggccatccggacaagcggggacaggaccgcgccagcatgcccatgcagaatacggaaaccgatggcgagggcaagttctccttcagcagcgtcagtccgggcacctacaccttgcagttctattggaaggacggaggggacaagggaaacctctacctcgacgcgcagaagttctggctggatgtctcgccgggggccgccgcctccgaactcaccattgtcgtgccatcgctggcggcccactcggtgggcggctacgtgcgggatgcgcaagcccgtcccgtcgccggcgtggcggtggaagccatgggcctcgcggactactcccgatcatcgaccaccaccgacagcgagggacactacttgataagaggcatcgcgggggatgtagcgggtgcgatctggttcaagggcgccgggaaagcggaactcaaggatatcggcatcggcacaaccgacgcaaacgttacgttgcgttagcctgcgaggacgggtggaccacgaaacacgccgaagccggccgacgttctctcttgtcgcggtccgccgtcctttcttttgacaccgctcggggccgtagggtacggtcttccctaccaggctgatctcgtcagggcccgacttccagcggatcgtttggtctatcatgtctccgtagatctcagggcagtcgttcaacgagtatccgtcgaccggtgttccgtcgatatcttcgagttcgacacgcgcgcttcccgctgcgggcgtggcgtagttgaggaccagtttttcccctttgaaccgaatcggcttcgtgacgaactcaccgcccccgagcggcgcatgcatcaaaacgaacgcatcgacgcgaaaggtgtaccgtcgcatgcaattccccgcgattacgctggtgtgcaacaaaagggtaaagactcagagtatggcgactcctgctgagtttgacttgcgccctgcccaacgggcatcgttgaaactacggcgcggaaaatctgttgggtacccgaatgtttggtgttggccgcggccctgattctgggcgcggcgcatgccacgccgataggggacgacgatggcggcactaccgtgatccgcttctcctattggggaaacatagccgatgacgccattttccgcgaagtcgcggaatcctttgagaaaagtcatcccaaagtccgtatcaagttcgagtgggtcgtcggcgactacgggatgaaactgcccctcctgctggtcagccagacggccgccgaccaggtgccgcgcgacgaagcccaagaattgcgcaagaccaatcccgaactgctcaaaaagacccgctacatttggctgaagaaccccgagaacctcaccgacaagcaacgcgcgcgacttgggcatttggagcagttgaacctgcgcagcaaccgcgcctatcttctcaaagaaagcttccgtgaattctgggactatgacagcaaagacggcgcccgccgctttctcaagaagtggttctggtgggcgacacactcccggctcaagcccatgcgcgactttgcctggacgatgaagaaccacctcgacgacctcctcaactactttgagatgcgcatcgacaaccgcgccgtcgaaggcatgaacaacaaggccaaagtcgtcagccaccgatgctacgggttccgtaccgccccccattacatcaccgccctatatcattgcctgggcgacctgccggagcccaaactcgtgcacaaattcttgtgaggaacctctttttctttgcccagcagtacttcgtgaagggcatcgtactcacagggattaagggctgaatattccaaaccttgtggccgtcgggcgcgattctctttgcgcaatgattccatgaacagcatgcccttaagagaagtctgtaatgtcatccgttctcgggccaccattgaagattcctgctgcatatgcctctccggctttttcgaatggtctttgaggtcgtgaatgggcagcgcgcgggggtagtatgtgcctggccaaccagtcgatctcctgtctgcccgtgtggttctccatcccaccagaccaagacgaagacggttactacgtcgcggatgttcccgcgttccgcggttgccacacccagggcagaacgttcgaggacggaggcaatgaccagccagcatccgcgaagtcatcgagatgtgcgtgcgcgagatgcgcgaaaacggcctcgatactaaaacccagtatccggaagtaataggcatcaaaaccgtcgaaatagccggggaagctcccatgggccacgaccttccgatcctgacggcaaaaaaacaactacgcctcctctttcgagacgcgcctgtaggtccaaaatcatttgacctgctattgccggcgattcgggtccacgattcgggtccacgcttgacgcacccgctctcccgcaggtactgtaaatctatggctcagaaatacgtattcggccccgccctttcccgccggctggggcgctcgctcgggattgacgtcgtcccgttcaagacctgcacctacgactgcgtctactgccaactcggacctactactgtccatacgctcgaacgcaagccctacgtgccactcgacgaggtactcgacgaactccggagcaagctcgaaaccggcgtcctacccgattacgtcacgatcggcgggtccggcgaacccaccctctattccgagatcggcccgctcatcaccggcatcaaatccctcacgccaacgcccgtagccgtcctcaccaacgggtcgctcctgtgggacccggaggtccgcgacgcactgaacctcgccaacgtcgtcctgccctccctcgacgcctctgacgcgcagacgttcctcgccgtcaaccagccgatagccgccattacgtatgagagaatgatcgcgggcctggaatccttccgcgagacttactccggccaaatctggctcgaaatctttctcaccgcccccatcgaacctcaaagccccgccatagaccgattcatcgactgtatcggccgcatccggcccgacaaaatccacctcaacaccctcgcccgacccgcaccaggctcgaccgccgttcccgtcgcccccaacatcatgcaaaagatcgcacgccgcatcgggcccaacgccgaagtcatcgccaactttccgaatattgtggcgcaggcgtctcgcctgcacgtctccgaagacgaaatcctcgccctcgtgcgccgacacccctgctcactccaagatatcgccgccggcctgtcaatccccgttctcgaagccatgaaacacgtcgagcacctgctccaacaaggcaaactcaccgccgaataccgaaacaacgtcgccttttacctcgccgccaaccgcaattgaaccaacgcgcgggcgaggcgttcttccgcagtcaatttaacccgctgctgctcgctgcattgccccatcgcacggacatccggccgttgccgccgtcgactacggttaggaaccgcgttgtgtcaccatccgtcagcggttcaaaaggttgtgaagcggcatcgtcgcggggcggcagcgcgaactccgtgtccggaatcggctcgttcatgccctcgtaggcaaacgtatacaggctgcgcatgcatagttgattgacggcaacctgaacgggcatcaactggtgcgagtcgatccaccatcgaatgatcctggcctccgtccagtcgccgggaaggtcggctgtagtcgacttaatcacgtgggcttggcggccgttaaaactgaccatcccttcgtattcgagatgcagttccgcagtagccgcgtctacgtcatgaccttcaaggtcaaagggatcgcatatcaagatgtttttcttgccgattgtgtcgtgcggcgcagcctgcacggattcctctgtctgcccattcttatcggtggtggtacacagccaccagcactggtccccatccccggctacaacgaacctgtttgtggataggttcacgtcgccgtagaactggcgattcccctgaaacctgaacgtgccgccatcggctttaataaacggcgccaattcgacgggcacgacgccaaacgcgtacgttaccatgacatgctcggacacagacgtcagatgctgccgcgcctggcgcatctcgctcagcaccgtgagcaaccggggatctttcgccgcctttttgaaccgttcgagtgagctctcggaaaacggttcgcgcgttgtggacaggtgcagcgggaccggcgcggctgccgccccctcgaccgtgcgaaacccccgaagttcgatatccccctgccaatcaggcggaaacgataccggcaagagaaaccgctttccacgctcgtcatactgcacgtccgccagcagttgtgcgccgcccatcaaggatctgtccttgctcaagtcaacaatgtaacccgcggacggatccatcggctggtcaaaaaccacctctatgaacgtaagacacgcaaccgtgtcacccggcgcgggcgagagcgatgcgacgcgcggttcaggggcgtccgcccggctcggtacagccgccgtctcaaagccccaacggtactgcgcggccttcacgccatccgcggaaaggaatccgtcgtcatcactgttaacggcaatgaattgttgttcacccggcgttaaccgtacgggaaccacgaactcgtacgactcggcatcgtactgtgccgccgaaaagtctctcaggccgcccttctcgaaggcaatccccattctgtccggatccataggccggtcaaattggatcctcagttccgtttgcacggccacattcttggctgcgtgcgccgggaagacaccgaccacaaccggctggccttcagcggacgcctgggcgggctcctgttttgggagggccgtcttgagtgcggccaattcctcctcactcggcatctcgacgagggccggcgaaaacgccgccgtcgagacgttcgtgacataaatgcgtttggatggcttgccttcttgcaggttgaggccctcgcgcagaatccacgcgtcatcctttttttggaactcggcccttaatacccactcccggtcgtccaacagcgtactgtggtaggccagaaccttgggcgcggattggcttccgaaggccaggaattccgggccaatttcgatcagttctcttctctcgccaccatcgggtagttgcgcgaagtcctcctcgagcacgggcacaaattccggcgtctgaatgtgcagtcgcacccggctgacggggtacgagctttttccgaaccatgttccgcccaggccgaatcccactgccgcgccagtcttctccggttccgcctcaatcactacgatgttttcagaaggcgcatcggtcgactcgacaatgcgcgcattctccggcaggccgcgcctggcaaatgcgtggagcgccgtgtgccacatcaatccctgccggtacgtcgacgcgttctccatcggcatgggactccgctggagaaggccgtagggctgcaaatagaccgcattctggctgtcaaacaccatctggctgccctcagtctcccagcggcctttatcgccgtcaatccaaacgcggtgcaccaactcgggcgtgtttcccggctcgggcccccccatgtttagcgtgtatcgcagatacgttggtcgcgggtcgagccacacgcggtttacctcaaccacctttctccagacatctttgggatcggacaggtccaccggtttctcaacggcttccgtggaggcgtcggccgattccgcagccgcagccgcgacgtcggcaactgtctcggttacagtggctgcagccggcgggacggcggccaagtccgcggtgctcgtaacaacagccggaatcggtttctcaagtgcctccatcggtccgatggctagtgtgaccacaagtccagcgacaagaagtattggaaccgcgataagtttgtgcgctatgacgagttctcccagttgtcttgccggatacagaatacgtgtcagactggctgtctccgtcagaccccacgaaaccggcgccacaacaatcgctttcatgaccgtcgagaccttttcctgggacaccctgtaccggcccgcctcgacgcgtttgagcatgcgctcgccgagggcttcccgcgcccgttgcagtcgttttgccaaagcgagacgactcacgccgagcaaggattccatctccgtgagggaacgcccggcaaagtaatgcatcaatagcacttcgcgatggttctcgccgagtttcagaagctcctcgtgcaacagcccgtccaattcagccgcctccccactcgcagatggctcgacagccaacggcggcgttgcttcatgcagggacgcttcgcgccctcgccgggccaacaaggtgttacacacgttccgtgcgattgtcagcagccacgccccgaacttctctttaacgcgaagccggtcaagagactgaaaggcccgcaggaacgtctcctgaaccacgtcctccgtatctgacacatttcggagccgggccatagctgtggcctgaacaacgggcatatatcgctcgaccagttccccgaagcgctcccgctcaccggaaaggacgtcctgtatcgcctgtttatccaatatgacttctcgcccgagcattgtttgttctcctgtagctcatataatagaccgataagcgtcattttgttgacatcttgtgtaaacgccggtcgagaaattaaacacccttgctagcctcacgtttttcgaggtacggcgccttggagtcgtcggcggactactgcttgaacgcgcgtggggctcagcttttccctaaagcgcaaagggctgtccgtatgggcaacacgcagtcgggtggtcatggcacgtaatgcttggcatgacagtatgttgcataaccattgacgatcttcagaggttcttggaagggcagaataaggccctgcataaatcggatgcaagatgagaatcggtacgcgagcaaggatgtggaaatgtatccgggcggctggatcggccttacccggggaggcttccactatgtcatccgaacatctttcctctcaatcattattcagcgcctggttagctgaccatacgggcgtaggttgctctgacttgtctgcaacgatcgcataacgaattccggggctactctctctatttttgggtcccatccttactcgcggaatcaagagcatacagacaaataaaaacccggcctccagttctgttgaaatcctgtcataatcatttcgcatcctgaccttgatttccgtacgcgccagtttccgtctacttctccaccggcaactcgggacgtgcagcccattcggtccagccagcgtcgtagtacaagacatccttgtaaccaagcaaccgtttcaagacaaagaatgtctggctcgcctggtggccggtgcggcaatggacaatcacggttgcatcttttgacggaacaatggctgcataggccgccgaaagatcggcaaccggtttgaacgtcagcactccttcgttcttcaccacgtcttcggtgtagggccggttaatggcgccggggatgtggccggcgcgggcctcgtcagacttggcgccgctgaagtattcagggggacgcacatcgatgatgatggcggatttatcctgctggtgcttgagcacagtcgcggcatcaacagtgaacgtatctgcccccggcatgggcttatactccgactcctgtaccgacggcagcacggtatccataggtcgcttttcggcggcccatttcccaaacccgccgttgagcaccgcgtagcggagatggccgagccgttcgagccccatgcagggcaaggtggcgtcatgcgccttatcgctgtagataaaaacgagcagattgtccggcgttatgcccatcaaggacaagtggcgcgccagcaggtccgccggcagcaacatcgacggtagtcctttgacgttgccgcggaagctctccacggcaaggctgagtgccccgggaatgtggctggtgttgtattcgggctgcggcctcatgtcgatcacgacaactccggatttcccaaggttgtccgcgagccactgcgtctccaccaggccaggcagtcgttgattgtccatggctacagggggtgccggtgatgctgccggtaccggcgtggcgaccgcccgagttgccgcggccgtcggtgttaccgccgtagccgatcttgccgtaaggaagaagttgcgccatgccgtcaccttcgcagccaacgcttgcgggattggttctccacgcagggacaccggtttcaggcaccgctctatgaagcccttcaaaccgtcggtgagcatatagatgttggcgtatcccattctttccagtgcgtcacgcacctgggcggggtgcgtcatgccgttcgagtagaggacaaccgtcttttgccccttgtgcgccgccaggtactgcggtaactgggcgagaccgacattaaccgctcccggcagatgaaaggccttgtattcgccatcagtccgcacatccatcaggagcaaattgggatcacccgccagcaaccgatccgcaagttcctccggctcgatatgatcgccgccctgctcgacttctttgagcagcgattcctcgccaagagccgattgctcgtgtgtcgccagttgggctaccgcggctgtggcaggggttccggttaccggcaccaggaacagtccggcggcggcaacaacaagtgcaaggctgaaggccttcaggaaaggcgaacggaatagggcgccgcccgtggcgcgcgctttttcgatgtactcggcgccccagaaacagaccacggcggcaagcgtgaaggcgacggcaaacaacggcttggacacgtggagcgtgtcgtaaacgaactgcacgcccctttcgccagaggtatacaaaggtttgaccagccagaaaagttcgttgaacaggacgctgccgccaatcgcaccaacaagaaacaagagagcgtccatcttgcctgcggcgagtcccgcggcggccgtgcccggacaccatccgcccatgacaaagccgacgccgaatatcaagcctcccactatctgggcgccgtagacggtatccataaagaagatgctttctgggcggacccagccaaacgccaggcaataacacaaacccagcatcgcggttatcagcgcggtaaacatgaccttgaggacggtcatgtcgcgaaaatagaaaatgcccgccaatttccgcgaactgctgaaccccgcgcgttcgagtgaaaacccgaagaaataccccaccagtaacgccacgaaaagagccgagctggccccgagggaatccgaaccgtagaatgtctcaatcattccattgcctcctcacgaaccacgcggcggcatagcccccggcaaacaaacacaccataaaaatgaggctgcccgtcagcagcagggccccgcctgtcaaggcttggcctgacgtgcacccttgagccaggcggctggcaaagcccacgaggagacctcccgcgacggctaaaagggctcggcgtcccgccggatacgcagcgcctcgctcgatctggaacgagactcggttggccaggagcgccgagaacaatcctcccaggaagatgcctacgagcataaacacgaggtaatacttcaagggcgagccgctccacgggccaaaatattcgctggaggccacgtggccgggaacaatacatccttcggtaaacgcggcgactcgtgcaattccgccggaagcgcccagcccggctccaagcaacaagaacgaggccaacaacgtgagtcccaacagaatgccggccaaataagggttccaataagggttcacttttgttttctcgtctatcatggttagcaccccgcgcttttcttcttggccggttgaggggcggcgggcgcctgggatgcaggcgcggacgctggcggagccgggggagctgcttgcggcatggaacttcctgccgcagcggcagatgcgcccaaagccacctctttgaccactgggttcagttccgaagccgcccagtatgcttccagtcctccatagagcgcccgaatcggccgcgtcgtcttctgcgagagaatgcccgcagccgccatggccagggaaccgtcccggtctacaatgaccaacggcgtcgtgccattcagatattctgagttggtgataaggtcgccaatatcgacgtttcgcgcccctggaagcgtgtagtcagcaaacatcgcgggcggccggatgtccacgaactcgaaggtcccgggcaaatccacaatcatccgtttcaaatccgaagccgaaatcctttccggcagattgaccgccacccttggcggcggtggcgttgccgatgcggaaaattgagccgtctgcggggccaatgccacgggatatgacgcggccgtgtcgaatgcggttggcagtgccgcatccgtccaggcggtcattccgccgagaagacttgccacattcttgaacccctttcgttccaggacacccaccgccatgctcgagcggtaccccgagttgcagagggtgacgaccggttgcgcggggtcaatctgggccgacagtgtgtcgaggtgttgaagcggcaagttgagtgaggccgcgatacgtcccttggacaattccgccgccagccgcacatccaggattatcggagcgtccgccttctctacctgtgcgttcaggtccgccggtttcacgagcgtattcttcgccaccggctggctggatttcagccaagagtcaatcgagacaacccccgcgtgatacccgaccctgtgcaaccggtagatggcctctttcatctgcggagccgtgccgcacacaaccagtctggcattccaaggcaccatgatgcccacccacgtttccagccgttccgtcagaccaatattgacggaactgggaatgtgcccgatcgcatagtcggcgtcgctccggagatcgaccacgtaggccttggccgggtccgtcaggttcacatcggctggatcttccttcggcatcggcgcgctccaatccaccaggtccggcccgttccggttcaatgccgcatcgtggtggaaatactgcggcgcttcgggcagacctgcgaggtctgccgcaatatactcgttgcggcccttgtgctggaggtagggattcttggcgcgttctgccccgatagtcgatgagggcgcatcgctcaggttggcgccacacaaggatcctgcaccatgcgccggaaatacaaccaccgcgtcaccgagcttggcaagcttgttcacccacgtgtcgaagctcatacccgcgagttccgagcccgtcatcgtcccgcccagaaggtccggtcgtccgatactccccacaaacaacatgtcgccggtcaggaccagttcaggcatatcgggtttgtctttgctgaagacataggccgtcatgctgtccggcgtatgccccggcgtggccacagccttgacggttgcctcgccgatctcaatcacggtcccgtcttcaagaggcttaaacggatattcggcttcgctgatggcgctcgcgtagatggggctgccggtcgccttcgccatttccatatggccagcgacaaaatccgcgtgcgagtgcgtcaggaaagtgcccttgaaactcagcccctccttcttcgcgtagtccagataagcgaatatatcccggccagggtcgaccatcagcgattccttgccgcttaccaccatgtaggaatagtggctcaaaacaggcaacgtaaactgcacaaggttgaatcctggatacttgtagacgtcgacaaccgagtagtgcgtagtatccggttcctgcggcgattcagcccatgcaatccgtggcgctgcaaacataaaaaacagcacagacatcaggacggcgcagacgcatacacatgctttcatgtttgacctccttggaaatcttcgaaaagctcgatattccataacgtgaaccgttgtttcataacacaaattccctgtcgcgtagggtcaaaatatccagccaacgtgtaaccaattctagccaaacgagttgcgcttaagttgtgtgtcggcactgaaccgattgactcggcctcaacatgcgggcatcatgcctcttttccatttggaaaggattgcccgttctcatgccggaattcatcctcaaaccctggcatctaatcgtgttgtttttggctttccatatcaatctggaaacgccggtcgagaagtgcagcaccgtttgtggcggtcgaagttgctgagtgattggctgttgagcacgaggtcccatgcgccatgcacttgccgtatgtgcaataagcattcatctgcttataacgcttaaaactttacattgcagtatcctgcaaaattattgacgctcggcaaaggcccgcgtaaaggcagaataaggccctggcgtgggccgtgcgcaagtagaaaatcggtgtgcgggcatggatttgaaaatgaatatccatttggtccaggaaacctcaaggctcatcatcgcgttcccgaccgtgattgcctctttcttgtgccggcatggtagcatagcgacaagagatctgaggagtcgttccatgttcaagagattgatgctcgccgcattcctcctcgcaaccatcctgacggccgctgtgctcctgcgcgccgtgctggctaagtcgcgacagtttccgcccgagacgcggcaaccaatgacgctgaacgatgaaacagcggcggcccatctctcggaggcgctgcagtgcaagaccgtttcctacatggaccaaactagatttagcggcgatgagtttcgcaaactgcatgcctgcatcaaaaaggcctatcccggtatccatgcccgcatgcagcgcgagttcgtcaaccaatacagcttgatgtacacgtggccaggaaacgaccccacgctcgagcccatccttctcctggctcacctggacgtggtcactgcggaggaaagcccactggcgtggacgcatccgccgttcggcggcgtcattgctgagggctgcgtttggggacgtggcgcactcgatgataaaggacgtctcatggcaattcttgaagccgcagaaacccttgtgcaagccggctacatgccccagcgcactatctatctcgcgttagggcacgatgaagagttgaatggggagcagggcgcagcccacatggcgtcactcctcaagatacgcggggtgcaggcagaattctccgtggatgagggtctcgtgatcacggacggaatcgtacctggcgtcgcaagaccgctcgcgctggtagcccttgccgacaaaggctatgcaagcttcgagcttctcgtcaagcaggagggcggccattcttcccaacccccacccgagacctcgatcgagattctggcggccgcattgactcgcatcaaccgtcacccgatgcccgtgcgttccgagggactgatgggcctcacgttggactacgcgactccggagatgagcctgccgtatcgcgtgcttttctccaatcgctggctgttcggcggactcatcacgcgggagcttgaacaagcgcccgccacgaatgccggcctccgaacgactattaccgccacaatgttcaacgcgggagaaaaggacaatatgctgccgtctaccgcacgggcggtcgttaactgccgacttctccctggagatacaatcgagcgcgtaaggaaccatatccgcgaagtcatgggggatgaccgcatcgagatgaatgtcctgcccggcgcacataacgcatcgcccgtttcagatcatgcggcgcggggctatcaggccattgagaaaagcattcgacacgtgtggcccgcggtcgcggtagcccccagcctcgatatcggcgacaacgattcgaggaactacgctaaagttgccgtaaaccagtaccggttcacccccttttggtttacagaacaagaactggccatgatacacggtgtaaacgagcgcgtcagcatccggcgctatatggaagcgatccagtactatattcagctcatccgctatgcagcaggatgatcattacaggcaacttccgaggaaacgctcgagattcagactggactcagtcttcatacctgaacgataccttgatcctcgctcggtaggcaacgacttggttgttgtcgaccttcatatcgagttgggccacctcagcaatgcgcatctcgcgcaaggttttgcccgccttctcgacggcgttctttgcagcctcttcccatgaattcggcgaggtgccgataatctcgacaactttgtagacgctctcactcatatttactccccttccgtggccgggtcgtgaccggcggctgaaaaccgatactctccatgacctgttccaccagtgtagacttaaaactgacaatcagcaactggtttgtgcaacccaaatccgcaccagccttcagtacgccccgatgcccgggtctccgaacctataggttgaatcgcgtgctcatcaggtagtggatgggctgctcatcattgctgtactcgtggtaggcaacgacgacggtcccatcagccagttgggtcacgctcggatacccgatgtgccaatactgctgcataactaatgcatccagaagagtacgcgaaccgctgcccagcgacggcgccggcacgcccccctccctgatcacgaactctttaccgatctcccaagtccggccgtcttgcgagatgcagccgcgaacaccccacggggccttcctgtagccgtagaccgccagtacgcgtccgtccttcaactgcacgacgtccgccggataaccccagagcgacgttctcttgggcgggctccacgtgactccatcgtcatccgaacacgtgaaccacatgttgtcctgtcgatttggtttgtggtgggtcctcatcaagcacaccagggtgccgtcgctgagccgcgccatccctggctccgagaagctgataatgccggccgcgtcatacgccactgtggaccagtactcccagttgtcaccgccatcatccgatctcaacaagaagcagcggctcggctcggctccgttttcccctttatccgacagtgttccgcccaggggcatgagcaaccccccgtcgggaagttccatgatgtgccccgctcccgacccgccgcaagcgtaccaggacaacgatgagctggcgataggattcgtgttgacctcaatggggtcagtccaggtcacgccgttgtctttggatttaagcagcgcataccccgtttgcctcttgaggcgttcgggcatcccgggaggaggcatttcaagcgattggtcgccttcgtaattgattcccctgggtgcgatgaaattacacacccgagtgtgcatcagaatagtcccgtcggacttctgggaaaaggcacagtcccagttgcccttaaactcggtgtagggccagatgacccgcttggcggcagtgttccaggttctccccccgtccgtcgatttgataaagcaagattggccgctgtcggcatggacgggatatctttcctcgttgaatcccaaaaagagctccccgttttgcagcaggacgatactgacctgattgcatgcatgggccagacttggatccttgtacacgactacatgctcgacatctttaatgcttaccttggtagttgcagtaacatcatttgaatctgccgcgtacgccgacactgtaaagcctgcaagcatcatcaaaaccgccaaaattgccattcttctcacgagacatctcccttccttccgacaagccaacgtttaccatatgttctgcctgcgaccatcgcgggcaagttctccgcgatcatacaggcccggaccgacgccctcaagaccagttcggagggcgttcaaggcccaataacacctttcgcgagcagtcctcagcgctgttcatgcgaattcgcgcagaccgcccaatcattatgagccatttacttgccgtatgtgcgacacgcagcctggtgcttatggcacgtaaagctcagcatgacagtatgttgcaaaacagttgacgctcttcgggcgcttgcgtaaaggcagaataaggccaggacaggggccgcgtacagggcgagaatcgctgcgcgggcatcgctgttgaagaaccggatcaggcgaagcagttcggacaggatgatccggctatcaccatcttggtcggctgtgtagctcgccgggggttcctcatcaccctctggtacaggcctccttcgcccttgtctaactcatgaagacccgtagggaacgggaaaagcccgcattcttgaaaaaaaattcacgcgcggctacgctggtctacgggttaggcctgtcctatcatctgcggaaggagaccggaatgcgcaagacggtccggaacattattcttgtatgggtctttctctcactcgggttgccgttatgggcagacgggatgggctttgatctgagcctgcagcaatacgatccggtcaccggtgagcgaacactggtcacggggaagcttgtcgcgaccaagacggcggtcgtcgtggttgatatgtgggaccaacactggtgcaagacctacaccgcgcgcgtgggcaatctcgtcccgcgcatgaaccagacactcgacgccgcgcggaaacttggcatccccatcgtctttgcgccgtcggacgtggtcgatttctatgcggactatccccagcgcaaggcgatgcaggccgttccgtcatatccgccgccggaaccaaatacattcgagccgccgccccaacccgtgggcaaggaccgatgcgagtgcgggccggatcagccgtgcccgacgggcactcgagtctggacccggcagcacaaggaccttgtcatcgcggagagcgatctcatcgtcgactgcaacaacggccgggagttgctgaatttctgccaggacaaaggcatcgacacacttgtctatatgggcgtggccagcaacatgtgcgtcctctatcgcgagtgcggcatgatcaacatgaaacgccacgggcttaggctatgtttcgtgtcagacctggtccaggccatcacagccaatggcatcgaccccggaagcagggaactggaccggaacttcacgccggcgaagggcagcgccatcatccagcgatatatcgaacaacacatcgcgccgtcgttcgagagccgccagttgttggccgcggccagtatgggaacgcaagaccgccgcccgcacattgtcttcgtactcgccgaacaggaatataaatcggacgcaacgttcccggccttcgttcaacgctatcttggggacgatttccgttgcacgcttctgaccccggaatcccatgtaggcacgggccgcgacaatgtgccgggactcgacgcgttgtacgacgcggatctgctggtgttgagcatgcggcggcgggcattgccggtcgtgcagatggatcatctcgaacggttcatccgcgcgggcaagccgcttgtggcggtgcgcgtcagcaccgtcccgttccagttgagcgaccccgcggaatgccccagcggccacgtggtctggcagaagttcgacgaagaagtgctggggtgccattacaagggctacgattcgcgctcacgcaagacggggtgcgacgtgtggtgcgccgcgcaggcgaaggaccatcccgtcctcaagggactggaaagcgccgcattccatagccccagttggctgtaccggcttaatccattgtcggacaccgccacgctgctgatgcaaggccgctggtcggaagacgccgcgaccgagccggtggcctggacgaacacgtataacggcggccgcgtgttctacacctcgctcggccattgggacgatttcatgaaccccgcgttcaaccaattgctcaagaacgcgatctactgggcgctggataaggacgttccttgaagacgcatttgaccgcttgcggggcgctaccggcttatctacaatcggttcgacagattcgttggggatttccagatacatatggagacaaaggacatggctgacaacaacgccttacttgacaccctcatcgctaaggtgactggcgggaacgacgacgagcggaccgaggcttggttcaacgccggcaaggtcggcgcctccgcggtcaaaccgttggccggggttatctcggcgcacagcggcgaggcggcgctggccgccaagcgggcgctgtggcagatcgcgcgttacgcggctcggcccggcgccgacgccgagcggcaatccgttgtggcggcattggccgccctcttgaacgacgaaacagagtccgttccggcacgtagcgaggcgctctggatcctgtccgagatcggggacgacgcagccgtcgaacccgtggcgagtgtgctcagagacgaggccctccgcgaagacgcgcgcatggcgttggaacgcattcccggcgaccgctcgctggccgcgctcaaggccgcgttcgatgcagcccccgacgccttcaaacccaacatcgcgcagtcgttgcgacaacggggcgtggacgtgcccggtgtgccgtgcgtgagatttgttccgacgaagaagaccgcggttcaacccaagacggagaaatagtctcgacaacttaatgaaggacatgacgtcatgacactcagtaggcgaggatttctggcaagtgcgggtgcagtgttgggctttccgtatatttcggcgatagcggcgccggggaagccgggggcaaacgaccgcctttccctggcgcatatcggcatcgggggcatggggtcgaaccatctgcagcagacattgaagttcgagcgcgatggcgacgtccacttggccgcgctatgcgacgtggacgagaaacggctcgcggcagccgtagggaaatgcggccccggtgtagacgcgtaccgcgactaccgctacatcctcgagcgcgacgacatcgacgccgtcgtgatcgccacgcccgaccactggcacgccgtgcagatggtccaggcgtgcgaatccggcaagcacgtctacgtcgagaaaccgacgtcggtcacgatcaacgacggcaaggcgatggtagcggcgacgaagaaatacaaccgggtggtccaggtggggtcgcaggcgcgatcggccgagcccgcccaccaagcgtgcacgtacatccgcaacggcatgctcggtaaggtccacaaggccacatgctggcacaagctcaatccgacgggcggcacggacccggatggcgagcccccggcgcaattggactgggacctctggctcggcccgctgcgctggcgtccctacaacaaggcctactgccccggcgtgttccggtgggtcatggaatccggcggcggcgtgattcgggatcgcggcgcgcacgtgatgagcatcatccgctggtgcctcgacgccgacgagcagatgccggttaccattgaggccaaaggctatccgcccaacaaggggatttgggactgcccgccggagatggaggtggtctacacgttcaaagaccccgattggcaactcatctgggcgcagcccggtgaccggcagagcaattaccccgacaagaacgatgatttcggcatggtattccacggcgaggacgatacgttggtgctcgatcgcgacggcacgcagtacgacgcaccggaaaaggcccgaaacttcaaagtgcctgccggcggtgtcgaagtgtatcgcatggacaaatatgccgactacaacatgaaccacaaggcagactggctgcaggccattcgaactggcgcaacgccgtgtatggacatcgagaaaggccatcggaccgccacgatgtgcaacttgggcaacctgtcctatctattgggacgcacgctgcgatgggacgccaacaaacaagagatcgtcgacgacccctatgcgaaccgcctgctcagcaagccgcagcgccatccgtatcatctgtaggcgcgcgccgtgaagcccgggctcaacctcgaattcgcccgaaccgaacgcctcgcgccggaacaagcgatggcgcgcgcggcggacgccgggtatcgctgggtcgagccctacgtgtattccgccatcgcgttgccgatcaacagccacctgaccgtgcgcgccgagtcgccctatcaccacttcgatggagggcggaccgatcccgcggcgatcaacgccgtgcgggaaggcctcggcctgtcattctcagccatcgatgcccactgtacgctgctgttgccgcagatcggcgtgccctatctcaaatcggcgatcgatttcgcggcggaagtcgcttgccccattgtaatgtccgacgagggtccggttcccgaagaatggatgacgctcgagcgcggcttcgacctgatgcgtgtaagtcttgacgaggtcgtccggcacgcccataggcggggcgtgttatatgccatggaattgcacaatgcgctgacggcgcgccccgattacctggtcaggttgcttgatgcctacggtcccggcgacctcggcgtcaatttcgataccggcaacgcgtttcttgcgggcaacgaccctgtcggttacctccagcaagttgccggccgtgtcgtacatgtccacattaaagacatcccggaatcgcaattacacgaacgcggcaaagtcaccggcacccgcgttggcgtggcggccggccaaggcgtaatcgacctgcccgggatcgtcgaggcactccggtccgcaggtttcgacggtgtgctctcagtcgagtgcgacaccctcgcgcaagcccgatcgagcttgccctatcttgaacgcttgatcggctcccgatgagcccgtaaggccagaaaagtcgaacgacgttcaagttcttgtccccgcgctgacccgctggctggatacccggcttctccccttttaactagccagcccgtggtaaaagtcgtcatggtctacacgcagtcattggctcacgacttcctgggctcgcgggcgccgcggcttctaaaagtcagaagggaaaaggttagtggtgagtcgcagggcgcaagcagccaagacgcaccaagactatcgcgagaaccgcccccaccaggtcggagaccagatcaagcgccgtgttgacgtatccgcccacgccggtctcgggtaccagcacggtcgcaatgaactcgatgatctcgttgagcgcgcctacgcccagccccgccatgaccaccacgatcgagagcgcggtccagccccgcagatccgcgcggagcagcggccgcagtaagtgatacatcaccagggtggccacgccaaacccgatgatgtggacgaactggtcgtagcgaaaaatgggaaccgtgtccgacagaggcaccagcattacgccgtaaagcaccccgtctccaatcggaatccccccgccgcacaggtgcagaatcgcccatgccacgaggccccagataatgggcaaagggtatcgcacgcgatcgttggtcagcgcgatcaccacgaggaaaaacactatcaccgccacgtacagcagaaactcgtagttccggcgatatccaaaatacacgctgaaaggcaccagcaccgaaaacagcaccgacagcggcgccacgtgtccgcgctccagcttaagcatgagttcctaccctcctttgccgaatgccgagcatcttgccacacccctccccgcccatcaagccggccactcgcgcccaacggaggcagattccgcacagaaatgttcagccggtgacgggcggcatcctacgacaaagccaaacccggaaacacgccccaacttctggtgcgggcctctcgcctgcacgtctccggtgacaatatccttgccctcatccgccgccacccccgctacaacataaaatagagcactttttgttccgctaaggtaaaatgggtgtagggcattgcgtgtcctccgttcggtctttggttgtttccaaacgctttgtaccgaacagaccgcgcaatgtccttttccattagccgagggaaaggccgtcccggagaacccgcggggaaataggggagaataggggacagcggacctggtgaaaaagtcatcttgcaccataaaatctacgtggcttccaccaaaatctggcaaaaaactgggactgactcgatttcggctgtttgaaatcgtgtctgtccctgcttttcgcggcccttcaatagagttgcctggctttttcaccaactccacagccacctattctcttgacttttctccccccaagggtgctggaaagttgtgacgcgcccacgcccgcgtgatgcccaacaacacatcgggagtaggcccgtcccacccctgcaacaccccctgccaccgcccactcgcatcccgccacaacgccacatccacacgcgccggcagttcaatctccatacgccccgccttgaaacgcttcagcccgcccgccgccatcgccgcaacctgtcccgtcctgtccagccgcaccgccgccacacccaccgcatcaaacttcacctcatgcccattcaggctcaccgttgcccggatcggatcccccatcacatcatccttgcctgacgccagaatcagcgtaccgtccagcagccggcaccggccgctcggctccggcatcaccgattgcgtaaatcccgccacacccctccgcgtacccagcgtctgcgcttccacccccgacgccctcaggtgcgcaataatatcccgcgcgcaatcggccgcactcccgttgatcatcgccgtcggcagggccgcagacccatcaaactcctcgccctcaaaatcgcgcgtccattccccgacccggtacaaccgcgtcggacctcccgccgccttcctgaaaaactccgccacagccggccgttcccactgcgggtggtacaacaccgccgctttgtaacgctgcggcccatatcgcacgctgccatcgcgggcgatcgtcaacgccccgctcgatatctcgctgctcggaatcaaatcggcgtagtagccttccgcccacatcgcatccgtgacctcgagcccaacgtccgcaaaccctgaccccgtccagttcaacgccgacggatgaccaaagatcaccgcaaccgggcaatccaccggcgccgtcgaaatcaggttcagcaggcgcacccggcaatccgctcgaagcaaatcgccccccagcagcgacgtcgcacggtccaccgcatcgttcggatacagcggatgaaaattcatccggcccccgcccagcgcgtggcgccaaagatcttcttcataagccttgatgtccccgtcgtaatacatgttgtaccagagaggcgaccgccactttttcgacagcgccgtccgcgcgcaaaacggcgtcgactcgtcggtctgcgccaaatcccgccgcaccccccaccagtccaacccgttcttgaacgcctcctccggcgtcggaaacggaaaccacgtcgggtgtgtcccgctcatcacctgcggaccaaacacctccttgatgcccgcataaaaagaattctcgacctccgcgttccgctcacggttcatctccatgtagtgattgatcgcccccgcacgctcacccacccgcccgcgctcccccacaaccatcagcaacacgtcccgcgccaggtcacgccccggccgccgccgcttgtacgccctcgccatccaatccgaataccacacgtcatccgcccgcggcttgaaccgacccggaaaaccccactcatccttacacgcccccgccaaccccacgtccctgtactgttcgagaatcccccgctcaaacccgatcaagtgcggcgcatatacgtccggtgtaaacaacgtaaatgccgccagcacaaacaccgtccgaccctcatcccccggaccgcacgggatcgcaaccgccacgccgtctttgtccgcctgctccacacgacaccggcccgtgatgtcctccaccgagtccggctcaatccccgccggccccgccacacccgaatagacccgcagcacccgcccaccaatcgagtcataaccccgcgcccggtgcgtgtaatgatcgcccaggttcaaaggttccacccccaccgtcacttcgcccaaccccaacatctccacctcacgcacccgcacaatctcctgcatctcccccggatacttgtccataaacgcctgccgagccagacgcacatccagatccatcaccatcgacatccccttctcccgcgcgtacgccgccgcagctttaatctgatcgtgtaccgcagggtccgtcacttccaccggataacggatgctcgtcgtcaacagatcaaaatccgtgtgcgacgcgtgcacgtccaagaaacgcttgtaaccctccggcccaaactcctcctccgaccagaaccagcaaccgatccccggccacgacgcctgcaccgcgttctcctcctgacccgccaacgccacacgcagcgaaccatccaaaaccgccactccgcgcgcctctgaaaccagctcactgaaaaacaagaccgccgcgatcattgtttcccctccatgccacgaagtgtgcaaaatcaccatggcccgctgcaactcgccccactgaattccgcagcgtccaccatctccactctgtccattccaccccccaaaaaaaacttgccacaacatcttgacgtgagggggccgaccgtgtacaatatctagtgtaacctcggggggacccgagaaacttaaaataaggaggagaaacgcaatgccagtaaagaagaaagcagcgcccaagaagaaagcagcgcccaagaaaaaagcagcgcccaagaagaaagccgccgcgaagaaaaaggttgtgaagaaggcggcgaaaaagcgctaagtagtattgcgcgagttttagcagggccggtgttgtttaccggcaagattgcgccggacgcgaagcagtttccgcgtccggtgctctttttctccccgcgatgaggccgaggaaggcgacgaggaacgggtcgatctcgaaccggtaccggttggtttcagcgagttcgacgatgatgctgaggccggtgacgtagatgacggtgaaggccatgaacagcagtgcggcccgctgggcggccgtgtggcggcgcgaccacaccccaagccacgcgccgtacgccatcagcagcggcatgccgatcagcagcgtgaggtaggggacgtgacgggacgctccgagttgggggatcagtcggcttacggggatgttgatcttgagagtgaggacgtcgtaggcgcgcaccagccattgaagccgcggcacggtgagcggcatcggcgagaaatacgtgagcccggcccacgcggtggtgcacaaaaacaatttcggccgcacccggatcacgtagagggcgtcctcgaggtagatgtcggacacggcgatctgggagaggtggttgtagttgacctcgccggtggatttggtggtctggcgcagcaccgggatgttttcgtaaccggcgatattgcgtatctccggggggtaatactcgattgcgtagaaccgctcgaccagcgacaccttcgagatcttcccttcatttgccaggcgcacgcgttcttcccacggcaggttgccgaccgttttgatccacgggcttttcccgagaaacgaaaacaccgaaaacttgtcgaaaagcacgtaattcttcgcgtaaaacgaaaacagaatcaccccgggtatcagcgccatccacaaaacctgcctgcggtttcctcgcatcacggcggcgactgcgcacgccatcaacacgtaatacgccaagtggtacatcgaccggattccgcacagcagaaacaggctgatgaaaaacccccagccgtacaccgcgcgccgagtccgcacgtagatctcgagtaacagcgcggcgatcacgagaagcgtcgcgcattggagcgtatagatcaggacgtgctcgaacacaaggaacgtcgggcttagcacaaacagcgtcgacgtcaggagcgcgacgcttttccggaccccgagccgcgtctgcaacagcgtcacgaggaggtacagggccagcccgttgatcagaaagagggcgtgaaacaccggcgccgcgtggcccgggaaaagttttaggatcacgccaagcgcgaggttgtacagcggcggctggacgtggaggtaaaatacgctctcgatcaggcgcgtccgcagcagcaccgggtcggcgtagtgggcgaacatccccagaggcgccatgtcgaaccgcagcccaagcgaattcaccagggcgtgaaacacaatgaacagccccgcctggaaacccaacagccacttccagcgagccgcgtcaataaatcggagcaaccgccgcatgaagagcaaggtatccgatttcgggccacgacgcaaaccggatgagaccatcgggccgttggctgcgaggtaggcggaactggttcgagttgaggcgcatgcgcatgttgttagaatctttgttcacgacatctgcgcacggcgcgtagatattgagtcaaggtcgcgaacaaagattctgaatgcgacttcttagtcgccttagtcgtcggagccggagagttctggttgttcttcttcgggatcgaccgcgatggcgttgcggtcggtggtcaggaaggtgagcacgccgaatgtgaggcaggataccgctacgccgaacacggatgcgtccacctgttccatgaagcggtaggcgccgtcgccgaggggggcgatatcgagccggtttttgagtatggcgaagcccttatagatcatggtcagggcgcttgcggtaagcatcgtgatgaatatgttgcgcgtgagcgcgggcgaccttttctttgagaggacgccaacgcacacgggcaggatgatcgcgggcgcccagaggtggtacgtgaacaggagaagtccgatgatgtcggaccacagcaccgccaccagtatggcggcgccgccgagcagcgcggagcagatgcgcgcgagccggagcatccgaccgtcgttgcggtctttccagccaagctggtgttcgaagaggtctttgatgaagatcgccgtggacgagttgagcgcggagtcggccgatgacatgacggccatcatgagcgcgccgatgacgaggccgccgatgacgggattgttcattttgcggatgaccatggggagcgcctgctggggggcgatgtcgggaaagtggatccgcgcgtagagggctatgaagaacagtacgacgggaaacgtgagcgccaggaagatcccgacgccggcaatgccgatccgcgtttcgcggatatcttttccaacgcagtatcgggtggcgtagccgggggcgaacgtttcgccgaggaagaaagcgaggaaggtggtgaccagaaaaatccagcctttcccgccttcgatctggaagaacgtgtgagggatggccgaggtggcctctttccatgaggagatgatgtcgggtatgcaggccgccagcgtgacgaggaagccgaaaataaggataacgaactggtagacgtccgtgtggatgacggccaggagcccgcccgcggtgctataggtgaccacgactgccccgccaatgatgatggcgagggcgagcaccaggggcgagttggtaaactcggggaggatagccgtcagcacacttccgaacgcggccatctgtgcggcgacgataaaaacggagaacagaagcgacagaatcagcacgagaaaacgcggaccttcgccaaaccgatgaccaaaatagcccgcgaccgtgtaaagttccgcgtcgcggaatttcggcgcgaccaccaggcccgagaacaggaagtggaggtaccagccggtggacacgacaagcatcagcacgccccactcgtaggttcgcccgatggcgccgatgctcgaaccgccgccgataacagtcgcccccatcgtgcaaaacaggaaaaaccagccgatgttgcgcccggccacgaggaaatcgtcggtgtcgcggatcttcctggctttaagcacgcctttgaagaagatgaagatcatgtaggcaatgatgatgccccaggtgatcaggccccccgccatgacgcctaggcctcccgggtcgagatgcgccagcgcccgaaaagatcggccagccgccgttgagggtcgtagacggcgatttgggcgggtgcggcccgcaacgcatccagttcgatgcccgcgaggtgccaggaggtgtcgcggccccagtatgcgtcgatccaccgggcaatcgtgtcaaacccgtaccagtacgactcgtaccgggaccacgtgcgaatgtggcccgtttcgattgtacgttccacttcgtcgttgacgcgggtgagcaggaacccgtcgcagactttttggccgttgcggtcgaacacgtcgacgaggatggatttgctggagtcccacgcccgcttgtaccggcgcgggacgagcgtgaacccgttgttgcgggcgtatgtctggggggcgagccagcgcggctgcccggagacgttcatggtggactcgtagttgccgagcgcgtgcgactggacggcttctttgcggtaggcgctgatgacggcgataccggaggcggtttcggcggcgcgccgcagcgatttgaacagttgctgcgcaccttcgggcccctgcatgacgccgatgctgttgcatacggtgacgagcacgggcagaggttccgggtccagcggttcgaggtcgaacgcggaaccctggcgaagccacaatcgctggcccagcagcgttccgaggccggcttcccccagtttcccggcggcaaggttgatcagttcggaggaaagatcgatcccgccgatcaactcgatcccgccgccggtttcaccggccaggacggggtcgtagtccaggtcgcggcgtgaggcgcgggcgcgggcgagattctcggcgtcggcagcgggcaactgatcgccgcgcgtggttttaaggccgtaacgcaggtgcaaccggcccgaaccgcagccaacatcgatcacgtgcagcggctttccggatcgttctgccagaaaagccaggacgcggtcaaggaattcttcttcaaatgcttcgtaagccacgacgtcgggatggccgtgaacgatattgcgctcgtacgcggcggcacattggtcccacacgccgcggtcgcggtcgcacgcctgcgtgagcccggtgtcgttcgtcatgggcttctcctcacgcgggtttggcggaggctaccccgtccaacatcgtggccgcgccgaaagcggcttcggataggggggatatgtggtcccgaatctcgtccagcgggggtagtatctctttggcgacgtattttgaatccatcaggcgcagcagcgcggaatagttgacgcggaaggcgatgcgctcgccgacttggagtttatcgacgttttcaccgaggttgaccacggagatatcgctgctggcgccggcaattttgtaccgggtatcgagaggcgtaatgccgttgatgtcggtgtcgagatggccgatgctgaccagtgcccggtacccgcgctggccgggcgaggtgtcggggcatgcttcggtttcgaacggcgtcatggtggtggtttcaccgagtggcgccaagccctttttcttgacttcagcgatttcggcctcgagccgcatcacgtcgtttcgcagttccgggagcgtgccgccgttgatcaggtcggtgccaaggaaggccgcctcgccgatgcgcgagtggtttacggcggatggcatctggccctccagcaaaaggggcagggtcgcggtgactcccgcggagataatgggcagcggctggcggaacttcaactcgagcagttcgcggtacagcacgagctgcatcagatggtcgacggtgggaacggtccccgccaggcacccgaggttgccgccgattccggcaacttcgatgttgggcagttcgaagactttcttgtagaagttgacgagactgccaggcaggatgccctcgcgcaggtcgccgagttcgatcatgatgatgatgcggtggatcttgtcgagccgtgccgcgtgatcgttgatggcgcggatcacctcgatttcactgttgaggctgatgtcggacagggcggccacttcgcccgccctggacaagtcgggtattcggagataccatttttcggcgcccggcatgcaccggctgacttgattcaggttcgagaggcgcgagtcgcccacgctggtgacgccgagcgcgtggagggcgcgcagcgtatcggcatggccgcacagcaccttggtaaccagcgtccacgaactgccgttggcgcggatccacctgtcgatcactttcaaattatagtggagcgcttcgatgttgatgacgagccggttcatggcgaatacctcatctccgcgtatttgctcgtgaatccgacacgctcgtacaggcgccgggccggattgtcgtattcgacgtgtagcttcacactcccttccgccagacacagcccgcgctccacaagctgccggcccaggcctttcccccgcaacggcgggtcgaccgccacaaacagcagcagattctcgggcacgtacccgcccatccccgtgcggagcatcaccagcgcccccgccgtcttcccgtcatgttccgccaccaggataaacccgccgccgttgagcgcgtcgcgcaggccccgagcaatgtcttcgaacgtgtcgctgtacggtttgagcgcctcctgcagaaatgccgccaggtcgtgcaatccgccccgcgcggcaaaatcggccggctgccgaagttcccgaagccggaactcggccgcatcgaccgatcgcggcggcgcgtcgccatccgcgggtgcggcggcatcggcatgtttcgcgccgtggccgtctgccgaccgcaacgtgtcctccgtcgcatcgagcggatagatcgccagcatgggcgccgcgtccagatgttcggcgttcatcatacaggctacgcgttccagcgacgacaggatctgcgcctgttcccactcgtgcagtttctccaactcccgcacaaaccgctcctggagcaacggcggtgcgccgcttaggacctgcctcgcgccgtccgtgcacgtcaccagcacgttgcgccggtcacgcccgttgcggccccgccgaaccagatcccgctgctcgagccggtcgactatgcccgtcgccgtggcgttgccgatgctgatgcggcgcgcaagctcgcctatcgcgatttcaccgttccgttcaatctcgcgcaacaatatgagctgcggactcgtaagactgtgagtctgcacaagacgacgggagtgaaggtctaccgcgcgcataactctgcgtaacgccaccagaatccgctcggtgagccctaacgcattgggattaaccatgaagagtcctttgcgtaaagatattttgtgtgcgaaacattgtagcggacacacactcccacgtcaactaaacaacaggatttctaaccacctcgatagatggatatcttgtaaccccaggtgtatcaataggttggctctcggccaactcccccattcaggcgtgcggatggctgtcccggtagacctgtttcagccggtcgatgctgacgtgggtgtagatctgggtgctcgagaggctttcgtgcccgaggagttcctggacgacccggaggtcggcgcccgcgttgagcatgtgcgtggcgaacgtgtggcggagcgtgtgcggcgagatttcccgccgcccaggcaggatttggcggacatatttctcgacgatccgctggacgctccgcgtcgtgagcggcccgccgcggtggttgacgaacagccggtcgtgctgcggctcacccaactgtggccgcacccggaggtagtcgcgcaacgccaggacggcgtattggccgagttggccgagccgctctttgcggcgtttgccgagcacgcgcatcaggcccgtgtcgaggtcgagactctcgatgttaagcgcggccagttccgcggcacggatgccgctgctgtacaggacctccagcaacgccctatcccggacgccgagcggctgggacgtgtccggcgcctcgacaagcgccgtgacttcggggattgtgagcgcctcgggcaggttgcggcccagtttgggcgaccggaccgtctgcgccgggttgtcctcgagcaagcccgaccggacgcagaacttgtacacggcccggatcgacgccagcttccgcgcggacgtacgcgcgctgccgccgcgcgtctggacatgcgccaggtacccccgcacgtcattccgaaccgcacggccaagcacgtcgagcgacgccggcgggtgcggctccccttcatcccgctcgaacgccgcgggcccgtgtgcgacgtagtcgcagaactggtccaggtcggaaaggtacgcacgcaacgtgtgcggcgaataacctttctcggcctcgaggtagtctacaaaaggctccaatcccgggcgcatgatcgagattatagcagcctcgaacgaagtccgaaattgtcagtcaaaaagtccgccgttatagctgctaacttaaccgtaggccagagtcctataagaggtttccggttttctggcaggggtggtgtcagaaaaactttttatctcgcgctcgttcaaccacttacgtttctcgaaccatgccaaaatggcaaaaagagagcaccaaatgcacatatgaaatagagggagttgatcaaggatcaattaagaattaagaattaagaatggtgcgaggatgacggacaaagggtaggggacgaaggatgaatggattgcggattgcagattgcggattggggattgcagattttttgaagcagaaggggcagaagagcaggctggaggaaaggatgaaggatagaaggacagcggggaaagggaaaaggcgatggaaaaggggagtgtaaagaagactcggaaacccagttacaagccgaaagctgggatgatgaatataccggtagggtggatgtttgagaaggctacgcgccgtcttgttgaaaacccggtggaacagggggcgatcgtgctggcgaaggaactggaggaagccgggctgagccagtcggcgatcatgcggaagttgaaggaggatggagtgccgaaccggggggaagggctttggacttcggcgatggtgcgaaagcttctggattacgatgggttgaaaggtcgttgggcggagcggaaggcgaaactggatgaggagtacgggacgcgtgtggccgccgccgaagccgacgcccgcgagatcgccgagggccggacgcccgcctcaccgctcgacaagtgcgaccccgtcgcctggggccagaaatggctggcgaaccgcgacgggtcggcccgcgcttattggcggcaccaaatcgaggatctccgcgcagccgacgacaacatcgtccatctcgacggccgcgacgtcggcaagacggccaacctgaccacgctggcgctccattatgcgatgaccacccggaaaggatcggggctggtagcggcggcgctcgcgggccagttgctcgccatttgggaggaaatcgagttccagctcgaaaacaacccgcggctcgaagcctgcatcgcccgcggccgcaacggccaccgcaagatgcagcggtttccctacccgcgcctcgagttcaccaacggcagcgtcctctacttccggcccgcgggcacgtacggcgaagcgttccgctccctccacgtcgaccgcgtctgggtcgacgaaggcgcgtggctcagcgaagacgcatggcgcgcgctgcgccaatgcctaaaagccggcggcaaactccgcgtatactcgacccccaacggcatgcgcaacgccacatactaccgcctcacaaactcgccccgctggcgcgtgttccgatggccgtcctggctcaaccccaactggacacccaaccacgaagccgacctgctcgaattctacggcggccgcgcaaccgccggctggcagcacgaagtcgccggcgaacacggcgcgccaagctacggcgcgttccaccccgaacacctcgcactcgcgctccaagacgtgcccgagtaccgcaaaatcgtcatcaccaacgccgaactcgaagactgccaatccgaactcgaaaccgaacaacggttcgagacgctactcaacatctggcccgactccgcccaatactacctcggcgcagacctcggatacacaaacgacccaaccgaaatcctagtcttccgccaagacacccccaaaaaatctcctgattgttctcctccagactccagactccagactccagactgcagtttaaggcttgttttgcgcgtccacatggagaaagtcgcttacccccacatcgcccaatgtctcgccgtcatcgactccctactcgcgcccgcagcaatcggcatcgacaacggcggcaacggactcgccgtcatccaggaactcatgtcgctcgacaaatacaagccacgcgcgttcgacggacgcctcttcggcttcgatttcggcggagtcacaccattcgaactccccaacggcgcccaaacgaaaaaacgaacaaaagaactcatgacctcgctcatcaacaaggcgctacaacggcgcgagatcgtcttccccgccaccgaccccgaaatacccgaccagttcctcacacaaacctactcactcaacaacggcgccgtcacctactcaaaaggaaacgaccacatcatcgacgcaacccgatgcatggtcctcgcccaagaaaaaaccgcacccaacgcaccatacaacgaccccgactacaccatccgccccccgctacccctgatggtcgaaatcttcaccctccccagcatgaaaaacttcccctggtaagcgcgaagttcaaagttctgagtgcgaagttgaccgggcgaagtgcgaacttgaccgtgcggcagcatatgacaactgatgaatgatgaatacgctgaaagcgcaagttacgccggaggcgtaagttacgctgaaggcgtaacacatattagcctggggcaacgccccaggaaatgaatacacaaccaaaaagcaccctgaaggggtgcaacaactccccccgcccctacagggccaagtgcgaacttgaccgtgcggcagcatatgacaactgatgaatgatgaatacgctgaaagcgcaagttacgccggaggcgtaacacatattagcctggggcaacgccccaggaaatgaatgcacaaccaaaaagcaccctgaagcggtgcaacaactccccccgcccctacagggccaagtgcgaagttcaccgtgcggcagcatatgacaactgatgaatgatgaatacgctgaaagcgcaagttacgccggagccgtaacacataatagcctgaggcaacgccccaggaaaggaatgcgtaaagatagtgcaccctgaaggggtgcaacaactcctgccgcttcactcttccaccccggaggggtgggtcaattgtcagcccagggttgcgaccggcccgtaccaatggccctgtacccgtcacctaccacgagcatccaacgaagaccccggcgaccactccacaccggtccagggccgggcgctaccctgggcacaagtcgcgccaacgaagtaccccggcaggggttcgacagcttgtccctccccacccgtatcatgcgttgttgcctttttctccaccgggtactaaactagcttcctcaagccactatgctaaacggggatgtttaggggccggcggccgatacccggcgccggaaaacggaacggagcggatttctgtggctacatattcaaccgccctaatcgtgaagcgggtcgccaaagccagaagaagcggctgggtaactctgagccttatggactgcggcgtgaaggacagcgacctccgcacgcttctcgacgcgccgggtgtcgaacagcttcaggggctgaacctcagcggaaatcagctttccacgcttcccccggagatcggccgcctcaccgcactcgataggctgtacctcgtcaacaatcagctttccgcgcagccgacttcgtcggccgccctgccagacagtcaacaatatcagcacataacgattctatacagcacgaccgaattttcccaccttcctgtaggtccggaataattccgggccctcgagtttctacattatcacgcggcagcggcggcagccagacccctttctgagcaacgtatgcctaagcgtaggtccggaataattccgggccctcgagtttctacattatcacgcggcagcggcggcagccagagccctttctgagcaatgtatgcctaagcgtaggtccggaataattccggacccacattcagcaaaaattatgtcgtcatatataaaggcagcgcggcccagctgtggtttgaggagaatctccgctcacgtatactcaccctggcccattcagcccttccggcttggcgagacaattcatcgagcctcccaataccgccgctgaccccaacttccacatcaaaatcgctcacttagataacccctcaatctacttgatttaaacagaacccccgcgtagactcactgcagggcgcgcaaaaaggggctgtctatgaactcgtacaacttgctttcccaaaactggattcccgttctctatcacaatggcgatttcaaacgcgtcggtatcctcaaagcattccaagacgcacacagaatccgccaagtcgccgcatccaatcccatggaccgcctcgccatactccgctttctcctcgccctgctctactggtgcaagggaaacccggcgaacggcccacaggccgcgccttacgaaccattccctccggattggttcttgaaactcgaacagaataaagaatgctttgacttgtttggagagacccggcgattttatcagtacaagaaacctgtgggcgaagataaacggctgaccgccaactaccttgtccatgaggtgccgaccggtacgaatgcgtggcattttaggcattcaacggacgaagtaaacggtttgtgtcgcgcatgttgtgcaatgggcttgctaaggcttccagcatttgcgacttccggtgggcgtggtaaaccgcctggaatcaactcaaagcctcccctttacgtcataccgctgcgcggttcacttgcggccactgtacggctttcctggcggccggtcggcccgttaggaacgcccgcatgggaaaaaccggacgtccaactgcctggcataggcgaggtgccactgctcacaggtttgacctggctgccgcggcgagtgtggttagactctcctgcggaacgggcagaaacctgcatctcatgcgggcgcagcgagaggctaatcctgcgtactgtatttgccccaattggcagcaccaagacggaagaaggagaaccggtcagggcgtggtgcgacccgcatgtcatctacgggatgtccgccaagggcgaaatcagcagcctgcatgcgcgggacgctcttggcgcaccagacgccgcggcggggcagtgggccaatatccttgccggcctgcttcgaaaggggcaaacaggaaacgcatctccttgctggatagtgggcttttctaccgtccagaacgacaagtatcttgaggctgtcgaatgccagatcccttgcgatatcgaccaggcgccacaagaacagcgggacgaatgcctcaacaacttggaacaatggcgcaagggaaaatggggtttcgccaaaaacctgggatcggacaacgaaaagggcgagcggcgtgagcatcgagagattacctctatgcttgcgtccattggaccgcacgttgaaaagcaggtgtcggagaaaagtggatcgttgatagcgggcggcgaaaccgcatggcaggaagcggccaaggcgttccgcccgatgatgcgcttagccgcacaatcgctgtccccagggtttacgatccaagcagccagaatacgcaagcgcattgccaatgccatgccaaacatgacacccaaggccgcgaagaaggggcggggaaaaggacgggataaatgaccgcgacggaagaattcattcgcgtattgagtggcctcaagtcaggggatcttggtctgctgcggacttattcccaacacggcttggatgaatccgtggatgggtttgacctcttttcggggctttggtggccgttacgggcgaagaaccagcgggcgccgcgccgggaagtggcgtggcttatagctaaactctacgctgcccacccaattccccaggcccgcgaggccacgcttgcgcgtcaactccgccggtgcctcccgaccgatgagaacggtagaaatcggtttgggcggaagctcgacaacatattgatgctgccgctcgacaagatcgaggcggaacttcgttgggcgatcgggcaggttgcctcgagaggactttcactcgattgggtaagactcacggatgaactctccgtgtgggaatacgaatccgtccacctgcgatgggcggaacaattccttcaaaccgaagattaaggatgaaaggggtccatcatgctgatcgagattcacgcaatacaaaaccatagtccgtcaaacctaaatcgggacgacctgggtgcgccgaagacgtgctattttggcggtgctctgcgctcgcgcatctcaagtcaatgcatcaaacgaagcatccggatgagcagggagttccaagcgctttgcgggggaattcgcacgcgccagttggccagactgatcgccgagaaggttcaagggaagccagacgtccagaagcgcgccgagaagatactcgaactatgcggtttcaagcccaagaaggcgaagaaggaagaaacggacgacgcagcagatagcgaaaaaagcaagatgctcgtttatacgagccgccaagccatcgaggaaatggccgcactactccaaaacggggacggaaggactgagaaacaactggccgcggacttctgcgcgttgatcagtaagcatgtggcagtccccgatatggcactatccggacggatgctggagccggacaaatcttcaaacgacctttggaaggagcttgacaagaccgtcgaggccgcccttcaggttgctcacgcgatttcaacgcacgaggcgctgcccgaggtggactattatgtggccgccgatgacattccaggcgaagatgcaggggcgggctacgtggatgaatccatgtttgcctcggcatgtttctacaagtacttctcgatcaattgggacaagcttgtggaaaacctcaatggccagaaagaacttgccgcacatacggtaggggcttttatccgtggagcagcgctggcaaatccttcgggcaaacagaatagttttgcggcgcacaatccgcccgatggcctgctgatccaattcgccgacaccccgacgagctatgcgaatgccttcgccgctcccgtgtcgggcaagggcaatcctgacgtcatttcacaaagtgtggcgcagttggcgcattatgttcgcgacttggacacggggtacggcaagccccagaagcgtttctggttctcgccgaatctgcgttatccgctttgcgtcatcgaagccaagaaaacgattccggtggccgaggtaaacctcaaatcgctcgatcaactgattccggccgtcatcggcggcttgggctttgattggaattcggttcagaagaaagtgacaagccaacaggtggcgccatgacggccaacacgctgtttcttcggtttgaaggaccgctgcaggcgtggggtaatcaggagtcgaagttcgttgtacggcgcacggctgaagggcccactaaatcgggcgtgatcggactgttgtgtgcggctttgggcgtgacgcgggcggaagcgcaggaatgccggttgcctcaactggccgaactgcgtatgggcgtccgggtggatgcgcccggataccggtggtgggactatcacacggtaggcgcggggatggacatgcgcatcgccgaagccgaggggaagacaaaacccggcgcaatgctcacgcggcgggagtatctttgcgacgccactttcctggtggtgcttcaggggaatccggccctgatcaaagaactccggcaggtgatcgaaaagccgcgctggacgctctatttgggcaggaaatgctgtccgccgtcgcggcgggtgctcgaggaggcgccggcggcgcatccggacctgatttcggcgcttgtgtcggttccgtggcagcggcgctttgaaagggataatcccccggaaacactcgagtatctgctggattggtttccgtcgcccgaccagccggaggcgccggatgacgccgaggtgtggtacgacgtgccgttgacgttcgagccgccgtcgcatggtgcgcgctttgttgtgcgcgggcagttccgcgtgggcgccggggggcaggtcccggtggcggaatcggcgttgcagcgccaggtgccctcgccacaacgcccgcgggcagattatggcaattccgagtaccggaagatgcgcgcgcagcggctcgagaaggactcgcatctttgcgtgttctgcagatcgcgtgcaacgaccgtgcagcacgtcacgtaccgccacgccggcggcgatgagcggatcggcgagctgcgttccctttgccgcttgtgccacgacgccgtcaccatgctcgagtatgggctgaacatggggctggaccgcatcgacccggaggatgctcgatggcgggagcggattatcgagaaacgcgacgagatcgtcaagttccggtcgctcgagacgcggcggcgtcggcttagccccgaggaggtcgagtgatgtatctatcgagtctgatgatcaacaccggcgacaatccggatcgggagcggccgggccggcggtggctgcgcgacatctaccacgtccaccagcggctgtcgatggcgtttccatcgaggtcgcacggaagcccgtccggttttctgttccgcatcgacaaccagatcgaggagaactcgccgcgcgcgatcgttcttgttcagtctcaattggccccggactgggatagcgcattttacaatgcgggcatgcttctggcggcgccgccggaggttcgcgaatatgccccgtctttcgcgcccggcgaccaccttcggtttcgcatcagaatgaatttaagcaagaagaccaagacggcgcgcgatggtacagatctgtgcacgccgcacgagggtgtcgacaccttcggccgccccaaatctcagtcgaaacgcgtggccgtgacctgggacggcgatcaaggcgaaaccccggaccgggcaatccgccaatggtttgccgcgaaggcccaacacgccgggtttgcactccagaacgaattcaacgtggttcacctcggctgggtggcgggacacaagccgggaacggccgagaaccggctgcggtttcgttccgcgctgctcgagggagacttgacggtggcggacgggccggctttcatgctatcggtcgagagcgggctgggctcggcgaaagggtttgggttcgggctgctgtctgtggttcgtgcaggcgggacgcccgcaccacaatcgaggcgtggcgaatgctgacgcgtgacttgcacgacctcgccaaggtgcgcgaccggctcagctacctttatgtcgagcacgcccggatcgatcaggaagacaaagccatcgccattcacgacgcccagggactcaccccggtgccgtgcgccacgctcgccctgttgatgctggggcccggcaccgccatcacacacgccgccgtcctcgccctcgccgacaacggctgcctcgtcgtgtggtgcggcgagcagggggtccggttctatgccgcggggcacggaaccacgcgaaactcccagaaccttctgctccaggcgcgcctctcgagccgccgctccacgcgcctcgccgtggttcgccgcctgtacgagatgcgctttccgggaaagctcgattcgagtctgacgctccaacagatccgcggcatggaaggcgtgcgcgtgcgcgaagcctactcgagcctgtcccgccaattcggcataccgtggacgggccgggcgtacgaccgccagaactggcgcgacgccgatcccgtcaaccgcgctctctccaccgccaattcctgcctctacggaatctgccacgccgccatagtcggcgcaggctattcgcccgcgctcgggttcatccacaccggcaaacagttgtcgtttgtctacgatatcgccgacctatacaaggccacgaccaccgcccccgccgcgttcgaaaccgccgcccgctcggcccgaaacatcgagcgagaggtccgaatcctgtgccgcgatgcttttgcggcgcagcgcctcctcgaacgcgttgtgaaggacctcgagtacgcgctggacgtgaagccggccgatgacgacgaagccgagaccgatttcgactcggatcccggcacgcccggaggcctgtgggaccctgacgccggcgaagtggccggcggcgtgtcctatgccgaacccgacgaacacacagaggatgaaccctaatggtcgtcatggtgctcgaacgcgtatcgccttcgctccgcggtgaactcactcgatggctgctcgaaccaaaatccggcgtgtttgtcggcaccgtctccgccatggtaagagaaaaactatgggaaaaggtttgccggaaaaccggcgaaggaggatctatcctcatttggaccgcaaataacgaacaggggttcaaaatcgacttctggggcgatccctcgagacacgtcctcagttgggatggacttcagctcattacaaagccaaaataaccaataaataccaagtgtaatccccacgcgcgtggggatgaaccgtcctggttgttatgcgctcgcccgcctccttcgtaatccccacgcgcgtggggatgaaccggcgatgcagatcgtgacaacgggagtacggaggtaatccccacgcgcgtggggatgaaccagtagcggcgggatgctcaagcccgaagatgtagtaatccccacgcgcgtggggatgaaccggaggatg

SEQ ID NO: 969 - DNA, 103238 bp, Artificial Sequence
  Synthetic Oligonucleotide
  misc_feature (1)..(53189): n is a, c, g, or t
nnnnnnnnnnnnnnnnnnnnnnnnnnnnnnnnnnnnnnnnnnnnnnnnnnnnnnnnnnnnnnnnnnnnnnnnnnnnnnnnnnnnnnnnnnnnnnnnnnnnnnnnnnnnnnnnnnnnnnnnnnnnnnnnnnnnnnnnnnnnnnnnnnnnnnnnnnnnnnnnnnnnnnnnnnnnnnnnnnnnnnnnnnnnnnnnnnnnnnnnnnnnnnnnnnnnnnnnnnnnnnnnnnnnnnnnnnnnnnnnnnnnnnnnnnnnnnnnnnnnnnnnnnnnnnnnnnnnnnnnnnnnnnnnnnnnnnnnnnnnnnnnnnnnnnnnnnnnnnnnnnnnnnnnnnnnnnnnnnnnnnnnnnnnnnnnnnnnnnnnnnnnnnnnnnnnnnnnnnnnnnnnnnnnnnnnnnnnnnnnnnnnnnnnnnnnnnnnnnnnnnnnnnnnnnnnnnnnnnnnnnnnnnnnnnnnnnnnnnnnnnnnnnnnnnnnnnnnnnnnnnnnnnnnnnnnnnnnnnnnnnnnnnnnnnnnnnnnnnnnnnnnnnnnnnnnnnnnnnnnnnnnnnnnnnnnnnnnnnnnnnnnnnnnnnnnnnnnnnnnnnnnnnnnnnnnnnnnnnnnnnnnnnnnnnnnnnnnnnnnnnnnnnnnnnnnnnnnnnnnnnnnnnnnnnnnnnnnnnnnnnnnnnnnnnnnnnnnnnnnnnnnnnnnnnnnnnnnnnnnnnnnnnnnnnnnnnnnnnnnnnnnnnnnnnnnnnnnnnnnnnnnnnnnnnnnnnnnnnnnnnnnnnnnnnnnnnnnnnnnnnnnnnnnnnnnnnnnnnnnnnnnnnnnnnnnnnnnnnnnnnnnnnnnnnnnnnnnnnnnnnnnnnnnnnnnnnnnnnnnnnnnnnnnnnnnnnnnnnnnnnnnnnnnnnnnnnnnnnnnnnnnnnnnnnnnnnnnnnnnnnnnnnnnnnnnnnnnnnnnnnnnnnnnnnnnnnnnnnnnnnnnnnnnnnnnnnnnnnnnnnnnnnnnnnnnnnnnnnnnnnnnnnnnnnnnnnnnnnnnnnnnnnnnnnnnnnnnnnnnnnnnnnnnnnnnnnnnnnnnnnnnnnnnnnnnnnnnnnnnnnnnnnnnnnnnnnnnnnnnnnnnnnnnnnnnnnnnnnnnnnnnnnnnnnnnnnnnnnnnnnnnnnnnnnnnnnnnnnnnnnnnnnnnnnnnnnnnnnnnnnnnnnnnnnnnnnnnnnnnnnnnnnnnnnnnnnnnnnnnnnnnnnnnnnnnnnnnnnnnnnnnnnnnnnnnnnnnnnnnnnnnnnnnnnnnnnnnnnnnnnnnnnnnnnnnnnnnnnnnnnnnnnnnnnnnnnnnnnnnnnnnnnnnnnnnnnnnnnnnnnnnnnnnnnnnnnnnnnnnnnnnnnnnnnnnnnnnnnnnnnnnnnnnnnnnnnnnnnnnnnnnnnnnnnnnnnnnnnnnnnnnnnnnnnnnnnnnnnnnnnnnnnnnnnnnnnnnnnnnnnnnnnnnnnnnnnnnnnnnnnnnnnnnnnnnnnnnnnnnnnnnnnnnnnnnnnnnnnnnnnnnnnnnnnnnnnnnnnnnnnnnnnnnnnnnnnnnnnnnnnnnnnnnnnnnnnnnnnnnnnnnnnnnnnnnnnnnnnnnnnnnnnnnnnnnnnnnnnnnnnnnnnnnnnnnnnnnnnnnnnnnnnnnnnnnnnnnnnnnnnnnnnnnnnnnnnnnnnnnnnnnnnnnnnnnnnnnnnnnnnnnnnnnnnnnnnnnnnnnnnnnnnnnnnnnnnnnnnnnnnnnnnnnnnnnnnnnnnnnnnnnnnnnnnnnnnnnnnnnnnnnnnnnnnnnnnnnnnnnnnnnnnnnnnnnnnnnnnnnnnnnnnnnnnnnnnnnnnnnnnnnnnnnnnnnnnnnnnnnnnnnnnnnnnnnnnnnnnnnnnnnnnnnnnnnnnnnnnnnnnnnnnnnnnnnnnnnnnnnnnnnnnnnnnnnnnnnnnnnnnnnnnnnnnnnnnnnnnnnnnnnnnnnnnnnnnnnnnnnnnnnnnnnnnnnnnnnnnnnnnnnnnnnnnnnnnnnnnnnnnnnnnnnnnnnnnnnnnnnnnnnnnnnnnnnnnnnnnnnnnnnnnnnnnnnnnnnnnnnnnnnnnnnnnnnnnnnnnnnnnnnnnnnnnnnnnnnnnnnnnnnnnnnnnnnnnnnnnnnnnnnnnnnnnnnnnnnnnnnnnnnnnnnnnnnnnnnnnnnnnnnnnnnnnnnnnnnnnnnnnnnnnnnnnnnnnnnnnnnnnnnnnnnnnnnnnnnnnnnnnnnnnnnnnnnnnnnnnnnnnnnnnnnnnnnnnnnnnnnnnnnnnnnnnnnnnnnnnnnnnnnnnnnnnnnnnnnnnnnnnnnnnnnnnnnnnnnnnnnnnnnnnnnnnnnnnnnnnnnnnnnnnnnnnnnnnnnnnnnnnnnnnnnnnnnnnnnnnnnnnnnnnnnnnnnnnnnnnnnnnnnnnnnnnnnnnnnnnnnnnnnnnnnnnnnnnnnnnnnnnnnnnnnnnnnnnnnnnnnnnnnnnnnnnnnnnnnnnnnnnnnnnnnnnnnnnnnnnnnnnnnnnnnnnnnnnnnnnnnnnnnnnnnnnnnnnnnnnnnnnnnnnnnnnnnnnnnnnnnnnnnnnnnnnnnnnnnnnnnnnnnnnnnnnnnnnnnnnnnnnnnnnnnnnnnnnnnnnnnnnnnnnnnnnnnnnnnnnnnnnnnnnnnnnnnnnnnnnnnnnnnnnnnnnnnnnnnnnnnnnnnnnnnnnnnnnnnnnnnnnnnnnnnnnnnnnnnnnnnnnnnnnnnnnnnnnnnnnnnnnnnnnnnnnnnnnnnnnnnnnnnnnnnnnnnnnnnnnnnnnnnnnnnnnnnnnnnnnnnnnnnnnnnnnnnnnnnnnnnnnnnnnnnnnnnnnnnnnnnnnnnnnnnnnnnnnnnnnnnnnnnnnnnnnnnnnnnnnnnnnnnnnnnnnnnnnnnnnnnnnnnnnnnnnnnnnnnnnnnnnnnnnnnnnnnnnnnnnnnnnnnnnnnnnnnnnnnnnnnnnnnnnnnnnnnnnnnnnnnnnnnnnnnnnnnnnnnnnnnnnnnnnnnnnnnnnnnnnnnnnnnnnnnnnnnnnnnnnnnnnnnnnnnnnnnnnnnnnnnnnnnnnnnnnnnnnnnnnnnnnnnnnnnnnnnnnnnnnnnnnnnnnnnnnnnnnnnnnnnnnnnnnnnnnnnnnnnnnnnnnnnnnnnnnnnnnnnnnnnnnnnnnnnnnnnnnnnnnnnnnnnnnnnnnnnnnnnnnnnnnnnnnnnnnnnnnnnnnnnnnnnnnnnnnnnnnnnnnnnnnnnnnnnnnnnnnnnnnnnnnnnnnnnnnnnnnnnnnnnnnnnnnnnnnnnnnnnnnnnnnnnnnnnnnnnnnnnnnnnnnnnnnnnnnnnnnnnnnnnnnnnnnnnnnnnnnnnnnnnnnnnnnnnnnnnnnnnnnnnnnnnnnnnnnnnnnnnnnnnnnnnnnnnnnnnnnnnnnnnnnnnnnnnnnnnnnnnnnnnnnnnnnnnnnnnnnnnnnnnnnnnnnnnnnnnnnnnnnnnnnnnnnnnnnnnnnnnnnnnnnnnnnnnnnnnnnnnnnnnnnnnnnnnnnnnnnnnnnnnnnnnnnnnnnnnnnnnnnnnnnnnnnnnnnnnnnnnnnnnnnnnnnnnnnnnnnnnnnnnnnnnnnnnnnnnnnnnnnnnnnnnnnnnnnnnnnnnnnnnnnnnnnnnnnnnnnnnnnnnnnnnnnnnnnnnnnnnnnnnnnnnnnnnnnnnnnnnnnnnnnnnnnnnnnnnnnnnnnnnnnnnnnnnnnnnnnnnnnnnnnnnnnnnnnnnnnnnnnnnnnnnnnnnnnnnnnnnnnnnnnnnnnnnnnnnnnnnnnnnnnnnnnnnnnnnnnnnnnnnnnnnnnnnnnnnnnnnnnnnnnnnnnnnnnnnnnnnnnnnnnnnnnnnnnnnnnnnnnnnnnnnnnnnnnnnnnnnnnnnnnnnnnnnnnnnnnnnnnnnnnnnnnnnnnnnnnnnnnnnnnnnnnnnnnnnnnnnnnnnnnnnnnnnnnnnnnnnnnnnnnnnnnnnnnnnnnnnnnnnnnnnnnnnnnnnnnnnnnnnnnnnnnnnnnnnnnnnnnnnnnnnnnnnnnnnnnnnnnnnnnnnnnnnnnnnnnnnnnnnnnnnnnnnnnnnnnnnnnnnnnnnnnnnnnnnnnnnnnnnnnnnnnnnnnnnnnnnnnnnnnnnnnnnnnnnnnnnnnnnnnnnnnnnnnnnnnnnnnnnnnnnnnnnnnnnnnnnnnnnnnnnnnnnnnnnnnnnnnnnnnnnnnnnnnnnnnnnnnnnnnnnnnnnnnnnnnnnnnnnnnnnnnnnnnnnnnnnnnnnnnnnnnnnnnnnnnnnnnnnnnnnnnnnnnnnnnnnnnnnnnnnnnnnnnnnnnnnnnnnnnnnnnnnnnnnnnnnnnnnnnnnnnnnnnnnnnnnnnnnnnnnnnnnnnnnnnnnnnnnnnnnnnnnnnnnnnnnnnnnnnnnnnnnnnnnnnnnnnnnnnnnnnnnnnnnnnnnnnnnnnnnnnnnnnnnnnnnnnnnnnnnnnnnnnnnnnnnnnnnnnnnnnnnnnnnnnnnnnnnnnnnnnnnnnnnnnnnnnnnnnnnnnnnnnnnnnnnnnnnnnnnnnnnnnnnnnnnnnnnnnnnnnnnnnnnnnnnnnnnnnnnnnnnnnnnnnnnnnnnnnnnnnnnnnnnnnnnnnnnnnnnnnnnnnnnnnnnnnnnnnnnnnnnnnnnnnnnnnnnnnnnnnnnnnnnnnnnnnnnnnnnnnnnnnnnnnnnnnnnnnnnnnnnnnnnnnnnnnnnnnnnnnnnnnnnnnnnnnnnnnnnnnnnnnnnnnnnnnnnnnnnnnnnnnnnnnnnnnnnnnnnnnnnnnnnnnnnnnnnnnnnnnnnnnnnnnnnnnnnnnnnnnnnnnnnnnnnnnnnnnnnnnnnnnnnnnnnnnnnnnnnnnnnnnnnnnnnnnnnnnnnnnnnnnnnnnnnnnnnnnnnnnnnnnnnnnnnnnnnnnnnnnnnnnnnnnnnnnnnnnnnnnnnnnnnnnnnnnnnnnnnnnnnnnnnnnnnnnnnnnnnnnnnnnnnnnnnnnnnnnnnnnnnnnnnnnnnnnnnnnnnnnnnnnnnnnnnnnnnnnnnnnnnnnnnnnnnnnnnnnnnnnnnnnnnnnnnnnnnnnnnnnnnnnnnnnnnnnnnnnnnnnnnnnnnnnnnnnnnnnnnnnnnnnnnnnnnnnnnnnnnnnnnnnnnnnnnnnnnnnnnnnnnnnnnnnnnnnnnnnnnnnnnnnnnnnnnnnnnnnnnnnnnnnnnnnnnnnnnnnnnnnnnnnnnnnnnnnnnnnnnnnnnnnnnnnnnnnnnnnnnnnnnnnnnnnnnnnnnnnnnnnnnnnnnnnnnnnnnnnnnnnnnnnnnnnnnnnnnnnnnnnnnnnnnnnnnnnnnnnnnnnnnnnnnnnnnnnnnnnnnnnnnnnnnnnnnnnnnnnnnnnnnnnnnnnnnnnnnnnnnnnnnnnnnnnnnnnnnnnnnnnnnnnnnnnnnnnnnnnnnnnnnnnnnnnnnnnnnnnnnnnnnnnnnnnnnnnnnnnnnnnnnnnnnnnnnnnnnnnnnnnnnnnnnnnnnnnnnnnnnnnnnnnnnnnnnnnnnnnnnnnnnnnnnnnnnnnnnnnnnnnnnnnnnnnnnnnnnnnnnnnnnnnnnnnnnnnnnnnnnnnnnnnnnnnnnnnnnnnnnnnnnnnnnnnnnnnnnnnnnnnnnnnnnnnnnnnnnnnnnnnnnnnnnnnnnnnnnnnnnnnnnnnnnnnnnnnnnnnnnnnnnnnnnnnnnnnnnnnnnnnnnnnnnnnnnnnnnnnnnnnnnnnnnnnnnnnnnnnnnnnnnnnnnnnnnnnnnnnnnnnnnnnnnnnnnnnnnnnnnnnnnnnnnnnnnnnnnnnnnnnnnnnnnnnnnnnnnnnnnnnnnnnnnnnnnnnnnnnnnnnnnnnnnnnnnnnnnnnnnnnnnnnnnnnnnnnnnnnnnnnnnnnnnnnnnnnnnnnnnnnnnnnnnnnnnnnnnnnnnnnnnnnnnnnnnnnnnnnnnnnnnnnnnnnnnnnnnnnnnnnnnnnnnnnnnnnnnnnnnnnnnnnnnnnnnnnnnnnnnnnnnnnnnnnnnnnnnnnnnnnnnnnnnnnnnnnnnnnnnnnnnnnnnnnnnnnnnnnnnnnnnnnnnnnnnnnnnnnnnnnnnnnnnnnnnnnnnnnnnnnnnnnnnnnnnnnnnnnnnnnnnnnnnnnnnnnnnnnnnnnnnnnnnnnnnnnnnnnnnnnnnnnnnnnnnnnnnnnnnnnnnnnnnnnnnnnnnnnnnnnnnnnnnnnnnnnnnnnnnnnnnnnnnnnnnnnnnnnnnnnnnnnnnnnnnnnnnnnnnnnnnnnnnnnnnnnnnnnnnnnnnnnnnnnnnnnnnnnnnnnnnnnnnnnnnnnnnnnnnnnnnnnnnnnnnnnnnnnnnnnnnnnnnnnnnnnnnnnnnnnnnnnnnnnnnnnnnnnnnnnnnnnnnnnnnnnnnnnnnnnnnnnnnnnnnnnnnnnnnnnnnnnnnnnnnnnnnnnnnnnnnnnnnnnnnnnnnnnnnnnnnnnnnnnnnnnnnnnnnnnnnnnnnnnnnnnnnnnnnnnnnnnnnnnnnnnnnnnnnnnnnnnnnnnnnnnnnnnnnnnnnnnnnnnnnnnnnnnnnnnnnnnnnnnnnnnnnnnnnnnnnnnnnnnnnnnnnnnnnnnnnnnnnnnnnnnnnnnnnnnnnnnnnnnnnnnnnnnnnnnnnnnnnnnnnnnnnnnnnnnnnnnnnnnnnnnnnnnnnnnnnnnnnnnnnnnnnnnnnnnnnnnnnnnnnnnnnnnnnnnnnnnnnnnnnnnnnnnnnnnnnnnnnnnnnnnnnnnnnnnnnnnnnnnnnnnnnnnnnnnnnnnnnnnnnnnnnnnnnnnnnnnnnnnnnnnnnnnnnnnnnnnnnnnnnnnnnnnnnnnnnnnnnnnnnnnnnnnnnnnnnnnnnnnnnnnnnnnnnnnnnnnnnnnnnnnnnnnnnnnnnnnnnnnnnnnnnnnnnnnnnnnnnnnnnnnnnnnnnnnnnnnnnnnnnnnnnnnnnnnnnnnnnnnnnnnnnnnnnnnnnnnnnnnnnnnnnnnnnnnnnnnnnnnnnnnnnnnnnnnnnnnnnnnnnnnnnnnnnnnnnnnnnnnnnnnnnnnnnnnnnnnnnnnnnnnnnnnnnnnnnnnnnnnnnnnnnnnnnnnnnnnnnnnnnnnnnnnnnnnnnnnnnnnnnnnnnnnnnnnnnnnnnnnnnnnnnnnnnnnnnnnnnnnnnnnnnnnnnnnnnnnnnnnnnnnnnnnnnnnnnnnnnnnnnnnnnnnnnnnnnnnnnnnnnnnnnnnnnnnnnnnnnnnnnnnnnnnnnnnnnnnnnnnnnnnnnnnnnnnnnnnnnnnnnnnnnnnnnnnnnnnnnnnnnnnnnnnnnnnnnnnnnnnnnnnnnnnnnnnnnnnnnnnnnnnnnnnnnnnnnnnnnnnnnnnnnnnnnnnnnnnnnnnnnnnnnnnnnnnnnnnnnnnnnnnnnnnnnnnnnnnnnnnnnnnnnnnnnnnnnnnnnnnnnnnnnnnnnnnnnnnnnnnnnnnnnnnnnnnnnnnnnnnnnnnnnnnnnnnnnnnnnnnnnnnnnnnnnnnnnnnnnnnnnnnnnnnnnnnnnnnnnnnnnnnnnnnnnnnnnnnnnnnnnnnnnnnnnnnnnnnnnnnnnnnnnnnnnnnnnnnnnnnnnnnnnnnnnnnnnnnnnnnnnnnnnnnnnnnnnnnnnnnnnnnnnnnnnnnnnnnnnnnnnnnnnnnnnnnnnnnnnnnnnnnnnnnnnnnnnnnnnnnnnnnnnnnnnnnnnnnnnnnnnnnnnnnnnnnnnnnnnnnnnnnnnnnnnnnnnnnnnnnnnnnnnnnnnnnnnnnnnnnnnnnnnnnnnnnnnnnnnnnnnnnnnnnnnnnnnnnnnnnnnnnnnnnnnnnnnnnnnnnnnnnnnnnnnnnnnnnnnnnnnnnnnnnnnnnnnnnnnnnnnnnnnnnnnnnnnnnnnnnnnnnnnnnnnnnnnnnnnnnnnnnnnnnnnnnnnnnnnnnnnnnnnnnnnnnnnnnnnnnnnnnnnnnnnnnnnnnnnnnnnnnnnnnnnnnnnnnnnnnnnnnnnnnnnnnnnnnnnnnnnnnnnnnnnnnnnnnnnnnnnnnnnnnnnnnnnnnnnnnnnnnnnnnnnnnnnnnnnnnnnnnnnnnnnnnnnnnnnnnnnnnnnnnnnnnnnnnnnnnnnnnnnnnnnnnnnnnnnnnnnnnnnnnnnnnnnnnnnnnnnnnnnnnnnnnnnnnnnnnnnnnnnnnnnnnnnnnnnnnnnnnnnnnnnnnnnnnnnnnnnnnnnnnnnnnnnnnnnnnnnnnnnnnnnnnnnnnnnnnnnnnnnnnnnnnnnnnnnnnnnnnnnnnnnnnnnnnnnnnnnnnnnnnnnnnnnnnnnnnnnnnnnnnnnnnnnnnnnnnnnnnnnnnnnnnnnnnnnnnnnnnnnnnnnnnnnnnnnnnnnnnnnnnnnnnnnnnnnnnnnnnnnnnnnnnnnnnnnnnnnnnnnnnnnnnnnnnnnnnnnnnnnnnnnnnnnnnnnnnnnnnnnnnnnnnnnnnnnnnnnnnnnnnnnnnnnnnnnnnnnnnnnnnnnnnnnnnnnnnnnnnnnnnnnnnnnnnnnnnnnnnnnnnnnnnnnnnnnnnnnnnnnnnnnnnnnnnnnnnnnnnnnnnnnnnnnnnnnnnnnnnnnnnnnnnnnnnnnnnnnnnnnnnnnnnnnnnnnnnnnnnnnnnnnnnnnnnnnnnnnnnnnnnnnnnnnnnnnnnnnnnnnnnnnnnnnnnnnnnnnnnnnnnnnnnnnnnnnnnnnnnnnnnnnnnnnnnnnnnnnnnnnnnnnnnnnnnnnnnnnnnnnnnnnnnnnnnnnnnnnnnnnnnnnnnnnnnnnnnnnnnnnnnnnnnnnnnnnnnnnnnnnnnnnnnnnnnnnnnnnnnnnnnnnnnnnnnnnnnnnnnnnnnnnnnnnnnnnnnnnnnnnnnnnnnnnnnnnnnnnnnnnnnnnnnnnnnnnnnnnnnnnnnnnnnnnnnnnnnnnnnnnnnnnnnnnnnnnnnnnnnnnnnnnnnnnnnnnnnnnnnnnnnnnnnnnnnnnnnnnnnnnnnnnnnnnnnnnnnnnnnnnnnnnnnnnnnnnnnnnnnnnnnnnnnnnnnnnnnnnnnnnnnnnnnnnnnnnnnnnnnnnnnnnnnnnnnnnnnnnnnnnnnnnnnnnnnnnnnnnnnnnnnnnnnnnnnnnnnnnnnnnnnnnnnnnnnnnnnnnnnnnnnnnnnnnnnnnnnnnnnnnnnnnnnnnnnnnnnnnnnnnnnnnnnnnnnnnnnnnnnnnnnnnnnnnnnnnnnnnnnnnnnnnnnnnnnnnnnnnnnnnnnnnnnnnnnnnnnnnnnnnnnnnnnnnnnnnnnnnnnnnnnnnnnnnnnnnnnnnnnnnnnnnnnnnnnnnnnnnnnnnnnnnnnnnnnnnnnnnnnnnnnnnnnnnnnnnnnnnnnnnnnnnnnnnnnnnnnnnnnnnnnnnnnnnnnnnnnnnnnnnnnnnnnnnnnnnnnnnnnnnnnnnnnnnnnnnnnnnnnnnnnnnnnnnnnnnnnnnnnnnnnnnnnnnnnnnnnnnnnnnnnnnnnnnnnnnnnnnnnnnnnnnnnnnnnnnnnnnnnnnnnnnnnnnnnnnnnnnnnnnnnnnnnnnnnnnnnnnnnnnnnnnnnnnnnnnnnnnnnnnnnnnnnnnnnnnnnnnnnnnnnnnnnnnnnnnnnnnnnnnnnnnnnnnnnnnnnnnnnnnnnnnnnnnnnnnnnnnnnnnnnnnnnnnnnnnnnnnnnnnnnnnnnnnnnnnnnnnnnnnnnnnnnnnnnnnnnnnnnnnnnnnnnnnnnnnnnnnnnnnnnnnnnnnnnnnnnnnnnnnnnnnnnnnnnnnnnnnnnnnnnnnnnnnnnnnnnnnnnnnnnnnnnnnnnnnnnnnnnnnnnnnnnnnnnnnnnnnnnnnnnnnnnnnnnnnnnnnnnnnnnnnnnnnnnnnnnnnnnnnnnnnnnnnnnnnnnnnnnnnnnnnnnnnnnnnnnnnnnnnnnnnnnnnnnnnnnnnnnnnnnnnnnnnnnnnnnnnnnnnnnnnnnnnnnnnnnnnnnnnnnnnnnnnnnnnnnnnnnnnnnnnnnnnnnnnnnnnnnnnnnnnnnnnnnnnnnnnnnnnnnnnnnnnnnnnnnnnnnnnnnnnnnnnnnnnnnnnnnnnnnnnnnnnnnnnnnnnnnnnnnnnnnnnnnnnnnnnnnnnnnnnnnnnnnnnnnnnnnnnnnnnnnnnnnnnnnnnnnnnnnnnnnnnnnnnnnnnnnnnnnnnnnnnnnnnnnnnnnnnnnnnnnnnnnnnnnnnnnnnnnnnnnnnnnnnnnnnnnnnnnnnnnnnnnnnnnnnnnnnnnnnnnnnnnnnnnnnnnnnnnnnnnnnnnnnnnnnnnnnnnnnnnnnnnnnnnnnnnnnnnnnnnnnnnnnnnnnnnnnnnnnnnnnnnnnnnnnnnnnnnnnnnnnnnnnnnnnnnnnnnnnnnnnnnnnnnnnnnnnnnnnnnnnnnnnnnnnnnnnnnnnnnnnnnnnnnnnnnnnnnnnnnnnnnnnnnnnnnnnnnnnnnnnnnnnnnnnnnnnnnnnnnnnnnnnnnnnnnnnnnnnnnnnnnnnnnnnnnnnnnnnnnnnnnnnnnnnnnnnnnnnnnnnnnnnnnnnnnnnnnnnnnnnnnnnnnnnnnnnnnnnnnnnnnnnnnnnnnnnnnnnnnnnnnnnnnnnnnnnnnnnnnnnnnnnnnnnnnnnnnnnnnnnnnnnnnnnnnnnnnnnnnnnnnnnnnnnnnnnnnnnnnnnnnnnnnnnnnnnnnnnnnnnnnnnnnnnnnnnnnnnnnnnnnnnnnnnnnnnnnnnnnnnnnnnnnnnnnnnnnnnnnnnnnnnnnnnnnnnnnnnnnnnnnnnnnnnnnnnnnnnnnnnnnnnnnnnnnnnnnnnnnnnnnnnnnnnnnnnnnnnnnnnnnnnnnnnnnnnnnnnnnnnnnnnnnnnnnnnnnnnnnnnnnnnnnnnnnnnnnnnnnnnnnnnnnnnnnnnnnnnnnnnnnnnnnnnnnnnnnnnnnnnnnnnnnnnnnnnnnnnnnnnnnnnnnnnnnnnnnnnnnnnnnnnnnnnnnnnnnnnnnnnnnnnnnnnnnnnnnnnnnnnnnnnnnnnnnnnnnnnnnnnnnnnnnnnnnnnnnnnnnnnnnnnnnnnnnnnnnnnnnnnnnnnnnnnnnnnnnnnnnnnnnnnnnnnnnnnnnnnnnnnnnnnnnnnnnnnnnnnnnnnnnnnnnnnnnnnnnnnnnnnnnnnnnnnnnnnnnnnnnnnnnnnnnnnnnnnnnnnnnnnnnnnnnnnnnnnnnnnnnnnnnnnnnnnnnnnnnnnnnnnnnnnnnnnnnnnnnnnnnnnnnnnnnnnnnnnnnnnnnnnnnnnnnnnnnnnnnnnnnnnnnnnnnnnnnnnnnnnnnnnnnnnnnnnnnnnnnnnnnnnnnnnnnnnnnnnnnnnnnnnnnnnnnnnnnnnnnnnnnnnnnnnnnnnnnnnnnnnnnnnnnnnnnnnnnnnnnnnnnnnnnnnnnnnnnnnnnnnnnnnnnnnnnnnnnnnnnnnnnnnnnnnnnnnnnnnnnnnnnnnnnnnnnnnnnnnnnnnnnnnnnnnnnnnnnnnnnnnnnnnnnnnnnnnnnnnnnnnnnnnnnnnnnnnnnnnnnnnnnnnnnnnnnnnnnnnnnnnnnnnnnnnnnnnnnnnnnnnnnnnnnnnnnnnnnnnnnnnnnnnnnnnnnnnnnnnnnnnnnnnnnnnnnnnnnnnnnnnnnnnnnnnnnnnnnnnnnnnnnnnnnnnnnnnnnnnnnnnnnnnnnnnnnnnnnnnnnnnnnnnnnnnnnnnnnnnnnnnnnnnnnnnnnnnnnnnnnnnnnnnnnnnnnnnnnnnnnnnnnnnnnnnnnnnnnnnnnnnnnnnnnnnnnnnnnnnnnnnnnnnnnnnnnnnnnnnnnnnnnnnnnnnnnnnnnnnnnnnnnnnnnnnnnnnnnnnnnnnnnnnnnnnnnnnnnnnnnnnnnnnnnnnnnnnnnnnnnnnnnnnnnnnnnnnnnnnnnnnnnnnnnnnnnnnnnnnnnnnnnnnnnnnnnnnnnnnnnnnnnnnnnnnnnnnnnnnnnnnnnnnnnnnnnnnnnnnnnnnnnnnnnnnnnnnnnnnnnnnnnnnnnnnnnnnnnnnnnnnnnnnnnnnnnnnnnnnnnnnnnnnnnnnnnnnnnnnnnnnnnnnnnnnnnnnnnnnnnnnnnnnnnnnnnnnnnnnnnnnnnnnnnnnnnnnnnnnnnnnnnnnnnnnnnnnnnnnnnnnnnnnnnnnnnnnnnnnnnnnnnnnnnnnnnnnnnnnnnnnnnnnnnnnnnnnnnnnnnnnnnnnnnnnnnnnnnnnnnnnnnnnnnnnnnnnnnnnnnnnnnnnnnnnnnnnnnnnnnnnnnnnnnnnnnnnnnnnnnnnnnnnnnnnnnnnnnnnnnnnnnnnnnnnnnnnnnnnnnnnnnnnnnnnnnnnnnnnnnnnnnnnnnnnnnnnnnnnnnnnnnnnnnnnnnnnnnnnnnnnnnnnnnnnnnnnnnnnnnnnnnnnnnnnnnnnnnnnnnnnnnnnnnnnnnnnnnnnnnnnnnnnnnnnnnnnnnnnnnnnnnnnnnnnnnnnnnnnnnnnnnnnnnnnnnnnnnnnnnnnnnnnnnnnnnnnnnnnnnnnnnnnnnnnnnnnnnnnnnnnnnnnnnnnnnnnnnnnnnnnnnnnnnnnnnnnnnnnnnnnnnnnnnnnnnnnnnnnnnnnnnnnnnnnnnnnnnnnnnnnnnnnnnnnnnnnnnnnnnnnnnnnnnnnnnnnnnnnnnnnnnnnnnnnnnnnnnnnnnnnnnnnnnnnnnnnnnnnnnnnnnnnnnnnnnnnnnnnnnnnnnnnnnnnnnnnnnnnnnnnnnnnnnnnnnnnnnnnnnnnnnnnnnnnnnnnnnnnnnnnnnnnnnnnnnnnnnnnnnnnnnnnnnnnnnnnnnnnnnnnnnnnnnnnnnnnnnnnnnnnnnnnnnnnnnnnnnnnnnnnnnnnnnnnnnnnnnnnnnnnnnnnnnnnnnnnnnnnnnnnnnnnnnnnnnnnnnnnnnnnnnnnnnnnnnnnnnnnnnnnnnnnnnnnnnnnnnnnnnnnnnnnnnnnnnnnnnnnnnnnnnnnnnnnnnnnnnnnnnnnnnnnnnnnnnnnnnnnnnnnnnnnnnnnnnnnnnnnnnnnnnnnnnnnnnnnnnnnnnnnnnnnnnnnnnnnnnnnnnnnnnnnnnnnnnnnnnnnnnnnnnnnnnnnnnnnnnnnnnnnnnnnnnnnnnnnnnnnnnnnnnnnnnnnnnnnnnnnnnnnnnnnnnnnnnnnnnnnnnnnnnnnnnnnnnnnnnnnnnnnnnnnnnnnnnnnnnnnnnnnnnnnnnnnnnnnnnnnnnnnnnnnnnnnnnnnnnnnnnnnnnnnnnnnnnnnnnnnnnnnnnnnnnnnnnnnnnnnnnnnnnnnnnnnnnnnnnnnnnnnnnnnnnnnnnnnnnnnnnnnnnnnnnnnnnnnnnnnnnnnnnnnnnnnnnnnnnnnnnnnnnnnnnnnnnnnnnnnnnnnnnnnnnnnnnnnnnnnnnnnnnnnnnnnnnnnnnnnnnnnnnnnnnnnnnnnnnnnnnnnnnnnnnnnnnnnnnnnnnnnnnnnnnnnnnnnnnnnnnnnnnnnnnnnnnnnnnnnnnnnnnnnnnnnnnnnnnnnnnnnnnnnnnnnnnnnnnnnnnnnnnnnnnnnnnnnnnnnnnnnnnnnnnnnnnnnnnnnnnnnnnnnnnnnnnnnnnnnnnnnnnnnnnnnnnnnnnnnnnnnnnnnnnnnnnnnnnnnnnnnnnnnnnnnnnnnnnnnnnnnnnnnnnnnnnnnnnnnnnnnnnnnnnnnnnnnnnnnnnnnnnnnnnnnnnnnnnnnnnnnnnnnnnnnnnnnnnnnnnnnnnnnnnnnnnnnnnnnnnnnnnnnnnnnnnnnnnnnnnnnnnnnnnnnnnnnnnnnnnnnnnnnnnnnnnnnnnnnnnnnnnnnnnnnnnnnnnnnnnnnnnnnnnnnnnnnnnnnnnnnnnnnnnnnnnnnnnnnnnnnnnnnnnnnnnnnnnnnnnnnnnnnnnnnnnnnnnnnnnnnnnnnnnnnnnnnnnnnnnnnnnnnnnnnnnnnnnnnnnnnnnnnnnnnnnnnnnnnnnnnnnnnnnnnnnnnnnnnnnnnnnnnnnnnnnnnnnnnnnnnnnnnnnnnnnnnnnnnnnnnnnnnnnnnnnnnnnnnnnnnnnnnnnnnnnnnnnnnnnnnnnnnnnnnnnnnnnnnnnnnnnnnnnnnnnnnnnnnnnnnnnnnnnnnnnnnnnnnnnnnnnnnnnnnnnnnnnnnnnnnnnnnnnnnnnnnnnnnnnnnnnnnnnnnnnnnnnnnnnnnnnnnnnnnnnnnnnnnnnnnnnnnnnnnnnnnnnnnnnnnnnnnnnnnnnnnnnnnnnnnnnnnnnnnnnnnnnnnnnnnnnnnnnnnnnnnnnnnnnnnnnnnnnnnnnnnnnnnnnnnnnnnnnnnnnnnnnnnnnnnnnnnnnnnnnnnnnnnnnnnnnnnnnnnnnnnnnnnnnnnnnnnnnnnnnnnnnnnnnnnnnnnnnnnnnnnnnnnnnnnnnnnnnnnnnnnnnnnnnnnnnnnnnnnnnnnnnnnnnnnnnnnnnnnnnnnnnnnnnnnnnnnnnnnnnnnnnnnnnnnnnnnnnnnnnnnnnnnnnnnnnnnnnnnnnnnnnnnnnnnnnnnnnnnnnnnnnnnnnnnnnnnnnnnnnnnnnnnnnnnnnnnnnnnnnnnnnnnnnnnnnnnnnnnnnnnnnnnnnnnnnnnnnnnnnnnnnnnnnnnnnnnnnnnnnnnnnnnnnnnnnnnnnnnnnnnnnnnnnnnnnnnnnnnnnnnnnnnnnnnnnnnnnnnnnnnnnnnnnnnnnnnnnnnnnnnnnnnnnnnnnnnnnnnnnnnnnnnnnnnnnnnnnnnnnnnnnnnnnnnnnnnnnnnnnnnnnnnnnnnnnnnnnnnnnnnnnnnnnnnnnnnnnnnnnnnnnnnnnnnnnnnnnnnnnnnnnnnnnnnnnnnnnnnnnnnnnnnnnnnnnnnnnnnnnnnnnnnnnnnnnnnnnnnnnnnnnnnnnnnnnnnnnnnnnnnnnnnnnnnnnnnnnnnnnnnnnnnnnnnnnnnnnnnnnnnnnnnnnnnnnnnnnnnnnnnnnnnnnnnnnnnnnnnnnnnnnnnnnnnnnnnnnnnnnnnnnnnnnnnnnnnnnnnnnnnnnnnnnnnnnnnnnnnnnnnnnnnnnnnnnnnnnnnnnnnnnnnnnnnnnnnnnnnnnnnnnnnnnnnnnnnnnnnnnnnnnnnnnnnnnnnnnnnnnnnnnnnnnnnnnnnnnnnnnnnnnnnnnnnnnnnnnnnnnnnnnnnnnnnnnnnnnnnnnnnnnnnnnnnnnnnnnnnnnnnnnnnnnnnnnnnnnnnnnnnnnnnnnnnnnnnnnnnnnnnnnnnnnnnnnnnnnnnnnnnnnnnnnnnnnnnnnnnnnnnnnnnnnnnnnnnnnnnnnnnnnnnnnnnnnnnnnnnnnnnnnnnnnnnnnnnnnnnnnnnnnnnnnnnnnnnnnnnnnnnnnnnnnnnnnnnnnnnnnnnnnnnnnnnnnnnnnnnnnnnnnnnnnnnnnnnnnnnnnnnnnnnnnnnnnnnnnnnnnnnnnnnnnnnnnnnnnnnnnnnnnnnnnnnnnnnnnnnnnnnnnnnnnnnnnnnnnnnnnnnnnnnnnnnnnnnnnnnnnnnnnnnnnnnnnnnnnnnnnnnnnnnnnnnnnnnnnnnnnnnnnnnnnnnnnnnnnnnnnnnnnnnnnnnnnnnnnnnnnnnnnnnnnnnnnnnnnnnnnnnnnnnnnnnnnnnnnnnnnnnnnnnnnnnnnnnnnnnnnnnnnnnnnnnnnnnnnnnnnnnnnnnnnnnnnnnnnnnnnnnnnnnnnnnnnnnnnnnnnnnnnnnnnnnnnnnnnnnnnnnnnnnnnnnnnnnnnnnnnnnnnnnnnnnnnnnnnnnnnnnnnnnnnnnnnnnnnnnnnnnnnnnnnnnnnnnnnnnnnnnnnnnnnnnnnnnnnnnnnnnnnnnnnnnnnnnnnnnnnnnnnnnnnnnnnnnnnnnnnnnnnnnnnnnnnnnnnnnnnnnnnnnnnnnnnnnnnnnnnnnnnnnnnnnnnnnnnnnnnnnnnnnnnnnnnnnnnnnnnnnnnnnnnnnnnnnnnnnnnnnnnnnnnnnnnnnnnnnnnnnnnnnnnnnnnnnnnnnnnnnnnnnnnnnnnnnnnnnnnnnnnnnnnnnnnnnnnnnnnnnnnnnnnnnnnnnnnnnnnnnnnnnnnnnnnnnnnnnnnnnnnnnnnnnnnnnnnnnnnnnnnnnnnnnnnnnnnnnnnnnnnnnnnnnnnnnnnnnnnnnnnnnnnnnnnnnnnnnnnnnnnnnnnnnnnnnnnnnnnnnnnnnnnnnnnnnnnnnnnnnnnnnnnnnnnnnnnnnnnnnnnnnnnnnnnnnnnnnnnnnnnnnnnnnnnnnnnnnnnnnnnnnnnnnnnnnnnnnnnnnnnnnnnnnnnnnnnnnnnnnnnnnnnnnnnnnnnnnnnnnnnnnnnnnnnnnnnnnnnnnnnnnnnnnnnnnnnnnnnnnnnnnnnnnnnnnnnnnnnnnnnnnnnnnnnnnnnnnnnnnnnnnnnnnnnnnnnnnnnnnnnnnnnnnnnnnnnnnnnnnnnnnnnnnnnnnnnnnnnnnnnnnnnnnnnnnnnnnnnnnnnnnnnnnnnnnnnnnnnnnnnnnnnnnnnnnnnnnnnnnnnnnnnnnnnnnnnnnnnnnnnnnnnnnnnnnnnnnnnnnnnnnnnnnnnnnnnnnnnnnnnnnnnnnnnnnnnnnnnnnnnnnnnnnnnnnnnnnnnnnnnnnnnnnnnnnnnnnnnnnnnnnnnnnnnnnnnnnnnnnnnnnnnnnnnnnnnnnnnnnnnnnnnnnnnnnnnnnnnnnnnnnnnnnnnnnnnnnnnnnnnnnnnnnnnnnnnnnnnnnnnnnnnnnnnnnnnnnnnnnnnnnnnnnnnnnnnnnnnnnnnnnnnnnnnnnnnnnnnnnnnnnnnnnnnnnnnnnnnnnnnnnnnnnnnnnnnnnnnnnnnnnnnnnnnnnnnnnnnnnnnnnnnnnnnnnnnnnnnnnnnnnnnnnnnnnnnnnnnnnnnnnnnnnnnnnnnnnnnnnnnnnnnnnnnnnnnnnnnnnnnnnnnnnnnnnnnnnnnnnnnnnnnnnnnnnnnnnnnnnnnnnnnnnnnnnnnnnnnnnnnnnnnnnnnnnnnnnnnnnnnnnnnnnnnnnnnnnnnnnnnnnnnnnnnnnnnnnnnnnnnnnnnnnnnnnnnnnnnnnnnnnnnnnnnnnnnnnnnnnnnnnnnnnnnnnnnnnnnnnnnnnnnnnnnnnnnnnnnnnnnnnnnnnnnnnnnnnnnnnnnnnnnnnnnnnnnnnnnnnnnnnnnnnnnnnnnnnnnnnnnnnnnnnnnnnnnnnnnnnnnnnnnnnnnnnnnnnnnnnnnnnnnnnnnnnnnnnnnnnnnnnnnnnnnnnnnnnnnnnnnnnnnnnnnnnnnnnnnnnnnnnnnnnnnnnnnnnnnnnnnnnnnnnnnnnnnnnnnnnnnnnnnnnnnnnnnnnnnnnnnnnnnnnnnnnnnnnnnnnnnnnnnnnnnnnnnnnnnnnnnnnnnnnnnnnnnnnnnnnnnnnnnnnnnnnnnnnnnnnnnnnnnnnnnnnnnnnnnnnnnnnnnnnnnnnnnnnnnnnnnnnnnnnnnnnnnnnnnnnnnnnnnnnnnnnnnnnnnnnnnnnnnnnnnnnnnnnnnnnnnnnnnnnnnnnnnnnnnnnnnnnnnnnnnnnnnnnnnnnnnnnnnnnnnnnnnnnnnnnnnnnnnnnnnnnnnnnnnnnnnnnnnnnnnnnnnnnnnnnnnnnnnnnnnnnnnnnnnnnnnnnnnnnnnnnnnnnnnnnnnnnnnnnnnnnnnnnnnnnnnnnnnnnnnnnnnnnnnnnnnnnnnnnnnnnnnnnnnnnnnnnnnnnnnnnnnnnnnnnnnnnnnnnnnnnnnnnnnnnnnnnnnnnnnnnnnnnnnnnnnnnnnnnnnnnnnnnnnnnnnnnnnnnnnnnnnnnnnnnnnnnnnnnnnnnnnnnnnnnnnnnnnnnnnnnnnnnnnnnnnnnnnnnnnnnnnnnnnnnnnnnnnnnnnnnnnnnnnnnnnnnnnnnnnnnnnnnnnnnnnnnnnnnnnnnnnnnnnnnnnnnnnnnnnnnnnnnnnnnnnnnnnnnnnnnnnnnnnnnnnnnnnnnnnnnnnnnnnnnnnnnnnnnnnnnnnnnnnnnnnnnnnnnnnnnnnnnnnnnnnnnnnnnnnnnnnnnnnnnnnnnnnnnnnnnnnnnnnnnnnnnnnnnnnnnnnnnnnnnnnnnnnnnnnnnnnnnnnnnnnnnnnnnnnnnnnnnnnnnnnnnnnnnnnnnnnnnnnnnnnnnnnnnnnnnnnnnnnnnnnnnnnnnnnnnnnnnnnnnnnnnnnnnnnnnnnnnnnnnnnnnnnnnnnnnnnnnnnnnnnnnnnnnnnnnnnnnnnnnnnnnnnnnnnnnnnnnnnnnnnnnnnnnnnnnnnnnnnnnnnnnnnnnnnnnnnnnnnnnnnnnnnnnnnnnnnnnnnnnnnnnnnnnnnnnnnnnnnnnnnnnnnnnnnnnnnnnnnnnnnnnnnnnnnnnnnnnnnnnnnnnnnnnnnnnnnnnnnnnnnnnnnnnnnnnnnnnnnnnnnnnnnnnnnnnnnnnnnnnnnnnnnnnnnnnnnnnnnnnnnnnnnnnnnnnnnnnnnnnnnnnnnnnnnnnnnnnnnnnnnnnnnnnnnnnnnnnnnnnnnnnnnnnnnnnnnnnnnnnnnnnnnnnnnnnnnnnnnnnnnnnnnnnnnnnnnnnnnnnnnnnnnnnnnnnnnnnnnnnnnnnnnnnnnnnnnnnnnnnnnnnnnnnnnnnnnnnnnnnnnnnnnnnnnnnnnnnnnnnnnnnnnnnnnnnnnnnnnnnnnnnnnnnnnnnnnnnnnnnnnnnnnnnnnnnnnnnnnnnnnnnnnnnnnnnnnnnnnnnnnnnnnnnnnnnnnnnnnnnnnnnnnnnnnnnnnnnnnnnnnnnnnnnnnnnnnnnnnnnnnnnnnnnnnnnnnnnnnnnnnnnnnnnnnnnnnnnnnnnnnnnnnnnnnnnnnnnnnnnnnnnnnnnnnnnnnnnnnnnnnnnnnnnnnnnnnnnnnnnnnnnnnnnnnnnnnnnnnnnnnnnnnnnnnnnnnnnnnnnnnnnnnnnnnnnnnnnnnnnnnnnnnnnnnnnnnnnnnnnnnnnnnnnnnnnnnnnnnnnnnnnnnnnnnnnnnnnnnnnnnnnnnnnnnnnnnnnnnnnnnnnnnnnnnnnnnnnnnnnnnnnnnnnnnnnnnnnnnnnnnnnnnnnnnnnnnnnnnnnnnnnnnnnnnnnnnnnnnnnnnnnnnnnnnnnnnnnnnnnnnnnnnnnnnnnnnnnnnnnnnnnnnnnnnnnnnnnnnnnnnnnnnnnnnnnnnnnnnnnnnnnnnnnnnnnnnnnnnnnnnnnnnnnnnnnnnnnnnnnnnnnnnnnnnnnnnnnnnnnnnnnnnnnnnnnnnnnnnnnnnnnnnnnnnnnnnnnnnnnnnnnnnnnnnnnnnnnnnnnnnnnnnnnnnnnnnnnnnnnnnnnnnnnnnnnnnnnnnnnnnnnnnnnnnnnnnnnnnnnnnnnnnnnnnnnnnnnnnnnnnnnnnnnnnnnnnnnnnnnnnnnnnnnnnnnnnnnnnnnnnnnnnnnnnnnnnnnnnnnnnnnnnnnnnnnnnnnnnnnnnnnnnnnnnnnnnnnnnnnnnnnnnnnnnnnnnnnnnnnnnnnnnnnnnnnnnnnnnnnnnnnnnnnnnnnnnnnnnnnnnnnnnnnnnnnnnnnnnnnnnnnnnnnnnnnnnnnnnnnnnnnnnnnnnnnnnnnnnnnnnnnnnnnnnnnnnnnnnnnnnnnnnnnnnnnnnnnnnnnnnnnnnnnnnnnnnnnnnnnnnnnnnnnnnnnnnnnnnnnnnnnnnnnnnnnnnnnnnnnnnnnnnnnnnnnnnnnnnnnnnnnnnnnnnnnnnnnnnnnnnnnnnnnnnnnnnnnnnnnnnnnnnnnnnnnnnnnnnnnnnnnnnnnnnnnnnnnnnnnnnnnnnnnnnnnnnnnnnnnnnnnnnnnnnnnnnnnnnnnnnnnnnnnnnnnnnnnnnnnnnnnnnnnnnnnnnnnnnnnnnnnnnnnnnnnnnnnnnnnnnnnnnnnnnnnnnnnnnnnnnnnnnnnnnnnnnnnnnnnnnnnnnnnnnnnnnnnnnnnnnnnnnnnnnnnnnnnnnnnnnnnnnnnnnnnnnnnnnnnnnnnnnnnnnnnnnnnnnnnnnnnnnnnnnnnnnnnnnnnnnnnnnnnnnnnnnnnnnnnnnnnnnnnnnnnnnnnnnnnnnnnnnnnnnnnnnnnnnnnnnnnnnnnnnnnnnnnnnnnnnnnnnnnnnnnnnnnnnnnnnnnnnnnnnnnnnnnnnnnnnnnnnnnnnnnnnnnnnnnnnnnnnnnnnnnnnnnnnnnnnnnnnnnnnnnnnnnnnnnnnnnnnnnnnnnnnnnnnnnnnnnnnnnnnnnnnnnnnnnnnnnnnnnnnnnnnnnnnnnnnnnnnnnnnnnnnnnnnnnnnnnnnnnnnnnnnnnnnnnnnnnnnnnnnnnnnnnnnnnnnnnnnnnnnnnnnnnnnnnnnnnnnnnnnnnnnnnnnnnnnnnnnnnnnnnnnnnnnnnnnnnnnnnnnnnnnnnnnnnnnnnnnnnnnnnnnnnnnnnnnnnnnnnnnnnnnnnnnnnnnnnnnnnnnnnnnnnnnnnnnnnnnnnnnnnnnnnnnnnnnnnnnnnnnnnnnnnnnnnnnnnnnnnnnnnnnnnnnnnnnnnnnnnnnnnnnnnnnnnnnnnnnnnnnnnnnnnnnnnnnnnnnnnnnnnnnnnnnnnnnnnnnnnnnnnnnnnnnnnnnnnnnnnnnnnnnnnnnnnnnnnnnnnnnnnnnnnnnnnnnnnnnnnnnnnnnnnnnnnnnnnnnnnnnnnnnnnnnnnnnnnnnnnnnnnnnnnnnnnnnnnnnnnnnnnnnnnnnnnnnnnnnnnnnnnnnnnnnnnnnnnnnnnnnnnnnnnnnnnnnnnnnnnnnnnnnnnnnnnnnnnnnnnnnnnnnnnnnnnnnnnnnnnnnnnnnnnnnnnnnnnnnnnnnnnnnnnnnnnnnnnnnnnnnnnnnnnnnnnnnnnnnnnnnnnnnnnnnnnnnnnnnnnnnnnnnnnnnnnnnnnnnnnnnnnnnnnnnnnnnnnnnnnnnnnnnnnnnnnnnnnnnnnnnnnnnnnnnnnnnnnnnnnnnnnnnnnnnnnnnnnnnnnnnnnnnnnnnnnnnnnnnnnnnnnnnnnnnnnnnnnnnnnnnnnnnnnnnnnnnnnnnnnnnnnnnnnnnnnnnnnnnnnnnnnnnnnnnnnnnnnnnnnnnnnnnnnnnnnnnnnnnnnnnnnnnnnnnnnnnnnnnnnnnnnnnnnnnnnnnnnnnnnnnnnnnnnnnnnnnnnnnnnnnnnnnnnnnnnnnnnnnnnnnnnnnnnnnnnnnnnnnnnnnnnnnnnnnnnnnnnnnnnnnnnnnnnnnnnnnnnnnnnnnnnnnnnnnnnnnnnnnnnnnnnnnnnnnnnnnnnnnnnnnnnnnnnnnnnnnnnnnnnnnnnnnnnnnnnnnnnnnnnnnnnnnnnnnnnnnnnnnnnnnnnnnnnnnnnnnnnnnnnnnnnnnnnnnnnnnnnnnnnnnnnnnnnnnnnnnnnnnnnnnnnnnnnnnnnnnnnnnnnnnnnnnnnnnnnnnnnnnnnnnnnnnnnnnnnnnnnnnnnnnnnnnnnnnnnnnnnnnnnnnnnnnnnnnnnnnnnnnnnnnnnnnnnnnnnnnnnnnnnnnnnnnnnnnnnnnnnnnnnnnnnnnnnnnnnnnnnnnnnnnnnnnnnnnnnnnnnnnnnnnnnnnnnnnnnnnnnnnnnnnnnnnnnnnnnnnnnnnnnnnnnnnnnnnnnnnnnnnnnnnnnnnnnnnnnnnnnnnnnnnnnnnnnnnnnnnnnnnnnnnnnnnnnnnnnnnnnnnnnnnnnnnnnnnnnnnnnnnnnnnnnnnnnnnnnnnnnnnnnnnnnnnnnnnnnnnnnnnnnnnnnnnnnnnnnnnnnnnnnnnnnnnnnnnnnnnnnnnnnnnnnnnnnnnnnnnnnnnnnnnnnnnnnnnnnnnnnnnnnnnnnnnnnnnnnnnnnnnnnnnnnnnnnnnnnnnnnnnnnnnnnnnnnnnnnnnnnnnnnnnnnnnnnnnnnnnnnnnnnnnnnnnnnnnnnnnnnnnnnnnnnnnnnnnnnnnnnnnnnnnnnnnnnnnnnnnnnnnnnnnnnnnnnnnnnnnnnnnnnnnnnnnnnnnnnnnnnnnnnnnnnnnnnnnnnnnnnnnnnnnnnnnnnnnnnnnnnnnnnnnnnnnnnnnnnnnnnnnnnnnnnnnnnnnnnnnnnnnnnnnnnnnnnnnnnnnnnnnnnnnnnnnnnnnnnnnnnnnnnnnnnnnnnnnnnnnnnnnnnnnnnnnnnnnnnnnnnnnnnnnnnnnnnnnnnnnnnnnnnnnnnnnnnnnnnnnnnnnnnnnnnnnnnnnnnnnnnnnnnnnnnnnnnnnnnnnnnnnnnnnnnnnnnnnnnnnnnnnnnnnnnnnnnnnnnnnnnnnnnnnnnnnnnnnnnnnnnnnnnnnnnnnnnnnnnnnnnnnnnnnnnnnnnnnnnnnnnnnnnnnnnnnnnnnnnnnnnnnnnnnnnnnnnnnnnnnnnnnnnnnnnnnnnnnnnnnnnnnnnnnnnnnnnnnnnnnnnnnnnnnnnnnnnnnnnnnnnnnnnnnnnnnnnnnnnnnnnnnnnnnnnnnnnnnnnnnnnnnnnnnnnnnnnnnnnnnnnnnnnnnnnnnnnnnnnnnnnnnnnnnnnnnnnnnnnnnnnnnnnnnnnnnnnnnnnnnnnnnnnnnnnnnnnnnnnnnnnnnnnnnnnnnnnnnnnnnnnnnnnnnnnnnnnnnnnnnnnnnnnnnnnnnnnnnnnnnnnnnnnnnnnnnnnnnnnnnnnnnnnnnnnnnnnnnnnnnnnnnnnnnnnnnnnnnnnnnnnnnnnnnnnnnnnnnnnnnnnnnnnnnnnnnnnnnnnnnnnnnnnnnnnnnnnnnnnnnnnnnnnnnnnnnnnnnnnnnnnnnnnnnnnnnnnnnnnnnnnnnnnnnnnnnnnnnnnnnnnnnnnnnnnnnnnnnnnnnnnnnnnnnnnnnnnnnnnnnnnnnnnnnnnnnnnnnnnnnnnnnnnnnnnnnnnnnnnnnnnnnnnnnnnnnnnnnnnnnnnnnnnnnnnnnnnnnnnnnnnnnnnnnnnnnnnnnnnnnnnnnnnnnnnnnnnnnnnnnnnnnnnnnnnnnnnnnnnnnnnnnnnnnnnnnnnnnnnnnnnnnnnnnnnnnnnnnnnnnnnnnnnnnnnnnnnnnnnnnnnnnnnnnnnnnnnnnnnnnnnnnnnnnnnnnnnnnnnnnnnnnnnnnnnnnnnnnnnnnnnnnnnnnnnnnnnnnnnnnnnnnnnnnnnnnnnnnnnnnnnnnnnnnnnnnnnnnnnnnnnnnnnnnnnnnnnnnnnnnnnnnnnnnnnnnnnnnnnnnnnnnnnnnnnnnnnnnnnnnnnnnnnnnnnnnnnnnnnnnnnnnnnnnnnnnnnnnnnnnnnnnnnnnnnnnnnnnnnnnnnnnnnnnnnnnnnnnnnnnnnnnnnnnnnnnnnnnnnnnnnnnnnnnnnnnnnnnnnnnnnnnnnnnnnnnnnnnnnnnnnnnnnnnnnnnnnnnnnnnnnnnnnnnnnnnnnnnnnnnnnnnnnnnnnnnnnnnnnnnnnnnnnnnnnnnnnnnnnnnnnnnnnnnnnnnnnnnnnnnnnnnnnnnnnnnnnnnnnnnnnnnnnnnnnnnnnnnnnnnnnnnnnnnnnnnnnnnnnnnnnnnnnnnnnnnnnnnnnnnnnnnnnnnnnnnnnnnnnnnnnnnnnnnnnnnnnnnnnnnnnnnnnnnnnnnnnnnnnnnnnnnnnnnnnnnnnnnnnnnnnnnnnnnnnnnnnnnnnnnnnnnnnnnnnnnnnnnnnnnnnnnnnnnnnnnnnnnnnnnnnnnnnnnnnnnnnnnnnnnnnnnnnnnnnnnnnnnnnnnnnnnnnnnnnnnnnnnnnnnnnnnnnnnnnnnnnnnnnnnnnnnnnnnnnnnnnnnnnnnnnnnnnnnnnnnnnnnnnnnnnnnnnnnnnnnnnnnnnnnnnnnnnnnnnnnnnnnnnnnnnnnnnnnnnnnnnnnnnnnnnnnnnnnnnnnnnnnnnnnnnnnnnnnnnnnnnnnnnnnnnnnnnnnnnnnnnnnnnnnnnnnnnnnnnnnnnnnnnnnnnnnnnnnnnnnnnnnnnnnnnnnnnnnnnnnnnnnnnnnnnnnnnnnnnnnnnnnnnnnnnnnnnnnnnnnnnnnnnnnnnnnnnnnnnnnnnnnnnnnnnnnnnnnnnnnnnnnnnnnnnnnnnnnnnnnnnnnnnnnnnnnnnnnnnnnnnnnnnnnnnnnnnnnnnnnnnnnnnnnnnnnnnnnnnnnnnnnnnnnnnnnnnnnnnnnnnnnnnnnnnnnnnnnnnnnnnnnnnnnnnnnnnnnnnnnnnnnnnnnnnnnnnnnnnnnnnnnnnnnnnnnnnnnnnnnnnnnnnnnnnnnnnnnnnnnnnnnnnnnnnnnnnnnnnnnnnnnnnnnnnnnnnnnnnnnnnnnnnnnnnnnnnnnnnnnnnnnnnnnnnnnnnnnnnnnnnnnnnnnnnnnnnnnnnnnnnnnnnnnnnnnnnnnnnnnnnnnnnnnnnnnnnnnnnnnnnnnnnnnnnnnnnnnnnnnnnnnnnnnnnnnnnnnnnnnnnnnnnnnnnnnnnnnnnnnnnnnnnnnnnnnnnnnnnnnnnnnnnnnnnnnnnnnnnnnnnnnnnnnnnnnnnnnnnnnnnnnnnnnnnnnnnnnnnnnnnnnnnnnnnnnnnnnnnnnnnnnnnnnnnnnnnnnnnnnnnnnnnnnnnnnnnnnnnnnnnnnnnnnnnnnnnnnnnnnnnnnnnnnnnnnnnnnnnnnnnnnnnnnnnnnnnnnnnnnnnnnnnnnnnnnnnnnnnnnnnnnnnnnnnnnnnnnnnnnnnnnnnnnnnnnnnnnnnnnnnnnnnnnnnnnnnnnnnnnnnnnnnnnnnnnnnnnnnnnnnnnnnnnnnnnnnnnnnnnnnnnnnnnnnnnnnnnnnnnnnnnnnnnnnnnnnnnnnnnnnnnnnnnnnnnnnnnnnnnnnnnnnnnnnnnnnnnnnnnnnnnnnnnnnnnnnnnnnnnnnnnnnnnnnnnnnnnnnnnnnnnnnnnnnnnnnnnnnnnnnnnnnnnnnnnnnnnnnnnnnnnnnnnnnnnnnnnnnnnnnnnnnnnnnnnnnnnnnnnnnnnnnnnnnnnnnnnnnnnnnnnnnnnnnnnnnnnnnnnnnnnnnnnnnnnnnnnnnnnnnnnnnnnnnnnnnnnnnnnnnnnnnnnnnnnnnnnnnnnnnnnnnnnnnnnnnnnnnnnnnnnnnnnnnnnnnnnnnnnnnnnnnnnnnnnnnnnnnnnnnnnnnnnnnnnnnnnnnnnnnnnnnnnnnnnnnnnnnnnnnnnnnnnnnnnnnnnnnnnnnnnnnnnnnnnnnnnnnnnnnnnnnnnnnnnnnnnnnnnnnnnnnnnnnnnnnnnnnnnnnnnnnnnnnnnnnnnnnnnnnnnnnnnnnnnnnnnnnnnnnnnnnnnnnnnnnnnnnnnnnnnnnnnnnnnnnnnnnnnnnnnnnnnnnnnnnnnnnnnnnnnnnnnnnnnnnnnnnnnnnnnnnnnnnnnnnnnnnnnnnnnnnnnnnnnnnnnnnnnnnnnnnnnnnnnnnnnnnnnnnnnnnnnnnnnnnnnnnnnnnnnnnnnnnnnnnnnnnnnnnnnnnnnnnnnnnnnnnnnnnnnnnnnnnnnnnnnnnnnnnnnnnnnnnnnnnnnnnnnnnnnnnnnnnnnnnnnnnnnnnnnnnnnnnnnnnnnnnnnnnnnnnnnnnnnnnnnnnnnnnnnnnnnnnnnnnnnnnnnnnnnnnnnnnnnnnnnnnnnnnnnnnnnnnnnnnnnnnnnnnnnnnnnnnnnnnnnnnnnnnnnnnnnnnnnnnnnnnnnnnnnnnnnnnnnnnnnnnnnnnnnnnnnnnnnnnnnnnnnnnnnnnnnnnnnnnnnnnnnnnnnnnnnnnnnnnnnnnnnnnnnnnnnnnnnnnnnnnnnnnnnnnnnnnnnnnnnnnnnnnnnnnnnnnnnnnnnnnnnnnnnnnnnnnnnnnnnnnnnnnnnnnnnnnnnnnnnnnnnnnnnnnnnnnnnnnnnnnnnnnnnnnnnnnnnnnnnnnnnnnnnnnnnnnnnnnnnnnnnnnnnnnnnnnnnnnnnnnnnnnnnnnnnnnnnnnnnnnnnnnnnnnnnnnnnnnnnnnnnnnnnnnnnnnnnnnnnnnnnnnnnnnnnnnnnnnnnnnnnnnnnnnnnnnnnnnnnnnnnnnnnnnnnnnnnnnnnnnnnnnnnnnnnnnnnnnnnnnnnnnnnnnnnnnnnnnnnnnnnnnnnnnnnnnnnnnnnnnnnnnnnnnnnnnnnnnnnnnnnnnnnnnnnnnnnnnnnnnnnnnnnnnnnnnnnnnnnnnnnnnnnnnnnnnnnnnnnnnnnnnnnnnnnnnnnnnnnnnnnnnnnnnnnnnnnnnnnnnnnnnnnnnnnnnnnnnnnnnnnnnnnnnnnnnnnnnnnnnnnnnnnnnnnnnnnnnnnnnnnnnnnnnnnnnnnnnnnnnnnnnnnnnnnnnnnnnnnnnnnnnnnnnnnnnnnnnnnnnnnnnnnnnnnnnnnnnnnnnnnnnnnnnnnnnnnnnnnnnnnnnnnnnnnnnnnnnnnnnnnnnnnnnnnnnnnnnnnnnnnnnnnnnnnnnnnnnnnnnnnnnnnnnnnnnnnnnnnnnnnnnnnnnnnnnnnnnnnnnnnnnnnnnnnnnnnnnnnnnnnnnnnnnnnnnnnnnnnnnnnnnnnnnnnnnnnnnnnnnnnnnnnnnnnnnnnnnnnnnnnnnnnnnnnnnnnnnnnnnnnnnnnnnnnnnnnnnnnnnnnnnnnnnnnnnnnnnnnnnnnnnnnnnnnnnnnnnnnnnnnnnnnnnnnnnnnnnnnnnnnnnnnnnnnnnnnnnnnnnnnnnnnnnnnnnnnnnnnnnnnnnnnnnnnnnnnnnnnnnnnnnnnnnnnnnnnnnnnnnnnnnnnnnnnnnnnnnnnnnnnnnnnnnnnnnnnnnnnnnnnnnnnnnnnnnnnnnnnnnnnnnnnnnnnnnnnnnnnnnnnnnnnnnnnnnnnnnnnnnnnnnnnnnnnnnnnnnnnnnnnnnnnnnnnnnnnnnnnnnnnnnnnnnnnnnnnnnnnnnnnnnnnnnnnnnnnnnnnnnnnnnnnnnnnnnnnnnnnnnnnnnnnnnnnnnnnnnnnnnnnnnnnnnnnnnnnnnnnnnnnnnnnnnnnnnnnnnnnnnnnnnnnnnnnnnnnnnnnnnnnnnnnnnnnnnnnnnnnnnnnnnnnnnnnnnnnnnnnnnnnnnnnnnnnnnnnnnnnnnnnnnnnnnnnnnnnnnnnnnnnnnnnnnnnnnnnnnnnnnnnnnnnnnnnnnnnnnnnnnnnnnnnnnnnnnnnnnnnnnnnnnnnnnnnnnnnnnnnnnnnnnnnnnnnnnnnnnnnnnnnnnnnnnnnnnnnnnnnnnnnnnnnnnnnnnnnnnnnnnnnnnnnnnnnnnnnnnnnnnnnnnnnnnnnnnnnnnnnnnnnnnnnnnnnnnnnnnnnnnnnnnnnnnnnnnnnnnnnnnnnnnnnnnnnnnnnnnnnnnnnnnnnnnnnnnnnnnnnnnnnnnnnnnnnnnnnnnnnnnnnnnnnnnnnnnnnnnnnnnnnnnnnnnnnnnnnnnnnnnnnnnnnnnnnnnnnnnnnnnnnnnnnnnnnnnnnnnnnnnnnnnnnnnnnnnnnnnnnnnnnnnnnnnnnnnnnnnnnnnnnnnnnnnnnnnnnnnnnnnnnnnnnnnnnnnnnnnnnnnnnnnnnnnnnnnnnnnnnnnnnnnnnnnnnnnnnnnnnnnnnnnnnnnnnnnnnnnnnnnnnnnnnnnnnnnnnnnnnnnnnnnnnnnnnnnnnnnnnnnnnnnnnnnnnnnnnnnnnnnnnnnnnnnnnnnnnnnnnnnnnnnnnnnnnnnnnnnnnnnnnnnnnnnnnnnnnnnnnnnnnnnnnnnnnnnnnnnnnnnnnnnnnnnnnnnnnnnnnnnnnnnnnnnnnnnnnnnnnnnnnnnnnnnnnnnnnnnnnnnnnnnnnnnnnnnnnnnnnnnnnnnnnnnnnnnnnnnnnnnnnnnnnnnnnnnnnnnnnnnnnnnnnnnnnnnnnnnnnnnnnnnnnnnnnnnnnnnnnnnnnnnnnnnnnnnnnnnnnnnnnnnnnnnnnnnnnnnnnnnnnnnnnnnnnnnnnnnnnnnnnnnnnnnnnnnnnnnnnnnnnnnnnnnnnnnnnnnnnnnnnnnnnnnnnnnnnnnnnnnnnnnnnnnnnnnnnnnnnnnnnnnnnnnnnnnnnnnnnnnnnnnnnnnnnnnnnnnnnnnnnnnnnnnnnnnnnnnnnnnnnnnnnnnnnnnnnnnnnnnnnnnnnnnnnnnnnnnnnnnnnnnnnnnnnnnnnnnnnnnnnnnnnnnnnnnnnnnnnnnnnnnnnnnnnnnnnnnnnnnnnnnnnnnnnnnnnnnnnnnnnnnnnnnnnnnnnnnnnnnnnnnnnnnnnnnnnnnnnnnnnnnnnnnnnnnnnnnnnnnnnnnnnnnnnnnnnnnnnnnnnnnnnnnnnnnnnnnnnnnnnnnnnnnnnnnnnnnnnnnnnnnnnnnnnnnnnnnnnnnnnnnnnnnnnnnnnnnnnnnnnnnnnnnnnnnnnnnnnnnnnnnnnnnnnnnnnnnnnnnnnnnnnnnnnnnnnnnnnnnnnnnnnnnnnnnnnnnnnnnnnnnnnnnnnnnnnnnnnnnnnnnnnnnnnnnnnnnnnnnnnnnnnnnnnnnnnnnnnnnnnnnnnnnnnnnnnnnnnnnnnnnnnnnnnnnnnnnnnnnnnnnnnnnnnnnnnnnnnnnnnnnnnnnnnnnnnnnnnnnnnnnnnnnnnnnnnnnnnnnnnnnnnnnnnnnnnnnnnnnnnnnnnnnnnnnnnnnnnnnnnnnnnnnnnnnnnnnnnnnnnnnnnnnnnnnnnnnnnnnnnnnnnnnnnnnnnnnnnnnnnnnnnnnnnnnnnnnnnnnnnnnnnnnnnnnnnnnnnnnnnnnnnnnnnnnnnnnnnnnnnnnnnnnnnnnnnnnnnnnnnnnnnnnnnnnnnnnnnnnnnnnnnnnnnnnnnnnnnnnnnnnnnnnnnnnnnnnnnnnnnnnnnnnnnnnnnnnnnnnnnnnnnnnnnnnnnnnnnnnnnnnnnnnnnnnnnnnnnnnnnnnnnnnnnnnnnnnnnnnnnnnnnnnnnnnnnnnnnnnnnnnnnnnnnnnnnnnnnnnnnnnnnnnnnnnnnnnnnnnnnnnnnnnnnnnnnnnnnnnnnnnnnnnnnnnnnnnnnnnnnnnnnnnnnnnnnnnnnnnnnnnnnnnnnnnnnnnnnnnnnnnnnnnnnnnnnnnnnnnnnnnnnnnnnnnnnnnnnnnnnnnnnnnnnnnnnnnnnnnnnnnnnnnnnnnnnnnnnnnnnnnnnnnnnnnnnnnnnnnnnnnnnnnnnnnnnnnnnnnnnnnnnnnnnnnnnnnnnnnnnnnnnnnnnnnnnnnnnnnnnnnnnnnnnnnnnnnnnnnnnnnnnnnnnnnnnnnnnnnnnnnnnnnnnnnnnnnnnnnnnnnnnnnnnnnnnnnnnnnnnnnnnnnnnnnnnnnnnnnnnnnnnnnnnnnnnnnnnnnnnnnnnnnnnnnnnnnnnnnnnnnnnnnnnnnnnnnnnnnnnnnnnnnnnnnnnnnnnnnnnnnnnnnnnnnnnnnnnnnnnnnnnnnnnnnnnnnnnnnnnnnnnnnnnnnnnnnnnnnnnnnnnnnnnnnnnnnnnnnnnnnnnnnnnnnnnnnnnnnnnnnnnnnnnnnnnnnnnnnnnnnnnnnnnnnnnnnnnnnnnnnnnnnnnnnnnnnnnnnnnnnnnnnnnnnnnnnnnnnnnnnnnnnnnnnnnnnnnnnnnnnnnnnnnnnnnnnnnnnnnnnnnnnnnnnnnnnnnnnnnnnnnnnnnnnnnnnnnnnnnnnnnnnnnnnnnnnnnnnnnnnnnnnnnnnnnnnnnnnnnnnnnnnnnnnnnnnnnnnnnnnnnnnnnnnnnnnnnnnnnnnnnnnnnnnnnnnnnnnnnnnnnnnnnnnnnnnnnnnnnnnnnnnnnnnnnnnnnnnnnnnnnnnnnnnnnnnnnnnnnnnnnnnnnnnnnnnnnnnnnnnnnnnnnnnnnnnnnnnnnnnnnnnnnnnnnnnnnnnnnnnnnnnnnnnnnnnnnnnnnnnnnnnnnnnnnnnnnnnnnnnnnnnnnnnnnnnnnnnnnnnnnnnnnnnnnnnnnnnnnnnnnnnnnnnnnnnnnnnnnnnnnnnnnnnnnnnnnnnnnnnnnnnnnnnnnnnnnnnnnnnnnnnnnnnnnnnnnnnnnnnnnnnnnnnnnnnnnnnnnnnnnnnnnnnnnnnnnnnnnnnnnnnnnnnnnnnnnnnnnnnnnnnnnnnnnnnnnnnnnnnnnnnnnnnnnnnnnnnnnnnnnnnnnnnnnnnnnnnnnnnnnnnnnnnnnnnnnnnnnnnnnnnnnnnnnnnnnnnnnnnnnnnnnnnnnnnnnnnnnnnnnnnnnnnnnnnnnnnnnnnnnnnnnnnnnnnnnnnnnnnnnnnnnnnnnnnnnnnnnnnnnnnnnnnnnnnnnnnnnnnnnnnnnnnnnnnnnnnnnnnnnnnnnnnnnnnnnnnnnnnnnnnnnnnnnnnnnnnnnnnnnnnnnnnnnnnnnnnnnnnnnnnnnnnnnnnnnnnnnnnnnnnnnnnnnnnnnnnnnnnnnnnnnnnnnnnnnnnnnnnnnnnnnnnnnnnnnnnnnnnnnnnnnnnnnnnnnnnnnnnnnnnnnnnnnnnnnnnnnnnnnnnnnnnnnnnnnnnnnnnnnnnnnnnnnnnnnnnnnnnnnnnnnnnnnnnnnnnnnnnnnnnnnnnnnnnnnnnnnnnnnnnnnnnnnnnnnnnnnnnnnnnnnnnnnnnnnnnnnnnnnnnnnnnnnnnnnnnnnnnnnnnnnnnnnnnnnnnnnnnnnnnnnnnnnnnnnnnnnnnnnnnnnnnnnnnnnnnnnnnnnnnnnnnnnnnnnnnnnnnnnnnnnnnnnnnnnnnnnnnnnnnnnnnnnnnnnnnnnnnnnnnnnnnnnnnnnnnnnnnnnnnnnnnnnnnnnnnnnnnnnnnnnnnnnnnnnnnnnnnnnnnnnnnnnnnnnnnnnnnnnnnnnnnnnnnnnnnnnnnnnnnnnnnnnnnnnnnnnnnnnnnnnnnnnnnnnnnnnnnnnnnnnnnnnnnnnnnnnnnnnnnnnnnnnnnnnnnnnnnnnnnnnnnnnnnnnnnnnnnnnnnnnnnnnnnnnnnnnnnnnnnnnnnnnnnnnnnnnnnnnnnnnnnnnnnnnnnnnnnnnnnnnnnnnnnnnnnnnnnnnnnnnnnnnnnnnnnnnnnnnnnnnnnnnnnnnnnnnnnnnnnnnnnnnnnnnnnnnnnnnnnnnnnnnnnnnnnnnnnnnnnnnnnnnnnnnnnnnnnnnnnnnnnnnnnnnnnnnnnnnnnnnnnnnnnnnnnnnnnnnnnnnnnnnnnnnnnnnnnnnnnnnnnnnnnnnnnnnnnnnnnnnnnnnnnnnnnnnnnnnnnnnnnnnnnnnnnnnnnnnnnnnnnnnnnnnnnnnnnnnnnnnnnnnnnnnnnnnnnnnnnnnnnnnnnnnnnnnnnnnnnnnnnnnnnnnnnnnnnnnnnnnnnnnnnnnnnnnnnnnnnnnnnnnnnnnnnnnnnnnnnnnnnnnnnnnnnnnnnnnnnnnnnnnnnnnnnnnnnnnnnnnnnnnnnnnnnnnnnnnnnnnnnnnnnnnnnnnnnnnnnnnnnnnnnnnnnnnnnnnnnnnnnnnnnnnnnnnnnnnnnnnnnnnnnnnnnnnnnnnnnnnnnnnnnnnnnnnnnnnnnnnnnnnnnnnnnnnnnnnnnnnnnnnnnnnnnnnnnnnnnnnnnnnnnnnnnnnnnnnnnnnnnnnnnnnnnnnnnnnnnnnnnnnnnnnnnnnnnnnnnnnnnnnnnnnnnnnnnnnnnnnnnnnnnnnnnnnnnnnnnnnnnnnnnnnnnnnnnnnnnnnnnnnnnnnnnnnnnnnnnnnnnnnnnnnnnnnnnnnnnnnnnnnnnnnnnnnnnnnnnnnnnnnnnnnnnnnnnnnnnnnnnnnnnnnnnnnnnnnnnnnnnnnnnnnnnnnnnnnnnnnnnnnnnnnnnnnnnnnnnnnnnnnnnnnnnnnnnnnnnnnnnnnnnnnnnnnnnnnnnnnnnnnnnnnnnnnnnnnnnnnnnnnnnnnnnnnnnnnnnnnnnnnnnnnnnnnnnnnnnnnnnnnnnnnnnnnnnnnnnnnnnnnnnnnnnnnnnnnnnnnnnnnnnnnnnnnnnnnnnnnnnnnnnnnnnnnnnnnnnnnnnnnnnnnnnnnnnnnnnnnnnnnnnnnnnnnnnnnnnnnnnnnnnnnnnnnnnnnnnnnnnnnnnnnnnnnnnnnnnnnnnnnnnnnnnnnnnnnnnnnnnnnnnnnnnnnnnnnnnnnnnnnnnnnnnnnnnnnnnnnnnnnnnnnnnnnnnnnnnnnnnnnnnnnnnnnnnnnnnnnnnnnnnnnnnnnnnnnnnnnnnnnnnnnnnnnnnnnnnnnnnnnnnnnnnnnnnnnnnnnnnnnnnnnnnnnnnnnnnnnnnnnnnnnnnnnnnnnnnnnnnnnnnnnnnnnnnnnnnnnnnnnnnnnnnnnnnnnnnnnnnnnnnnnnnnnnnnnnnnnnnnnnnnnnnnnnnnnnnnnnnnnnnnnnnnnnnnnnnnnnnnnnnnnnnnnnnnnnnnnnnnnnnnnnnnnnnnnnnnnnnnnnnnnnnnnnnnnnnnnnnnnnnnnnnnnnnnnnnnnnnnnnnnnnnnnnnnnnnnnnnnnnnnnnnnnnnnnnnnnnnnnnnnnnnnnnnnnnnnnnnnnnnnnnnnnnnnnnnnnnnnnnnnnnnnnnnnnnnnnnnnnnnnnnnnnnnnnnnnnnnnnnnnnnnnnnnnnnnnnnnnnnnnnnnnnnnnnnnnnnnnnnnnnnnnnnnnnnnnnnnnnnnnnnnnnnnnnnnnnnnnnnnnnnnnnnnnnnnnnnnnnnnnnnnnnnnnnnnnnnnnnnnnnnnnnnnnnnnnnnnnnnnnnnnnnnnnnnnnnnnnnnnnnnnnnnnnnnnnnnnnnnnnnnnnnnnnnnnnnnnnnnnnnnnnnnnnnnnnnnnnnnnnnnnnnnnnnnnnnnnnnnnnnnnnnnnnnnnnnnnnnnnnnnnnnnnnnnnnnnnnnnnnnnnnnnnnnnnnnnnnnnnnnnnnnnnnnnnnnnnnnnnnnnnnnnnnnnnnnnnnnnnnnnnnnnnnnnnnnnnnnnnnnnnnnnnnnnnnnnnnnnnnnnnnnnnnnnnnnnnnnnnnnnnnnnnnnnnnnnnnnnnnnnnnnnnnnnnnnnnnnnnnnnnnnnnnnnnnnnnnnnnnnnnnnnnnnnnnnnnnnnnnnnnnnnnnnnnnnnnnnnnnnnnnnnnnnnnnnnnnnnnnnnnnnnnnnnnnnnnnnnnnnnnnnnnnnnnnnnnnnnnnnnnnnnnnnnnnnnnnnnnnnnnnnnnnnnnnnnnnnnnnnnnnnnnnnnnnnnnnnnnnnnnnnnnnnnnnnnnnnnnnnnnnnnnnnnnnnnnnnnnnnnnnnnnnnnnnnnnnnnnnnnnnnnnnnnnnnnnnnnnnnnnnnnnnnnnnnnnnnnnnnnnnnnnnnnnnnnnnnnnnnnnnnnnnnnnnnnnnnnnnnnnnnnnnnnnnnnnnnnnnnnnnnnnnnnnnnnnnnnnnnnnnnnnnnnnnnnnnnnnnnnnnnnnnnnnnnnnnnnnnnnnnnnnnnnnnnnnnnnnnnnnnnnnnnnnnnnnnnnnnnnnnnnnnnnnnnnnnnnnnnnnnnnnnnnnnnnnnnnnnnnnnnnnnnnnnnnnnnnnnnnnnnnnnnnnnnnnnnnnnnnnnnnnnnnnnnnnnnnnnnnnnnnnnnnnnnnnnnnnnnnnnnnnnnnnnnnnnnnnnnnnnnnnnnnnnnnnnnnnnnnnnnnnnnnnnnnnnnnnnnnnnnnnnnnnnnnnnnnnnnnnnnnnnnnnnnnnnnnnnnnnnnnnnnnnnnnnnnnnnnnnnnnnnnnnnnnnnnnnnnnnnnnnnnnnnnnnnnnnnnnnnnnnnnnnnnnnnnnnnnnnnnnnnnnnnnnnnnnnnnnnnnnnnnnnnnnnnnnnnnnnnnnnnnnnnnnnnnnnnnnnnnnnnnnnnnnnnnnnnnnnnnnnnnnnnnnnnnnnnnnnnnnnnnnnnnnnnnnnnnnnnnnnnnnnnnnnnnnnnnnnnnnnnnnnnnnnnnnnnnnnnnnnnnnnnnnnnnnnnnnnnnnnnnnnnnnnnnnnnnnnnnnnnnnnnnnnnnnnnnnnnnnnnnnnnnnnnnnnnnnnnnnnnnnnnnnnnnnnnnnnnnnnnnnnnnnnnnnnnnnnnnnnnnnnnnnnnnnnnnnnnnnnnnnnnnnnnnnnnnnnnnnnnnnnnnnnnnnnnnnnnnnnnnnnnnnnnnnnnnnnnnnnnnnnnnnnnnnnnnnnnnnnnnnnnnnnnnnnnnnnnnnnnnnnnnnnnnnnnnnnnnnnnnnnnnnnnnnnnnnnnnnnnnnnnnnnnnnnnnnnnnnnnnnnnnnnnnnnnnnnnnnnnnnnnnnnnnnnnnnnnnnnnnnnnnnnnnnnnnnnnnnnnnnnnnnnnnnnnnnnnnnnnnnnnnnnnnnnnnnnnnnnnnnnnnnnnnnnnnnnnnnnnnnnnnnnnnnnnnnnnnnnnnnnnnnnnnnnnnnnnnnnnnnnnnnnnnnnnnnnnnnnnnnnnnnnnnnnnnnnnnnnnnnnnnnnnnnnnnnnnnnnnnnnnnnnnnnnnnnnnnnnnnnnnnnnnnnnnnnnnnnnnnnnnnnnnnnnnnnnnnnnnnnnnnnnnnnnnnnnnnnnnnnnnnnnnnnnnnnnnnnnnnnnnnnnnnnnnnnnnnnnnnnnnnnnnnnnnnnnnnnnnnnnnnnnnnnnnnnnnnnnnnnnnnnnnnnnnnnnnnnnnnnnnnnnnnnnnnnnnnnnnnnnnnnnnnnnnnnnnnnnnnnnnnnnnnnnnnnnnnnnnnnnnnnnnnnnnnnnnnnnnnnnnnnnnnnnnnnnnnnnnnnnnnnnnnnnnnnnnnnnnnnnnnnnnnnnnnnnnnnnnnnnnnnnnnnnnnnnnnnnnnnnnnnnnnnnnnnnnnnnnnnnnnnnnnnnnnnnnnnnnnnnnnnnnnnnnnnnnnnnnnnnnnnnnnnnnnnnnnnnnnnnnnnnnnnnnnnnnnnnnnnnnnnnnnnnnnnnnnnnnnnnnnnnnnnnnnnnnnnnnnnnnnnnnnnnnnnnnnnnnnnnnnnnnnnnnnnnnnnnnnnnnnnnnnnnnnnnnnnnnnnnnnnnnnnnnnnnnnnnnnnnnnnnnnnnnnnnnnnnnnnnnnnnnnnnnnnnnnnnnnnnnnnnnnnnnnnnnnnnnnnnnnnnnnnnnnnnnnnnnnnnnnnnnnnnnnnnnnnnnnnnnnnnnnnnnnnnnnnnnnnnnnnnnnnnnnnnnnnnnnnnnnnnnnnnnnnnnnnnnnnnnnnnnnnnnnnnnnnnnnnnnnnnnnnnnnnnnnnnnnnnnnnnnnnnnnnnnnnnnnnnnnnnnnnnnnnnnnnnnnnnnnnnnnnnnnnnnnnnnnnnnnnnnnnnnnnnnnnnnnnnnnnnnnnnnnnnnnnnnnnnnnnnnnnnnnnnnnnnnnnnnnnnnnnnnnnnnnnnnnnnnnnnnnnnnnnnnnnnnnnnnnnnnnnnnnnnnnnnnnnnnnnnnnnnnnnnnnnnnnnnnnnnnnnnnnnnnnnnnnnnnnnnnnnnnnnnnnnnnnnnnnnnnnnnnnnnnnnnnnnnnnnnnnnnnnnnnnnnnnnnnnnnnnnnnnnnnnnnnnnnnnnnnnnnnnnnnnnnnnnnnnnnnnnnnnnnnnnnnnnnnnnnnnnnnnnnnnnnnnnnnnnnnnnnnnnnnnnnnnnnnnnnnnnnnnnnnnnnnnnnnnnnnnnnnnnnnnnnnnnnnnnnnnnnnnnnnnnnnnnnnnnnnnnnnnnnnnnnnnnnnnnnnnnnnnnnnnnnnnnnnnnnnnnnnnnnnnnnnnnnnnnnnnnnnnnnnnnnnnnnnnnnnnnnnnnnnnnnnnnnnnnnnnnnnnnnnnnnnnnnnnnnnnnnnnnnnnnnnnnnnnnnnnnnnnnnnnnnnnnnnnnnnnnnnnnnnnnnnnnnnnnnnnnnnnnnnnnnnnnnnnnnnnnnnnnnnnnnnnnnnnnnnnnnnnnnnnnnnnnnnnnnnnnnnnnnnnnnnnnnnnnnnnnnnnnnnnnnnnnnnnnnnnnnnnnnnnnnnnnnnnnnnnnnnnnnnnnnnnnnnnnnnnnnnnnnnnnnnnnnnnnnnnnnnnnnnnnnnnnnnnnnnnnnnnnnnnnnnnnnnnnnnnnnnnnnnnnnnnnnnnnnnnnnnnnnnnnnnnnnnnnnnnnnnnnnnnnnnnnnnnnnnnnnnnnnnnnnnnnnnnnnnnnnnnnnnnnnnnnnnnnnnnnnnnnnnnnnnnnnnnnnnnnnnnnnnnnnnnnnnnnnnnnnnnnnnnnnnnnnnnnnnnnnnnnnnnnnnnnnnnnnnnnnnnnnnnnnnnnnnnnnnnnnnnnnnnnnnnnnnnnnnnnnnnnnnnnnnnnnnnnnnnnnnnnnnnnnnnnnnnnnnnnnnnnnnnnnnnnnnnnnnnnnnnnnnnnnnnnnnnnnnnnnnnnnnnnnnnnnnnnnnnnnnnnnnnnnnnnnnnnnnnnnnnnnnnnnnnnnnnnnnnnnnnnnnnnnnnnnnnnnnnnnnnnnnnnnnnnnnnnnnnnnnnnnnnnnnnnnnnnnnnnnnnnnnnnnnnnnnnnnnnnnnnnnnnnnnnnnnnnnnnnnnnnnnnnnnnnnnnnnnnnnnnnnnnnnnnnnnnnnnnnnnnnnnnnnnnnnnnnnnnnnnnnnnnnnnnnnnnnnnnnnnnnnnnnnnnnnnnnnnnnnnnnnnnnnnnnnnnnnnnnnnnnnnnnnnnnnnnnnnnnnnnnnnnnnnnnnnnnnnnnnnnnnnnnnnnnnnnnnnnnnnnnnnnnnnnnnnnnnnnnnnnnnnnnnnnnnnnnnnnnnnnnnnnnnnnnnnnnnnnnnnnnnnnnnnnnnnnnnnnnnnnnnnnnnnnnnnnnnnnnnnnnnnnnnnnnnnnnnnnnnnnnnnnnnnnnnnnnnnnnnnnnnnnnnnnnnnnnnnnnnnnnnnnnnnnnnnnnnnnnnnnnnnnnnnnnnnnnnnnnnnnnnnnnnnnnnnnnnnnnnnnnnnnnnnnnnnnnnnnnnnnnnnnnnnnnnnnnnnnnnnnnnnnnnnnnnnnnnnnnnnnnnnnnnnnnnnnnnnnnnnnnnnnnnnnnnnnnnnnnnnnnnnnnnnnnnnnnnnnnnnnnnnnnnnnnnnnnnnnnnnnnnnnnnnnnnnnnnnnnnnnnnnnnnnnnnnnnnnnnnnnnnnnnnnnnnnnnnnnnnnnnnnnnnnnnnnnnnnnnnnnnnnnnnnnnnnnnnnnnnnnnnnnnnnnnnnnnnnnnnnnnnnnnnnnnnnnnnnnnnnnnnnnnnnnnnnnnnnnnnnnnnnnnnnnnnnnnnnnnnnnnnnnnnnnnnnnnnnnnnnnnnnnnnnnnnnnnnnnnnnnnnnnnnnnnnnnnnnnnnnnnnnnnnnnnnnnnnnnnnnnnnnnnnnnnnnnnnnnnnnnnnnnnnnnnnnnnnnnnnnnnnnnnnnnnnnnnnnnnnnnnnnnnnnnnnnnnnnnnnnnnnnnnnnnnnnnnnnnnnnnnnnnnnnnnnnnnnnnnnnnnnnnnnnnnnnnnnnnnnnnnnnnnnnnnnnnnnnnnnnnnnnnnnnnnnnnnnnnnnnnnnnnnnnnnnnnnnnnnnnnnnnnnnnnnnnnnnnnnnnnnnnnnnnnnnnnnnnnnnnnnnnnnnnnnnnnnnnnnnnnnnnnnnnnnnnnnnnnnnnnnnnnnnnnnnnnnnnnnnnnnnnnnnnnnnnnnnnnnnnnnnnnnnnnnnnnnnnnnnnnnnnnnnnnnnnnnnnnnnnnnnnnnnnnnnnnnnnnnnnnnnnnnnnnnnnnnnnnnnnnnnnnnnnnnnnnnnnnnnnnnnnnnnnnnnnnnnnnnnnnnnnnnnnnnnnnnnnnnnnnnnnnnnnnnnnnnnnnnnnnnnnnnnnnnnnnnnnnnnnnnnnnnnnnnnnnnnnnnnnnnnnnnnnnnnnnnnnnnnnnnnnnnnnnnnnnnnnnnnnnnnnnnnnnnnnnnnnnnnnnnnnnnnnnnnnnnnnnnnnnnnnnnnnnnnnnnnnnnnnnnnnnnnnnnnnnnnnnnnnnnnnnnnnnnnnnnnnnnnnnnnnnnnnnnnnnnnnnnnnnnnnnnnnnnnnnnnnnnnnnnnnnnnnnnnnnnnnnnnnnnnnnnnnnnnnnnnnnnnnnnnnnnnnnnnnnnnnnnnnnnnnnnnnnnnnnnnnnnnnnnnnnnnnnnnnnnnnnnnnnnnnnnnnnnnnnnnnnnnnnnnnnnnnnnnnnnnnnnnnnnnnnnnnnnnnnnnnnnnnnnnnnnnnnnnnnnnnnnnnnnnnnnnnnnnnnnnnnnnnnnnnnnnnnnnnnnnnnnnnnnnnnnnnnnnnnnnnnnnnnnnnnnnnnnnnnnnnnnnnnnnnnnnnnnnnnnnnnnnnnnnnnnnnnnnnnnnnnnnnnnnnnnnnnnnnnnnnnnnnnnnnnnnnnnnnnnnnnnnnnnnnnnnnnnnnnnnnnnnnnnnnnnnnnnnnnnnnnnnnnnnnnnnnnnnnnnnnnnnnnnnnnnnnnnnnnnnnnnnnnnnnnnnnnnnnnnnnnnnnnnnnnnnnnnnnnnnnnnnnnnnnnnnnnnnnnnnnnnnnnnnnnnnnnnnnnnnnnnnnnnnnnnnnnnnnnnnnnnnnnnnnnnnnnnnnnnnnnnnnnnnnnnnnnnnnnnnnnnnnnnnnnnnnnnnnnnnnnnnnnnnnnnnnnnnnnnnnnnnnnnnnnnnnnnnnnnnnnnnnnnnnnnnnnnnnnnnnnnnnnnnnnnnnnnnnnnnnnnnnnnnnnnnnnnnnnnnnnnnnnnnnnnnnnnnnnnnnnnnnnnnnnnnnnnnnnnnnnnnnnnnnnnnnnnnnnnnnnnnnnnnnnnnnnnnnnnnnnnnnnnnnnnnnnnnnnnnnnnnnnnnnnnnnnnnnnnnnnnnnnnnnnnnnnnnnnnnnnnnnnnnnnnnnnnnnnnnnnnnnnnnnnnnnnnnnnnnnnnnnnnnnnnnnnnnnnnnnnnnnnnnnnnnnnnnnnnnnnnnnnnnnnnnnnnnnnnnnnnnnnnnnnnnnnnnnnnnnnnnnnnnnnnnnnnnnnnnnnnnnnnnnnnnnnnnnnnnnnnnnnnnnnnnnnnnnnnnnnnnnnnnnnnnnnnnnnnnnnnnnnnnnnnnnnnnnnnnnnnnnnnnnnnnnnnnnnnnnnnnnnnnnnnnnnnnnnnnnnnnnnnnnnnnnnnnnnnnnnnnnnnnnnnnnnnnnnnnnnnnnnnnnnnnnnnnnnnnnnnnnnnnnnnnnnnnnnnnnnnnnnnnnnnnnnnnnnnnnnnnnnnnnnnnnnnnnnnnnnnnnnnnnnnnnnnnnnnnnnnnnnnnnnnnnnnnnnnnnnnnnnnnnnnnnnnnnnnnnnnnnnnnnnnnnnnnnnnnnnnnnnnnnnnnnnnnnnnnnnnnnnnnnnnnnnnnnnnnnnnnnnnnnnnnnnnnnnnnnnnnnnnnnnnnnnnnnnnnnnnnnnnnnnnnnnnnnnnnnnnnnnnnnnnnnnnnnnnnnnnnnnnnnnnnnnnnnnnnnnnnnnnnnnnnnnnnnnnnnnnnnnnnnnnnnnnnnnnnnnnnnnnnnnnnnnnnnnnnnnnnnnnnnnnnnnnnnnnnnnnnnnnnnnnnnnnnnnnnnnnnnnnnnnnnnnnnnnnnnnnnnnnnnnnnnnnnnnnnnnnnnnnnnnnnnnnnnnnnnnnnnnnnnnnnnnnnnnnnnnnnnnnnnnnnnnnnnnnnnnnnnnnnnnnnnnnnnnnnnnnnnnnnnnnnnnnnnnnnnnnnnnnnnnnnnnnnnnnnnnnnnnnnnnnnnnnnnnnnnnnnnnnnnnnnnnnnnnnnnnnnnnnnnnnnnnnnnnnnnnnnnnnnnnnnnnnnnnnnnnnnnnnnnnnnnnnnnnnnnnnnnnnnnnnnnnnnnnnnnnnnnnnnnnnnnnnnnnnnnnnnnnnnnnnnnnnnnnnnnnnnnnnnnnnnnnnnnnnnnnnnnnnnnnnnnnnnnnnnnnnnnnnnnnnnnnnnnnnnnnnnnnnnnnnnnnnnnnnnnnnnnnnnnnnnnnnnnnnnnnnnnnnnnnnnnnnnnnnnnnnnnnnnnnnnnnnnnnnnnnnnnnnnnnnnnnnnnnnnnnnnnnnnnnnnnnnnnnnnnnnnnnnnnnnnnnnnnnnnnnnnnnnnnnnnnnnnnnnnnnnnnnnnnnnnnnnnnnnnnnnnnnnnnnnnnnnnnnnnnnnnnnnnnnnnnnnnnnnnnnnnnnnnnnnnnnnnnnnnnnnnnnnnnnnnnnnnnnnnnnnnnnnnnnnnnnnnnnnnnnnnnnnnnnnnnnnnnnnnnnnnnnnnnnnnnnnnnnnnnnnnnnnnnnnnnnnnnnnnnnnnnnnnnnnnnnnnnnnnnnnnnnnnnnnnnnnnnnnnnnnnnnnnnnnnnnnnnnnnnnnnnnnnnnnnnnnnnnnnnnnnnnnnnnnnnnnnnnnnnnnnnnnnnnnnnnnnnnnnnnnnnnnnnnnnnnnnnnnnnnnnnnnnnnnnnnnnnnnnnnnnnnnnnnnnnnnnnnnnnnnnnnnnnnnnnnnnnnnnnnnnnnnnnnnnnnnnnnnnnnnnnnnnnnnnnnnnnnnnnnnnnnnnnnnnnnnnnnnnnnnnnnnnnnnnnnnnnnnnnnnnnnnnnnnnnnnnnnnnnnnnnnnnnnnnnnnnnnnnnnnnnnnnnnnnnnnnnnnnnnnnnnnnnnnnnnnnnnnnnnnnnnnnnnnnnnnnnnnnnnnnnnnnnnnnnnnnnnnnnnnnnnnnnnnnnnnnnnnnnnnnnnnnnnnnnnnnnnnnnnnnnnnnnnnnnnnnnnnnnnnnnnnnnnnnnnnnnnnnnnnnnnnnnnnnnnnnnnnnnnnnnnnnnnnnnnnnnnnnnnnnnnnnnnnnnnnnnnnnnnnnnnnnnnnnnnnnnnnnnnnnnnnnnnnnnnnnnnnnnnnnnnnnnnnnnnnnnnnnnnnnnnnnnnnnnnnnnnnnnnnnnnnnnnnnnnnnnnnnnnnnnnnnnnnnnnnnnnnnnnnnnnnnnnnnnnnnnnnnnnnnnnnnnnnnnnnnnnnnnnnnnnnnnnnnnnnnnnnnnnnnnnnnnnnnnnnnnnnnnnnnnnnnnnnnnnnnnnnnnnnnnnnnnnnnnnnnnnnnnnnnnnnnnnnnnnnnnnnnnnnnnnnnnnnnnnnnnnnnnnnnnnnnnnnnnnnnnnnnnnnnnnnnnnnnnnnnnnnnnnnnnnnnnnnnnnnnnnnnnnnnnnnnnnnnnnnnnnnnnnnnnnnnnnnnnnnnnnnnnnnnnnnnnnnnnnnnnnnnnnnnnnnnnnnnnnnnnnnnnnnnnnnnnnnnnnnnnnnnnnnnnnnnnnnnnnnnnnnnnnnnnnnnnnnnnnnnnnnnnnnnnnnnnnnnnnnnnnnnnnnnnnnnnnnnnnnnnnnnnnnnnnnnnnnnnnnnnnnnnnnnnnnnnnnnnnnnnnnnnnnnnnnnnnnnnnnnnnnnnnnnnnnnnnnnnnnnnnnnnnnnnnnnnnnnnnnnnnnnnnnnnnnnnnnnnnnnnnnnnnnnnnnnnnnnnnnnnnnnnnnnnnnnnnnnnnnnnnnnnnnnnnnnnnnnnnnnnnnnnnnnnnnnnnnnnnnnnnnnnnnnnnnnnnnnnnnnnnnnnnnnnnnnnnnnnnnnnnnnnnnnnnnnnnnnnnnnnnnnnnnnnnnnnnnnnnnnnnnnnnnnnnnnnnnnnnnnnnnnnnnnnnnnnnnnnnnnnnnnnnnnnnnnnnnnnnnnnnnnnnnnnnnnnnnnnnnnnnnnnnnnnnnnnnnnnnnnnnnnnnnnnnnnnnnnnnnnnnnnnnnnnnnnnnnnnnnnnnnnnnnnnnnnnnnnnnnnnnnnnnnnnnnnnnnnnnnnnnnnnnnnnnnnnnnnnnnnnnnnnnnnnnnnnnnnnnnnnnnnnnnnnnnnnnnnnnnnnnnnnnnnnnnnnnnnnnnnnnnnnnnnnnnnnnnnnnnnnnnnnnnnnnnnnnnnnnnnnnnnnnnnnnnnnnnnnnnnnnnnnnnnnnnnnnnnnnnnnnnnnnnnnnnnnnnnnnnnnnnnnnnnnnnnnnnnnnnnnnnnnnnnnnnnnnnnnnnnnnnnnnnnnnnnnnnnnnnnnnnnnnnnnnnnnnnnnnnnnnnnnnnnnnnnnnnnnnnnnnnnnnnnnnnnnnnnnnnnnnnnnnnnnnnnnnnnnnnnnnnnnnnnnnnnnnnnnnnnnnnnnnnnnnnnnnnnnnnnnnnnnnnnnnnnnnnnnnnnnnnnnnnnnnnnnnnnnnnnnnnnnnnnnnnnnnnnnnnnnnnnnnnnnnnnnnnnnnnnnnnnnnnnnnnnnnnnnnnnnnnnnnnnnnnnnnnnnnnnnnnnnnnnnnnnnnnnnnnnnnnnnnnnnnnnnnnnnnnnnnnnnnnnnnnnnnnnnnnnnnnnnnnnnnnnnnnnnnnnnnnnnnnnnnnnnnnnnnnnnnnnnnnnnnnnnnnnnnnnnnnnnnnnnnnnnnnnnnnnnnnnnnnnnnnnnnnnnnnnnnnnnnnnnnnnnnnnnnnnnnnnnnnnnnnnnnnnnnnnnnnnnnnnnnnnnnnnnnnnnnnnnnnnnnnnnnnnnnnnnnnnnnnnnnnnnnnnnnnnnnnnnnnnnnnnnnnnnnnnnnnnnnnnnnnnnnnnnnnnnnnnnnnnnnnnnnnnnnnnnnnnnnnnnnnnnnnnnnnnnnnnnnnnnnnnnnnnnnnnnnnnnnnnnnnnnnnnnnnnnnnnnnnnnnnnnnnnnnnnnnnnnnnnnnnnnnnnnnnnnnnnnnnnnnnnnnnnnnnnnnnnnnnnnnnnnnnnnnnnnnnnnnnnnnnnnnnnnnnnnnnnnnnnnnnnnnnnnnnnnnnnnnnnnnnnnnnnnnnnnnnnnnnnnnnnnnnnnnnnnnnnnnnnnnnnnnnnnnnnnnnnnnnnnnnnnnnnnnnnnnnnnnnnnnnnnnnnnnnnnnnnnnnnnnnnnnnnnnnnnnnnnnnnnnnnnnnnnnnnnnnnnnnnnnnnnnnnnnnnnnnnnnnnnnnnnnnnnnnnnnnnnnnnnnnnnnnnnnnnnnnnnnnnnnnnnnnnnnnnnnnnnnnnnnnnnnnnnnnnnnnnnnnnnnnnnnnnnnnnnnnnnnnnnnnnnnnnnnnnnnnnnnnnnnnnnnnnnnnnnnnnnnnnnnnnnnnnnnnnnnnnnnnnnnnnnnnnnnnnnnnnnnnnnnnnnnnnnnnnnnnnnnnnnnnnnnnnnnnnnnnnnnnnnnnnnnnnnnnnnnnnnnnnnnnnnnnnnnnnnnnnnnnnnnnnnnnnnnnnnnnnnnnnnnnnnnnnnnnnnnnnnnnnnnnnnnnnnnnnnnnnnnnnnnnnnnnnnnnnnnnnnnnnnnnnnnnnnnnnnnnnnnnnnnnnnnnnnnnnnnnnnnnnnnnnnnnnnnnnnnnnnnnnnnnnnnnnnnnnnnnnnnnnnnnnnnnnnnnnnnnnnnnnnnnnnnnnnnnnnnnnnnnnnnnnnnnnnnnnnnnnnnnnnnnnnnnnnnnnnnnnnnnnnnnnnnnnnnnnnnnnnnnnnnnnnnnnnnnnnnnnnnnnnnnnnnnnnnnnnnnnnnnnnnnnnnnnnnnnnnnnnnnnnnnnnnnnnnnnnnnnnnnnnnnnnnnnnnnnnnnnnnnnnnnnnnnnnnnnnnnnnnnnnnnnnnnnnnnnnnnnnnnnnnnnnnnnnnnnnnnnnnnnnnnnnnnnnnnnnnnnnnnnnnnnnnnnnnnnnnnnnnnnnnnnnnnnnnnnnnnnnnnnnnnnnnnnnnnnnnnnnnnnnnnnnnnnnnnnnnnnnnnnnnnnnnnnnnnnnnnnnnnnnnnnnnnnnnnnnnnnnnnnnnnnnnnnnnnnnnnnnnnnnnnnnnnnnnnnnnnnnnnnnnnnnnnnnnnnnnnnnnnnnnnnnnnnnnnnnnnnnnnnnnnnnnnnnnnnnnnnnnnnnnnnnnnnnnnnnnnnnnnnnnnnnnnnnnnnnnnnnnnnnnnnnnnnnnnnnnnnnnnnnnnnnnnnnnnnnnnnnnnnnnnnnnnnnnnnnnnnnnnnnnnnnnnnnnnnnnnnnnnnnnnnnnnnnnnnnnnnnnnnnnnnnnnnnnnnnnnnnnnnnnnnnnnnnnnnnnnnnnnnnnnnnnnnnnnnnnnnnnnnnnnnnnnnnnnnnnnnnnnnnnnnnnnnnnnnnnnnnnnnnnnnnnnnnnnnnnnnnnnnnnnnnnnnnnnnnnnnnnnnnnnnnnnnnnnnnnnnnnnnnnnnnnnnnnnnnnnnnnnnnnnnnnnnnnnnnnnnnnnnnnnnnnnnnnnnnnnnnnnnnnnnnnnnnnnnnnnnnnnnnnnnnnnnnnnnnnnnnnnnnnnnnnnnnnnnnnnnnnnnnnnnnnnnnnnnnnnnnnnnnnnnnnnnnnnnnnnnnnnnnnnnnnnnnnnnnnnnnnnnnnnnnnnnnnnnnnnnnnnnnnnnnnnnnnnnnnnnnnnnnnnnnnnnnnnnnnnnnnnnnnnnnnnnnnnnnnnnnnnnnnnnnnnnnnnnnnnnnnnnnnnnnnnnnnnnnnnnnnnnnnnnnnnnnnnnnnnnnnnnnnnnnnnnnnnnnnnnnnnnnnnnnnnnnnnnnnnnnnnnnnnnnnnnnnnnnnnnnnnnnnnnnnnnnnnnnnnnnnnnnnnnnnnnnnnnnnnnnnnnnnnnnnnnnnnnnnnnnnnnnnnnnnnnnnnnnnnnnnnnnnnnnnnnnnnnnnnnnnnnnnnnnnnnnnnnnnnnnnnnnnnnnnnnnnnnnnnnnnnnnnnnnnnnnnnnnnnnnnnnnnnnnnnnnnnnnnnnnnnnnnnnnnnnnnnnnnnnnnnnnnnnnnnnnnnnnnnnnnnnnnnnnnnnnnnnnnnnnnnnnnnnnnnnnnnnnnnnnnnnnnnnnnnnnnnnnnnnnnnnnnnnnnnnnnnnnnnnnnnnnnnnnnnnnnnnnnnnnnnnnnnnnnnnnnnnnnnnnnnnnnnnnnnnnnnnnnnnnnnnnnnnnnnnnnnnnnnnnnnnnnnnnnnnnnnnnnnnnnnnnnnnnnnnnnnnnnnnnnnnnnnnnnnnnnnnnnnnnnnnnnnnnnnnnnnnnnnnnnnnnnnnnnnnnnnnnnnnnnnnnnnnnnnnnnnnnnnnnnnnnnnnnnnnnnnnnnnnnnnnnnnnnnnnnnnnnnnnnnnnnnnnnnnnnnnnnnnnnnnnnnnnnnnnnnnnnnnnnnnnnnnnnnnnnnnnnnnnnnnnnnnnnnnnnnnnnnnnnnnnnnnnnnnnnnnnnnnnnnnnnnnnnnnnnnnnnnnnnnnnnnnnnnnnnnnnnnnnnnnnnnnnnnnnnnnnnnnnnnnnnnnnnnnnnnnnnnnnnnnnnnnnnnnnnnnnnnnnnnnnnnnnnnnnnnnnnnnnnnnnnnnnnnnnnnnnnnnnnnnnnnnnnnnnnnnnnnnnnnnnnnnnnnnnnnnnnnnnnnnnnnnnnnnnnnnnnnnnnnnnnnnnnnnnnnnnnnnnnnnnnnnnnnnnnnnnnnnnnnnnnnnnnnnnnnnnnnnnnnnnnnnnnnnnnnnnnnnnnnnnnnnnnnnnnnnnnnnnnnnnnnnnnnnnnnnnnnnnnnnnnnnnnnnnnnnnnnnnnnnnnnnnnnnnnnnnnnnnnnnnnnnnnnnnnnnnnnnnnnnnnnnnnnnnnnnnnnnnnnnnnnnnnnnnnnnnnnnnnnnnnnnnnnnnnnnnnnnnnnnnnnnnnnnnnnnnnnnnnnnnnnnnnnnnnnnnnnnnnnnnnnnnnnnnnnnnnnnnnnnnnnnnnnnnnnnnnnnnnnnnnnnnnnnnnnnnnnnnnnnnnnnnnnnnnnnnnnnnnnnnnnnnnnnnnnnnnnnnnnnnnnnnnnnnnnnnnnnnnnnnnnnnnnnnnnnnnnnnnnnnnnnnnnnnnnnnnnnnnnnnnnnnnnnnnnnnnnnnnnnnnnnnnnnnnnnnnnnnnnnnnnnnnnnnnnnnnnnnnnnnnnnnnnnnnnnnnnnnnnnnnnnnnnnnnnnnnnnnnnnnnnnnnnnnnnnnnnnnnnnnnnnnnnnnnnnnnnnnnnnnnnnnnnnnnnnnnnnnnnnnnnnnnnnnnnnnnnnnnnnnnnnnnnnnnnnnnnnnnnnnnnnnnnnnnnnnnnnnnnnnnnnnnnnnnnnnnnnnnnnnnnnnnnnnnnnnnnnnnnnnnnnnnnnnnnnnnnnnnnnnnnnnnnnnnnnnnnnnnnnnnnnnnnnnnnnnnnnnnnnnnnnnnnnnnnnnnnnnnnnnnnnnnnnnnnnnnnnnnnnnnnnnnnnnnnnnnnnnnnnnnnnnnnnnnnnnnnnnnnnnnnnnnnnnnnnnnnnnnnnnnnnnnnnnnnnnnnnnnnnnnnnnnnnnnnnnnnnnnnnnnnnnnnnnnnnnnnnnnnnnnnnnnnnnnnnnnnnnnnnnnnnnnnnnnnnnnnnnnnnnnnnnnnnnnnnnnnnnnnnnnnnnnnnnnnnnnnnnnnnnnnnnnnnnnnnnnnnnnnnnnnnnnnnnnnnnnnnnnnnnnnnnnnnnnnnnnnnnnnnnnnnnnnnnnnnnnnnnnnnnnnnnnnnnnnnnnnnnnnnnnnnnnnnnnnnnnnnnnnnnnnnnnnnnnnnnnnnnnnnnnnnnnnnnnnnnnnnnnnnnnnnnnnnnnnnnnnnnnnnnnnnnnnnnnnnnnnnnnnnnnnnnnnnnnnnnnnnnnnnnnnnnnnnnnnnnnnnnnnnnnnnnnnnnnnnnnnnnnnnnnnnnnnnnnnnnnnnnnnnnnnnnnnnnnnnnnnnnnnnnnnnnnnnnnnnnnnnnnnnnnnnnnnnnnnnnnnnnnnnnnnnnnnnnnnnnnnnnnnnnnnnnnnnnnnnnnnnnnnnnnnnnnnnnnnnnnnnnnnnnnnnnnnnnnnnnnnnnnnnnnnnnnnnnnnnnnnnnnnnnnnnnnnnnnnnnnnnnnnnnnnnnnnnnnnnnnnnnnnnnnnnnnnnnnnnnnnnnnnnnnnnnnnnnnnnnnnnnnnnnnnnnnnnnnnnnnnnnnnnnnnnnnnnnnnnnnnnnnnnnnnnnnnnnnnnnnnnnnnnnnnnnnnnnnnnnnnnnnnnnnnnnnnnnnnnnnnnnnnnnnnnnnnnnnnnnnnnnnnnnnnnnnnnnnnnnnnnnnnnnnnnnnnnnnnnnnnnnnnnnnnnnnnnnnnnnnnnnnnnnnnnnnnnnnnnnnnnnnnnnnnnnnnnnnnnnnnnnnnnnnnnnnnnnnnnnnnnnnnnnnnnnnnnnnnnnnnnnnnnnnnnnnnnnnnnnnnnnnnnnnnnnnnnnnnnnnnnnnnnnnnnnnnnnnnnnnnnnnnnnnnnnnnnnnnnnnnnnnnnnnnnnnnnnnnnnnnnnnnnnnnnnnnnnnnnnnnnnnnnnnnnnnnnnnnnnnnnnnnnnnnnnnnnnnnnnnnnnnnnnnnnnnnnnnnnnnnnnnnnnnnnnnnnnnnnnnnnnnnnnnnnnnnnnnnnnnnnnnnnnnnnnnnnnnnnnnnnnnnnnnnnnnnnnnnnnnnnnnnnnnnnnnnnnnnnnnnnnnnnnnnnnnnnnnnnnnnnnnnnnnnnnnnnnnnnnnnnnnnnnnnnnnnnnnnnnnnnnnnnnnnnnnnnnnnnnnnnnnnnnnnnnnnnnnnnnnnnnnnnnnnnnnnnnnnnnnnnnnnnnnnnnnnnnnnnnnnnnnnnnnnnnnnnnnnnnnnnnnnnnnnnnnnnnnnnnnnnnnnnnnnnnnnnnnnnnnnnnnnnnnnnnnnnnnnnnnnnnnnnnnnnnnnnnnnnnnnnnnnnnnnnnnnnnnnnnnnnnnnnnnnnnnnnnnnnnnnnnnnnnnnnnnnnnnnnnnnnnnnnnnnnnnnnnnnnnnnnnnnnnnnnnnnnnnnnnnnnnnnnnnnnnnnnnnnnnnnnnnnnnnnnnnnnnnnnnnnnnnnnnnnnnnnnnnnnnnnnnnnnnnnnnnnnnnnnnnnnnnnnnnnnnnnnnnnnnnnnnnnnnnnnnnnnnnnnnnnnnnnnnnnnnnnnnnnnnnnnnnnnnnnnnnnnnnnnnnnnnnnnnnnnnnnnnnnnnnnnnnnnnnnnnnnnnnnnnnnnnnnnnnnnnnnnnnnnnnnnnnnnnnnnnnnnnnnnnnnnnnnnnnnnnnnnnnnnnnnnnnnnnnnnnnnnnnnnnnnnnnnnnnnnnnnnnnnnnnnnnnnnnnnnnnnnnnnnnnnnnnnnnnnnnnnnnnnnnnnnnnnnnnnnnnnnnnnnnnnnnnnnnnnnnnnnnnnnnnnnnnnnnnnnnnnnnnnnnnnnnnnnnnnnnnnnnnnnnnnnnnnnnnnnnnnnnnnnnnnnnnnnnnnnnnnnnnnnnnnnnnnnnnnnnnnnnnnnnnnnnnnnnnnnnnnnnnnnnnnnnnnnnnnnnnnnnnnnnnnnnnnnnnnnnnnnnnnnnnnnnnnnnnnnnnnnnnnnnnnnnnnnnnnnnnnnnnnnnnnnnnnnnnnnnnnnnnnnnnnnnnnnnnnnnnnnnnnnnnnnnnnnnnnnnnnnnnnnnnnnnnnnnnnnnnnnnnnnnnnnnnnnnnnnnnnnnnnnnnnnnnnnnnnnnnnnnnnnnnnnnnnnnnnnnnnnnnnnnnnnnnnnnnnnnnnnnnnnnnnnnnnnnnnnnnnnnnnnnnnnnnnnnnnnnnnnnnnnnnnnnnnnnnnnnnnnnnnnnnnnnnnnnnnnnnnnnnnnnnnnnnnnnnnnnnnnnnnnnnnnnnnnnnnnnnnnnnnnnnnnnnnnnnnnnnnnnnnnnnnnnnnnnnnnnnnnnnnnnnnnnnnnnnnnnnnnnnnnnnnnnnnnnnnnnnnnnnnnnnnnnnnnnnnnnnnnnnnnnnnnnnnnnnnnnnnnnnnnnnnnnnnnnnnnnnnnnnnnnnnnnnnnnnnnnnnnnnnnnnnnnnnnnnnnnnnnnnnnnnnnnnnnnnnnnnnnnnnnnnnnnnnnnnnnnnnnnnnnnnnnnnnnnnnnnnnnnnnnnnnnnnnnnnnnnnnnnnnnnnnnnnnnnnnnnnnnnnnnnnnnnnnnnnnnnnnnnnnnnnnnnnnnnnnnnnnnnnnnnnnnnnnnnnnnnnnnnnnnnnnnnnnnnnnnnnnnnnnnnnnnnnnnnnnnnnnnnnnnnnnnnnnnnnnnnnnnnnnnnnnnnnnnnnnnnnnnnnnnnnnnnnnnnnnnnnnnnnnnnnnnnnnnnnnnnnnnnnnnnnnnnnnnnnnnnnnnnnnnnnnnnnnnnnnnnnnnnnnnnnnnnnnnnnnnnnnnnnnnnnnnnnnnnnnnnnnnnnnnnnnnnnnnnnnnnnnnnnnnnnnnnnnnnnnnnnnnnnnnnnnnnnnnnnnnnnnnnnnnnnnnnnnnnnnnnnnnnnnnnnnnnnnnnnnnnnnnnnnnnnnnnnnnnnnnnnnnnnnnnnnnnnnnnnnnnnnnnnnnnnnnnnnnnnnnnnnnnnnnnnnnnnnnnnnnnnnnnnnnnnnnnnnnnnnnnnnnnnnnnnnnnnnnnnnnnnnnnnnnnnnnnnnnnnnnnnnnnnnnnnnnnnnnnnnnnnnnnnnnnnnnnnnnnnnnnnnnnnnnnnnnnnnnnnnnnnnnnnnnnnnnnnnnnnnnnnnnnnnnnnnnnnnnnnnnnnnnnnnnnnnnnnnnnnnnnnnnnnnnnnnnnnnnnnnnnnnnnnnnnnnnnnnnnnnnnnnnnnnnnnnnnnnnnnnnnnnnnnnnnnnnnnnnnnnnnnnnnnnnnnnnnnnnnnnnnnnnnnnnnnnnnnnnnnnnnnnnnnnnnnnnnnnnnnnnnnnnnnnnnnnnnnnnnnnnnnnnnnnnnnnnnnnnnnnnnnnnnnnnnnnnnnnnnnnnnnnnnnnnnnnnnnnnnnnnnnnnnnnnnnnnnnnnnnnnnnnnnnnnnnnnnnnnnnnnnnnnnnnnnnnnnnnnnnnnnnnnnnnnnnnnnnnnnnnnnnnnnnnnnnnnnnnnnnnnnnnnnnnnnnnnnnnnnnnnnnnnnnnnnnnnnnnnnnnnnnnnnnnnnnnnnnnnnnnnnnnnnnnnnnnnnnnnnnnnnnnnnnnnnnnnnnnnnnnnnnnnnnnnnnnnnnnnnnnnnnnnnnnnnnnnnnnnnnnnnnnnnnnnnnnnnnnnnnnnnnnnnnnnnnnnnnnnnnnnnnnnnnnnnnnnnnnnnnnnnnnnnnnnnnnnnnnnnnnnnnnnnnnnnnnnnnnnnnnnnnnnnnnnnnnnnnnnnnnnnnnnnnnnnnnnnnnnnnnnnnnnnnnnnnnnnnnnnnnnnnnnnnnnnnnnnnnnnnnnnnnnnnnnnnnnnnnnnnnnnnnnnnnnnnnnnnnnnnnnnnnnnnnnnnnnnnnnnnnnnnnnnnnnnnnnnnnnnnnnnnnnnnnnnnnnnnnnnnnnnnnnnnnnnnnnnnnnnnnnnnnnnnnnnnnnnnnnnnnnnnnnnnnnnnnnnnnnnnnnnnnnnnnnnnnnnnnnnnnnnnnnnnnnnnnnnnnnnnnnnnnnnnnnnnnnnnnnnnnnnnnnnnnnnnnnnnnnnnnnnnnnnnnnnnnnnnnnnnnnnnnnnnnnnnnnnnnnnnnnnnnnnnnnnnnnnnnnnnnnnnnnnnnnnnnnnnnnnnnnnnnnnnnnnnnnnnnnnnnnnnnnnnnnnnnnnnnnnnnnnnnnnnnnnnnnnnnnnnnnnnnnnnnnnnnnnnnnnnnnnnnnnnnnnnnnnnnnnnnnnnnnnnnnnnnnnnnnnnnnnnnnnnnnnnnnnnnnnnnnnnnnnnnnnnnnnnnnnnnnnnnnnnnnnnnnnnnnnnnnnnnnnnnnnnnnnnnnnnnnnnnnnnnnnnnnnnnnnnnnnnnnnnnnnnnnnnnnnnnnnnnnnnnnnnnnnnnnnnnnnnnnnnnnnnnnnnnnnnnnnnnnnnnnnnnnnnnnnnnnnnnnnnnnnnnnnnnnnnnnnnnnnnnnnnnnnnnnnnnnnnnnnnnnnnnnnnnnnnnnnnnnnnnnnnnnnnnnnnnnnnnnnnnnnnnnnnnnnnnnnnnnnnnnnnnnnnnnnnnnnnnnnnnnnnnnnnnnnnnnnnnnnnnnnnnnnnnnnnnnnnnnnnnnnnnnnnnnnnnnnnnnnnnnnnnnnnnnnnnnnnnnnnnnnnnnnnnnnnnnnnnnnnnnnnnnnnnnnnnnnnnnnnnnnnnnnnnnnnnnnnnnnnnnnnnnnnnnnnnnnnnnnnnnnnnnnnnnnnnnnnnnnnnnnnnnnnnnnnnnnnnnnnnnnnnnnnnnnnnnnnnnnnnnnnnnnnnnnnnnnnnnnnnnnnnnnnnnnnnnnnnnnnnnnnnnnnnnnnnnnnnnnnnnnnnnnnnnnnnnnnnnnnnnnnnnnnnnnnnnnnnnnnnnnnnnnnnnnnnnnnnnnnnnnnnnnnnnnnnnnnnnnnnnnnnnnnnnnnnnnnnnnnnnnnnnnnnnnnnnnnnnnnnnnnnnnnnnnnnnnnnnnnnnnnnnnnnnnnnnnnnnnnnnnnnnnnnnnnnnnnnnnnnnnnnnnnnnnnnnnnnnnnnnnnnnnnnnnnnnnnnnnnnnnnnnnnnnnnnnnnnnnnnnnnnnnnnnnnnnnnnnnnnnnnnnnnnnnnnnnnnnnnnnnnnnnnnnnnnnnnnnnnnnnnnnnnnnnnnnnnnnnnnnnnnnnnnnnnnnnnnnnnnnnnnnnnnnnnnnnnnnnnnnnnnnnnnnnnnnnnnnnnnnnnnnnnnnnnnnnnnnnnnnnnnnnnnnnnnnnnnnnnnnnnnnnnnnnnnnnnnnnnnnnnnnnnnnnnnnnnnnnnnnnnnnnnnnnnnnnnnnnnnnnnnnnnnnnnnnnnnnnnnnnnnnnnnnnnnnnnnnnnnnnnnnnnnnnnnnnnnnnnnnnnnnnnnnnnnnnnnnnnnnnnnnnnnnnnnnnnnnnnnnnnnnnnnnnnnnnnnnnnnnnnnnnnnnnnnnnnnnnnnnnnnnnnnnnnnnnnnnnnnnnnnnnnnnnnnnnnnnnnnnnnnnnnnnnnnnnnnnnnnnnnnnnnnnnnnnnnnnnnnnnnnnnnnnnnnnnnnnnnnnnnnnnnnnnnnnnnnnnnnnnnnnnnnnnnnnnnnnnnnnnnnnnnnnnnnnnnnnnnnnnnnnnnnnnnnnnnnnnnnnnnnnnnnnnnnnnnnnnnnnnnnnnnnnnnnnnnnnnnnnnnnnnnnnnnnnnnnnnnnnnnnnnnnnnnnnnnnnnnnnnnnnnnnnnnnnnnnnnnnnnnnnnnnnnnnnnnnnnnnnnnnnnnnnnnnnnnnnnnnnnnnnnnnnnnnnnnnnnnnnnnnnnnnnnnnnnnnnnnnnnnnnnnnnnnnnnnnnnnnnnnnnnnnnnnnnnnnnnnnnnnnnnnnnnnnnnnnnnnnnnnnnnnnnnnnnnnnnnnnnnnnnnnnnnnnnnnnnnnnnnnnnnnnnnnnnnnnnnnnnnnnnnnnnnnnnnnnnnnnnnnnnnnnnnnnnnnnnnnnnnnnnnnnnnnnnnnnnnnnnnnnnnnnnnnnnnnnnnnnnnnnnnnnnnnnnnnnnnnnnnnnnnnnnnnnnnnnnnnnnnnnnnnnnnnnnnnnnnnnnnnnnnnnnnnnnnnnnnnnnnnnnnnnnnnnnnnnnnnnnnnnnnnnnnnnnnnnnnnnnnnnnnnnnnnnnnnnnnnnnnnnnnnnnnnnnnnnnnnnnnnnnnnnnnnnnnnnnnnnnnnnnnnnnnnnnnnnnnnnnnnnnnnnnnnnnnnnnnnnnnnnnnnnnnnnnnnnnnnnnnnnnnnnnnnnnnnnnnnnnnnnnnnnnnnnnnnnnnnnnnnnnnnnnnnnnnnnnnnnnnnnnnnnnnnnnnnnnnnnnnnnnnnnnnnnnnnnnnnnnnnnnnnnnnnnnnnnnnnnnnnnnnnnnnnnnnnnnnnnnnnnnnnnnnnnnnnnnnnnnnnnnnnnnnnnnnnnnnnnnnnnnnnnnnnnnnngcccgggggggggtgcccgccgccccgccgctgctctgcggcggcaaccggggacgctggaccctccggcggcgacaagtcacgggagcggaaggcgcaaagcgcccatcaactcaccagaaagaaaccgttcaaaaccgatcggacgagagaagatacaaaggcgtttgcatgacctgcaagcatcgcgagacctgcgaacgatcgacgattcaagatggcgtctggcattgcgacaaatacgaatgataccgacttgggctattgacgatgtattcacgattcatccagcacagacgacttcagaaacacacgggtcaacccgatcccgccagacggacccgctcgacaatcggccaatggatcgttctctcgctgatcggattttgggggagtatggcgtcggtcgtccccgcatacggcggacaacccatcgacttgacgctcgccgacgccatctccctggctttacaggaaaaccgcacgctgcaggcctcgcaggcggacgtggaggccgcggcggccgaccggcgggcggctttagggcgtttcgggccggtgctgaagatggaaggcaacctgctgcaatggaacgacgcccatgaaatcgacgttttcgactatctcgagctgccgccgacggcggcggagatcgtggatttcatggtcggcccgatggaccccatcgccttgcgcgaggaccgcacgcacagtctgtccttaacggcaattcaaccgctgacgccgatgttttccgtctatcagggctaccgggcgcgccgggccggcgaaaacgccgcccaggccctggaaagccggacgcggcaggacgtgacctacaaggtggtcgaagcctattaccggctgctgtcggtggggcaactgcgccaggtcgcacaggcggcgacggacaccatcgccgcgcatgtggagcaggcgcgggacttcgaggccgagggattcatcgaccgcagccaggtgctgacggccgaggtggaattatcgaactcccaacagaacctgctgcgggccgaaacgggcgaggcactggcccgggcggcgctggcgcaactggtggggctgccgctggacgcggagatccgggccgcggcggacctgccggcgccgggcgatccgacgccgccggagttggccgccgcccggcgggaagcactgtataaccgcgaagacttacaggctctgggttggaagatcgaggccttgcgggcgctggaagacctgggggggtggcagatggtgccgacgctggccctggtcgggcggtacgaatggagcgaggggatcattctgtatccggaagaggaaagcttcatcggcctgacgctggaatggaacttctgggagtggggccgtaaatacaacgaggcccaggctgcccgggcgcgggcgcgtggcgcggcgctgcaacacgcggaagcaaccgaactgattcaattgcaggtgcagcaaaagcgacaggagttgcaatgcgccggggcgcggcagcgcgtggccgagatcgcggtatcgcaggccgaggagaatctgcggctgaagcaactccgttttgccgagaatctggcgacctcgctggaagtgctggacgcgcaaaccttgctgaccaaggcgcacagcgaccggattcaggcgcggttcgaggtgctggtgggccaggccgccctgcggctggccatgggacaggatcccgccggcggtgaagggagcgaaggcgaatgaacacgaggatggcatggggcatattgctggcggcttttctgccggcgttgttcggttgcggcggccgggagcaggccacgacattgaccggcctgatggacgcggtggagatcgacgtggcctcgaagataccgggccggatcaaggaactgcacgtggacgagggcgaccgggtggaggcgggacaagcgctggcggagatcaccagcgatgaaatcgcggcgaagctggagcaggtcgacgccatcaccgaggcggccaaggccaagctgaaaatggccaacaagggggcgcgcgaggagcagatccgggcggccaagcggcagatgatggccgcggagcaccaggtggaaatcacggccaagatgaagcagcggctggccaatctcttggaaaagaaggcggtgccccaagcgcagtacgacgaggtggaattcaagcacaacgtctcgcaagagcagtacgaaatggccaaggcgcaatacgaggcgtacgtcaacggggcgcgggacgaggagatcgaagccttgacggcgctggtgcggcaggctgagggcgccaaggccgaggtggaaagctaccagcgcgagacgacgcaaaaagcaccggtcgccggcgagatttccaaggtggtgctgcacgagggcgagctggccgcgacgggtttcccgattctgacgatcgtcgatctggaaaatcagtgggcgagtttttcggtgcgcgaagacctgttgccggggattcacaaagggcaacgcatccaggtcaccgttccggcgctggaccggacgctggaactggaaatttaccacatcgcgccgatggccgatttcgccacttggcgggcgacggccgagcggaacagctacgatctgaagaccttcgaggtcaaagcccggccgaccgagccgacgacggacttgcggccggggatgacggtgcgctggaccctggagtaagggccgatgcgccgccgcccgccatcgccgctgcgcctggccggagaggtggggcgcggctttctggcgcaggcccggctgctggcccggccgcgctacctgctgatgaccgccttgctgctggcgatgtcctggctggcgatggaggtttaccataaccaggcgatccgcggtctgccggtgctggtgatcgaccgggacaactcgaaaatcagccggacgatccgctcgtttctccacgcctgcccggaaatcgacaccctggaccaaccggacgcgacccgggaagaagggcagcggctgctggccgcgggccggatcgccggcctggtgtacctgccggagaatctttcctcggaaatcaagcaagggcggcgcggcacggccctgatcgaactggacatgagcaacatcgtgatggggaaaaacgcctacaaggccgtttcccaggttctgacgaccgtggcggtgggcacccagatgacggtggtccggaagttaggcgagaacaagagccgcgccatggccaaggtgctgccgattcgggtcagcgaatcgttcgcctacaatccggcgacgaattacggcatttacgtgatgcccggcctgatctttttcttcctgcacgtttacgtgctgattctgggcgtcaccgcctatctgccgatccatccggccgatgactggaaaaaacgtctgggcgcgtttttggcgattctgccggcgggaatgctgctcggactgaccttcttctacggctttctgccttacgagaatctggctccggccagcggaccgggggtcgccgtcgtcgcgctggcggcgtttatcgtgctggatttgctgatggcggcggcattcaacgcggtgattccccgcccgatcttcgccttcgaggcgacggtggtggtgggaatgctgtcactgatgttttcggggatcacctggccgccggacgcgtttccggcggcgatccgtctgatcggcgcctggattccgttcaccgccttcgcacagggattccaggcgttcatccacgcccccacccgcctgagcgaactgggattcatgttccacgccttgggccggcaagcgctgctgttcggcggagtgatcgcggcgggcgccgcggcgcggcggatcatcgtcgcggcgaggcgggcatgaagcggcggacgaccggccggcgacgggcggcgcggctgcggcgccgggttggcgcctggctccgggcgttcggcggggcgatgctggacgaatggcgttttgtggggaagcaacgggtggtgctggtgatcctgatggcgctgcccctgctctatccgacggtgatttcctatctgtattacgaggatcaggcgaccgagcggccgctggtgctggtggacgaagacaactccggcctgtcgcgccgcctgacgcgggcgctgcacgccacgcagggagtggagatcatcgcccgggagacctcgccggccgcggcgcggcaagcgttgcaggcccgtcaggccgaaggggcgatcatcattcccgcggatttttcgacacgcctcaaacaagggtcgaccgccgccgtgaagctttggctgaacacggccaacatgtacacctactccgtatcctatacggccgtggtggcggcggcgaccactctgaacggcgagatcggcgcacggtactttttcagcaagggcatgccgacgtctctggcgtcgcagcgtgtgtttccgatcaaccaggacgtccgctaccttttccatcccaccgccagctacggcaacttcctggtgcccggtatactgatcatcgtgctgcaacaactgatgttgatcggattatgcttttcggtgggtttgcgtcgcgagttgggcctggaggacgcgggcgaccggcggccgttcaccagcctgctggcccggttcagcgcgcagggggtgttttacctgggcgcgatgctgctgatggtgtttttcgacattccgctgttcggctggtcggtgcggaacgcgggcgttctgctgctggtgttcatcggcttttccctggcgatggcgccgctggtgatgctcacggcgcatttctgccgggatcgctacatcgcctttcaactgctgatgttcgtctcgacgccgctgttcatggtgtcgggtttcgtctggccgtcgtcgcagatgccggggtacatccaggcgctggccaaattggcgccggccacgccggcgctggcggcgctgcggaccgtcacgatgaaaagcccggagatcggggccgtagcgcccgatctgctgcggctgctggtcttgacgacggcctatttcacgctggccgtgccgctggtgcgctggacgcacttccgccggcaacggtcgctccaaccatcacttcgggaattctgacggctcgacggtcacctcatcgaccgcgatgaggggcacgttctcgccgccggtctcggcgagacgaagcagcacgcccttgagctgcagccggaccggcgcgaagggcgcgccctgctcggcgaagcggccgccgcagttttccggaatcagcagaaacgccttgattttctggccgtcgatgccgctgtcgtaaaggacctggaaagaaccggcgcggccgcgggatttctcggccggagtcaggatttcccgggcggcgaggtcggcggcgactttccccaggtaatgcaattcggcgccgacgctgattttgccgcccgcgtaccgttcggcctcggcgcgcaaggcttccagggattcgacgcgccggtaatcttccgcccgcgcataaacggtaaggagaaaaaacacagtcagcgtcgtgaccagcgccgatttttttttatcgttcacccttttttcccaacgcaacgaagacgctccgagggtaaggaaagcggcggggaaagtcaatttatcggcggagcaagcgggaaacgcgcctcgaaccaggcagcgaggcgggccgcgcacatccggtggccggcctcgttccagtggacgccgtcggcgccgcgcatcgtttcgccggagcgttcggcctcgaacacggcgcgaccgacgtcgtcgagcaagggcaggccggcctcgcgcgccagttgtcgccaggcttcgtcatagggccggtcgtcgtccacgacaaacaggaccaattgccccggagcgcaacgctccttcatcatgtccagcaagcgcgccgtgatgaccagggattccctgaagagcggatgggccaggccgtcgcgccggatggcgttttcgagttggggtctttttcgggcataaagcaggcgatcggcgcgcgagagcagatagtagaggaagcgggaatgatcgaaagccagcccgtacacccggcgcagatgccggcggggtacgcgttgaatgatccggccgtcgagcgtcaggaagggacggcgcttgttgttgttgtttttgatgctgcgcacttccagctcgtaatgattgttgatcaggtcgttgcctgaggtctggagcagcaccacgtcgggccggaggcgttcgacgtggcggtcgaggatcatccattcctgcaacgtgccgtagccgagggcgccgtaggcgaagacttccgcccggcccgcccagcgtgcggcgagtaatccggcgtaggttttatcgtcggagacctcggcggcgtgggtgaaggaatcgccgatgacgagcacccgcagccgtccagcggcttgcggatcgccggcccggcggaagccgtgggcgtcggtggagaaatcgacgggataggcgacgccggcggcgtcggttttcattttttggaagcggacgttttcccgggcgcgccagccgagatcggcatccgggacgatcaggagggaatcggggctggtcagcaagaggcgcagaacgatttccccggcgacaaagagaaacgccgcgaagagcagcaaggcgacgagcgtatagagaagtcggcgttttctggtcatgggcttcttttaccggagtggtagtccggggtaaagccattttcccagccgagggcggctgggccacatgcagcttttatcccagccgagggcggccgggccacattgcactcagaaataagtgtaggagaaggtgcccatccagagaaaggtgtcgtcgtagagggggtcttccttgaagttgtacttggcgccgagggagacgttgaagtggctggtgacgccgcgcagactgagcagcacggagttgatatcctgctcgttggtagtgccgcgcatcagttcgccctcgtattcgagcatcagttcgacgaaattacggggatggaggggaaaaatgacgccggcgtgcaccaggccgctcttttcctcgtaggcgcggtcgtcgacgcccacatcgcgaaagaccatggtgccgtcggccatgatggcgaaggcgtagtcggtaaaggccaggtcgttcagttccagccccatggcgagcatcaccttgaaaccgtagtacttgacgtcgccggtgcggtattccgtcgtttcctcgcggccgcccgagtatttttcctcgacgtcgcgggtgtattcaccggtcggcgcgatgccgcccagggcgacggcgaaggccggcagaaaatttttctgcttgaggaacccccatttgaaggttccctcgaggccgccgaggttggacatatcctgggtgtcgaaattgcggaccttggcgcccacgaggttgaagtggcttttaactttcaggttggtcatgacccagggaaccttcagggcgaactccaaaccgcccggaatgccgacattgaagaggaaggaatactcgcggcggtagtattccggcacgtcgctgtcctcccagagggcggcggcgccgacttcgaaggagccgggttccagagtatgggtggacgaagtgaccatcatgccggaaaggccgtagatattaaaaggcaaattattgattttgggtttgggcgcggcgatctgcccctgcaagacgtcttcaggaaccttatcgaattcctgctgggcccaacccggacaggcgagaaagataaaacaaagcgtgattagaatatacttagcactatggaacattaaggctccattcctcaccagccgactgtggcgctatcttggcacgtccggggcgcgaccgtcaacaggctcttccacccgggttgccggccggccgacggcggtcatttggtccaataaatcgcggacttcgccttccgcaccccgctcagccagttcgatcagtcgttgcaggctcgcctgaaagttcaggggcaaatcgcgcggtttgtcgaggcgccggattttttcatgggcggtgtcggcgatgccctccgcctcatcccagagttcctcgcgcagtttttcgccgggacgcagtccgacaaacttgatttcgatgtctcgctccggctcgaatccggaaagccggatgaggttgcgggccaggtcgaggatgcgcacgggttcgcccatttccagcacgaagatttccccgccgtcgcccatggccgcggcctgcatgaccagctcgaccgcttcgggaatcgtcataaaatacctggtcatttcagggtgggtgacggtgaccggcccgccgtcggtgatctggcgacgaaagagcggaatgacgctgccctcactggccagaacgttgccgaagcgcaccgagagaaagcgggttttatcctgccggcgggcgaggtccagcacgacccactcggccaggcgcttggtgcgtcccatgacgctcagcggccggacggccttatcggtggagatcaggacgaacttggcgacgccggtggcgacggcagtttcggccagaacgcgggtggcgcggacgttgttgatggttgcggcgacggcattggattccatcagcggcacatgcttataggcggcggcgtgcagcacgatgtccggccgttcgttggccagcaggtttcggaccaggagcggatcgccgacgtcgccgaccacgggcaataccgggatggagggccagcggtgattcaactcccaattaataaagaaaaggctgttctcgttgcgctccaggagaatcaggcgggaggggaacagcgaggcggtctggcgggccagttcgctgccgatgctgccgccggcgccggtgatcaaaacccggcggcccgaaaaagcgccgcggatgagttcctcgtccaggtggacggcctggcggcccaggaggtcctcgacgtccacatcgcgcagttgcttgatcgaaacctgaccgtcgaggatgtcgccggcggcggggaccatgcgaaagcgcacgccggtatcccggaagcggtcgagcagatcgcgtaagtcgcggggccggagggcgcgggaggcgatgatgatctcatcgatgccgtgccgcagcatgatctggcccagttcggcgcggccgcccagcacggggacgccgtgaattttaaaacccttcttggccgagaaatcgtcgatgaagccgaccacctgcatattgagccggggattgccgcggatctgcttgagcagttcgacgcccatttcgcgggcgccgtaaatcaacacgtggcggcgcaggctgcgcggcggcaacttgctcttttcgcggaaagcgcgcaggaaaaagcgcacgccgccgagaaaagagatgcagatgaaggcgtcgatcaggaaaaccgaacgcgggaaacgggtgtagaaaacgaacatcaccagcatgatgaagacgagcgtgctgaccgccaccgccttgatgatgccgagcatgtcttccatgccgaagtaccgccaccaaccgcggtagagatcccagaaatagaaggcgacggcgcgcagcagcaggatcagcggcagggttttgagcatggtgtgcaagggccaactgttttcgacggtcagatcgaattcgaagcgcaggaggaaggaaagaacgtaggaaacgatgaccagggcgagctggctgaagatcgtcagcttacgccggtgacgcagcagccaggccccaaaaggggtgtcgaaaaaatggttgtcgaccggcagttccttttcgctcaccgacttcctctccttccgggcgggtatcatagaccaaccgggccggttcgcgccacctccccgacgaggccccagactggtcattgccgtcgtggtcggtataatggcggcgatttatcacggaggaaaaaagatgacgacagcggaaagcaacctggccgtctttatcgactttgaaaatctggcgctgggtttcaaggacaagaaaagcaagttcgaaatcaacaaagtgctggaacggctggtggaaaagggcaagatcgtcgccaagaccgcttatgccgactggcaccgttacgacgactataaaaagcaactgcacgaggcggctatcgccctgatcgagattccccgccgggcgatgaccggcaagaacagcgccgacatccggttggtcgtggacgcgatggacctgtgttattcgaaagatcacatcgacacctttgtgatcgtctcgggcgacagcgatttttcgccgctggtttccaagctcaaggagaacggcaagcgggtgatcggcgtggggatgaaagactcgacctcgaacctgctggccgacaactgcgacgaattcatttattacgaggacttgatccggcccgacacgaagaaggatgttttggacaaacggattcccgagaagaaacgcgaggccttcgaactgatgatcgcctcgatcaccgcgctggtccgtgaaaacaaggaaatcctctggagcagcatggtgaaagacacgatgaagcgcaaaaagcccagtttcgacgaatcctattacggctaccgcaccttttccgaattactggaagacgcccagagccacgacatcatccgcctgaaaaccgacccgcgcagcggcacctatgtcattgtcggcctcggttcccgggccagcgtcaacggcggttgatgttttcaaccttttcgtcggagatccttttctttcccgtgtggcggcgacacccttgccgtccgatacaaggttttcgccgtcatctttatctccaagcgggcgcccagccggacacactatagaaaaagggcggccttgagcgggccgcccttgttgtggaacagtctcagcagcgattattcaccgcaattgtcggcgaaacactgggattcgcatgcctggaaaatatccaccgtgcattcgttgtcctgcatcatgcaggtctgaacgcaatccattaatgcatcgacatcgccggcgcaggcagccacgaaaccgttgtcctcggccaggcactcttccatcgaagcatagtatcccggatcgcaggtattcacgacgtagtcgcaaatatcgttttcgagggtggagccgttgtcgtcgtcatcggccgcgtcatcgtcgtcggccgcatcgtcgttatcattgtcatcatcgtcgtcatcgtcatcgccgcaagcaatgccgatcgccaaggcaaaggcgaccaacagggcgataattgcataccatttcatcgatttcattagtaaagcctcctgtagtcttgattattcggtttcttggaatgaaagaacacattaccccgcagggttaaaggctttgtaatggtttttcatttaagaatcaagtcatttggctgcgactacgtctcaatataagatataaaatcattccactcaggaggcagataccggcgatcggccccatcaggcgcaccgctagtaggtcgagtttaccccgggaaagttccgccaggactccagccagcaggatcgccaccccgttcattccttgaatgaccaaattatagacgccgaagtaaaggccgatggaaccgccgccggtctcccgggcgcaagcgatgatcgcctcgccctccaagccaagaaaaatcgccaccatcggcccgcctaaggcaaaaaggagcatcgccggtccggaaccacggtcgtcgccaagcagggcggtcagcgcatacaccacggccaaggatacggcggcgccgacaacggcgcgctcccacccccacctggccgagattttcggagccagcaggaaacaagggatcgccacgaccagcaacggtcccaacagcaacgccaccagttccttatcaccgcccagcagatccaccgcgataaacggcgcggcggccgtcatgatggtgaaagacatctgcgatccggaaaacaacaggaccatggcgagaaaacgccggtgtttcaatactattctcagcgattggccgacagaaaggctttcggatgccgtagcctgtcgttttgctccaactcgatccggagcggcatagtagggtaaaatcatcagaatcaaggccggcaccgccagataaacggcagcccggaaaaagccccatctctgcaccagcaacggactgaccacaaacgccaggcccgtggccagcaataaaccggcgcccaggatgttcgacagcgaacgacgcaacttgtcgttatcattggaataatcgtcgataaggctccaataggggaccgcgtacatcgtgtaaccgacgacaaaaacaaacatgcccccgctcaacagcaaccagcgtaaactccgcgacatctccggcgaaggcaaaaaacacaacaacaatcccaacgaagggataaaaaaggagaaccacagcagactttgccgtcgatgcccgcgccgcacccagccgtcgctgaccatcccggcaaccgggtcggttgctccgtcgaagatgcgaaagaccagcaacaacgccccgaccgcagccgcagaaaacaaagttgctcggccggcgccggtcgagtccggaatttccgtggcggcaaaggcgatgatccattggtaaaaatagcgcaccagagccatgatgccgatctggccgcacaaataaaagaagcgtttcttgagattcaatcacctttccccggtctgacttccgcaggagcttattaaatagcgagggctcccacaatcgggagccctctgcgtttcacacattgaataggatggttcgcgtctatttctcgtccagcacgacaaattcgacgcgacggttcattttccgcccttcggcggtgttgttgctggcgatcggctgggtttcgccgaagcctttggcaatcagggcgtcttccggaatgcccttggaaatcaagtattggcgaaccgaatcggcccgttgctgggacagcaccaggttcttttggtcattcccgtcggaggaggcgtgcccttcgacgcgtactttcttgatttcgtactctttaatggcctgcgccacctgatcgagcaattcgaagctttcgggcaagatcaccgcgctgccgacccggaattggaccacttctttaatcaggatcttttccccggtcacttgcaccttggtgtattccgggcagcctttgttggctttggttcccggctggttcggacattcatcctgcaagtcgaggacgccgtcgccgtctttgtcgccgtccgggcagcctttcaactgctgcaggccgggttcgttgggacacttgtcgtttttgtccaagacgccgtcgccatcgttatccaactcggggcagccgtccttgtccttgtaattgtcgaaatcctcgggttgattcgggcactgatcgacgtcgtcgttgatcccgtcgccgtccgaatccttaacctcttcaaccttcttttccttctttccgcaaatcggctcggggaagtatttcaggccggcttccacccgatagtccgggctgccgtaaccattggtgatgcccgcgccgccgccggcgtgcaccgcaattcctttccagatgtgcacttccgctccggccaggaattcgatcgggtttttggtttcacgactccaaggctctttcagaatcgtgcggttatccagttcggcaaacaccttgtaacagggcgttccgaccactttccacgccagaccgagccggtggtccaactcatccttgatcttgtgctcgttcaaccggcgggtctcatcccgaaggatgaagtccaggttataggccaggatgaagtattcccattccacatcgacgattacgcccgggaaaaaggttaacccaccatcgctggttaagctgtccggtccgaaaacggggacgtccatgccggctttgagcgccacgcccaggatgtcctcattccgtttcaggaagctgtatttcagaaagaattgccagtcatcccatgcctgtgcgcgcattttagggatgaattggttgatttcctgttcgatataagcagggcctttaatcgacaggtccagggaatccaggatgccgaaagccgcgtaaaggttctgatcccatcggttgttgaccatatccatgaccgaatcctggtcttcggcccacatcagcggcttgttcatgaacacggagtagaaacccacgccgtatttcagttgacccaggttcgtcgttccccacacggagccgaagccggaattatccaggttctgatgccagagttgaatgtccatgccgacgtgatcggaataggcccaggtgacggcaaccggcagaaggatcagcaacgcaaccaacggcaaagcgcggcgcaacgccttttcgcgtttgcgcagcaggaacacgccgcccagcataccgagcatcagccagaaggacatgccgccctcgccgttctcggccacgctgcatccgccgccgccgccggtttcttctttatgcccgctgccgcagccgggatcgtcgtcttcctcgtcctcgccgccgctcggcgtcggggtcggcgacgggctatagtcgtcatcaccgccgggcgtcgagtcgtcgtcgccgggagtcacgtcgtcgttgtcgttattgtcatcatcgttgtcatcgttgtcgtcgttgtcgttgttgtcgttatcgtcatcatcgttgtcatcattatcatcatcgtcatcgtcatcggcgcagggatccggagcattcgcaaagctatcggtttccaaaccggtcgcatcgcggcctccggcgatgaacagaccatactcatcatcaccaccgcccgcggcgcggaaagtcgcgccaggcaagctgattccgcaatcggaccacagatcggccacgggatcgtagacatagcaggcatcagtcggcgtatccgtgctgccatcgacgccgccgtaaacaaacagtttaccgcaagccaccgtatagccggcgccccacaacggcagcggcatggcggccagcgtcgaatcccatgtcccggccgcgatgtcgtacgcgtccatcgtcgccgtggccgtggcggtcccatcgaaaccgcccgccacatagaatgtgccgtcaatgacgccgcccgccgaccacatccggccgatcggggccgccgtcagggcggtccaggcatcggccacgggatcgtaggaagcgaagttggtctggccgttgggccagatattcggcgttgtgccgcccatacggtacaacagcgttccgtctgtcgccgtcacgtagccgcccgaatcgttcaaggcatccgcgcccgtggtccaggaatcggttcccggatcgtaaatttggaccgcgttgatgacgacgccggccgtatccaggtcatgaccgccggggaaatagagctttccgtcgatggccacgcctccggtcacgtaaagattcacactcggtccgatgccggtgccccaggtgccggcgacggtgtcatagatgtacagattggtgttcggcgtccagtaccaggaatccgtggcgccgaaggccaggtagtattttccgtcaaagaaaaagccggcatggtcgaagaccgtcgtcgggatgttcggcaggacgttgaatcgtttgatcgccgtcgtggtcagcagcagttcatcgacgtagccgcccgtcgaagccgtcaccccggcggtatcggtgtcgccgcccatggcggtttcgggaaccgcaacggtgacttcaaaatccccggcggcgccgttggccacctcgatttcagcgggtcccgtcgtcggccagtcgaaaccggagtaggtcaggccgatgatggctttggagccggaattgttgaagaccgagagttcatagacgacatcggagccggccaaacccgaggcggcgacaacgccccccagataaatgcccggttcgttcgaatcaccgctgagcgtaatgtcgtcgattccccaataccaattccagcccccggctacgtatgtgaagcggaacatgacattggattgtccgttcagcgccggcagttcgtaaacttcgacgtttccttccacacttgcttcccacccctgcaccggaacccagttcacgccctcgtcgatcgagtagtgaacccaggccgtatcgccgctcaaaacacgaaagtaatggctgaagctcaattcaatgttgatgtaatccgagcaattgatcggctcggtgatcaatgaggtgttcatcgtggtgccgctgccgcaggcgtcggaattagcctcgacataatattcatcaccgaagtaagccaacggcagagtgccagttccggggctggtccagacgcaatcccctccgttgttcacattcgtccaatcctcaggaatgccggcactgaaatcttcagtgaagaaatccaccgcccaggccggtgaaatccaaagcgacacgagtaccaagaacaaggcaaattttttcattcttttcctcctggaatgatttccttcgttgtcgatcctcaacgagttttattcgtgagggtgcttttcacaatttttgtctcgataaagcctgtaatcaccacaagttgcaccctattatttttctataacacccttaagtctggcattacaatagaatctcttttactcaaatgtcaagtagagtttcaattttccacgacctgggaggacgaggaaattcagcgtttttgaatgtcccttcaagcaaaatcaagcttggcggctcattcgttagatgttaatgtacactgcttttcgaggatcaacagttacaaggacaatccatgaaacggcttcctttcttcctcctgctggtctttttgaccttcattccactgtcggccgcggcgtttacgctgctggacatgcaaccccaatacgatcgttacgtggttcatcccaacgaaccgctgaccctggtgttcgacgcttcgttggacgcgaccacggttgccgcggacagcgtgaccgtcgccaacctgctcagcggcgaggccgtgccgggaacgattgcgctggccgccaccaaccaggccgacgacacgctgattttcacgccgaccgcgggtgttttcccctttggtcgccggttgcaggtcggcctcaatgaatcgttgctcgacctgggcggcgccggcttcaccggcgagttgccctccgggggcgtcttcgtcgccaacattcccaacgacctggacgtcgtggcggattatctggaacaatgcgcctcgtactacggttttgatccgaccgatccggaaaacacgaatcccgaggaatattatcgcattccgggcatgtcggtgaccgaagcctggaaaatgacgaccggcgatccgagcgtattgattgccgtcatcgacgtgggcaacgagggcttcgccaacactgaatttgcggaaaacgtctttttcaatcgcggcgaagtccggcagccgcaggacgcgggcggcctgtgcccggactgggactgcaacggcgacggccgcttcaattatctggactatataaacgatccccggtttgcggatttcaatgaaaacggctggatcgatccggatgacgtcttcaccgccttcaccgacggcgtggacgacgacaacaacggcttcatcgacgacatcagcggctgggactttttccgcaacgtcaacaaaccgttgggcgttgaggaattccccgaggggacgcacggcgacggcatcggccgcggcgcggcgggtctggcgaacaacggccaaggcactccgccgggggtctgccccgattgctcgctgatgtggattcgcgtcggcgacgcggtggtcaccgagggcaatctgatggccgccggcatcgaatacgcgaccatgttgggcgtagacgtggtggccatcgccaacggcatgtacaactacagcagcctggcgcaacaaaaattcgtcgaggcttacgaagcgggcgtcttcgtggtggccgcctcgggcgacgagttgggcatgcaccaggtgtatccggcggtgggcgacgacgtgtacagcgtcaaggcggttctgcccttcgccccgatcgaacttttcgggccgatcgacctgtcgttgatcgccttcaccgaaagctactgcacgaactacggagcttccgtcgaagtatccatttcctccgaccaatgcacttccaccgctacgtcgtacggcgccggcttggccggcctcatcctttcctgggcgcggcagcaaggcgacgacctgacacccggcgagatcaaacaactgctcaatatgaccgtggacgacatcaagtcgcgttgcttttcctttaacctgggcggctgcaaggaaggcttcgaccagaacttcggttacggccgcgtcaacctcgaacgggcgctgcaagcgatcggcgacccgctgttcggcctgcccgaacgcattccgcccgtcgtgcgcgtcaccagccccgcgtggtgggcgacgatggatcccctgcaacaaccaaccttcgacgtcgaggcgcagatcgacgcccgcggccggtcttatgaatggaccgtggaactgggtttgggcgtcgaacccgatgacgacgagttcttcgccgtgacctccggcagttccacgacagcgacggacggcgttttggcgacgatcagtccgctggattacgtggatgaggaatggctgcgccgcgatccgaccgacaagaacgactttaccgtaaccctgcgggtgcgcgcctggtgggaagcggacggcgaagaggtgctcggcgaagcccgcaaagccatcgcctggcacaccgacgatcaggaagggaccggcctgctgcccgggttcccgctggatctgggagcctcgggcgaatcgagcccggtgctctacgatctggacggcgacctggacaacgcgctggaaatcatcgccgcctcatcctggccgcgggtggaagtgttcaaacgcgatccggacaccggcatgtaccagccggcgcccggtttcccggttgatttggacgccgaccgcttgtttcccgattcggtgttggcttcggtggcagtcggtccgttattcggcgacggcgtgccctacatcatcgtggccggctactacggccgggtatacgccattcaccccgacggcaacctgcacgatggcggtcccttcctggagggctttccggtcgacaccgatgtcctggataactccacgccgttgagctacgggcacggcaacgcctattgggcaagtccggtgctcgtcgatctggatatggacgggcagttggaaatcgtcgccgcctccgccgaccaaaaggcttacgcctggaaaccggtcgacgaggatcaggacggctccgccgaccggctggccggctggccggtgccgttggattccagcgccgaagccggtctggttccctatttcgacagttgcgaggacagcggtccggccccggtgatgggcacgccggtggccggcattctggatccgactcaccagaacgccgacatcgccggacaccccgcgatcatcgtggccagcagcgagacgtgcaacgaaggtttactgcccaccggccgcgtctatgccatctattggaacggtttggaaaatgccgccggccccttcctccccggctggcccgcccagccgttggcgccgctgggcgacgcgctgccgattccgccgctgacgatcggcatgacctcctctccggcggcgatcatctacgacgaacaattgatggtcggcaccggcgcgtttttctggttcccgcagttgatcacctgggacggcgcggaaacgaaaatccgtcacctgaaatccaagctcaacctcggcagttcggccgccggagccttcgcccgtttcgacggttccgacataccctggtacttcttccccagcgtcggatttctgcaactggacgggaaggccgtcggaccggccctggaagccttcaacatcaccggctggaagctcagtgagttgaacgacgggcccgccctgcggcttcgactggacgacatcaacttcttcatcaatccgatcgtggccgatctcgacggcgatgccctgccggaaatgatggccgggagcggcggttatcggctgcacgcggtcaattaccgtaaggaacaaccggccgattggccgaaattcactcattcctggcaaaccggcacccccgccatcggcgatgtggacggcgacggcctccatgaagtggtgtccttcacgcacaacggcaagcttttcgcctgggaaacaaccgggaaatcgtgcttttacgacggtcccaacggcgattggcccaagtaccaccacgacgcccacaactccggtttttacggtttggacgccacgccgccgggattgaccaccgacctgaccgtttacttcaccgatgttgcggacgttttcgaagtgactttcaccgcgcccggcgatgacggcgcctgcggcacgccggacggctacgacctgcgctacacgaccgatccgagcgccgatctacgcgatccggacgtctggcagtcggccgccgcgctgaccaccggcgcgccggaagtcggcggaatgccgatgagctttaccgtcacggcgcccagcgccgcgctcttcgcgctgcgcacttacgacgaggtcggaatgatgtcctacatttcgaacgccgccgccccgaccgaaccgggcgccgatgacgacgatgccgcggacgacgacgatgccgccgccgatgatgacgacgacgacaccgtggcgccggccccctccggcgacgacgatgacgacgatgaagggtgcggctgctgacgcatccgtgagctgaaaaagtatcccgtgcggctgaagccccggcgttgaccgccggatctttatgccgtaccgcaacaggggaatgactattcacccactccttgcctgtttcatgggtttttatcgcccaatctcctgattttcatcgcacccagccacatttccatcatttttccatggttgcgtcataaaatttgcacatcgatccggtatttatgcctcgaaggaggtaaggacccatgaaatccggcgagaaaaattttttttgcacgacgatcgccttgctgatcgccgccctgatctggatatcctgcctcgggcgatattaccaccccaatccggccgattatcgcgtcgagacgggcatcgccccgaaagcacacgcgttggccgcgcgacacctggccatctggatggacgaggcgacgaggaatcgcgaactggcgcgaatgttcgaggtcaatcccgagtgggattttatgagccgcacctttttcgtcctggccctggccaacatggcgctgcgcgatccggcaatgcaatcgcaagccctggagatcatcgacacgattatcgacaataccctgcgcatcgaacgtgaacggggcttgtatcattttctgatgggatattcgaaagattcaccctgggtgatgcagccggcgcgcagccaatttgtcgacggcgaaatcgcgatcatgctggcggcgcgccggatggtggcggaaaagcccgaataccgggcgccgctggcggagcggatcgccgtgatgatcggacgcatggagcaaagtcccgtgcttttggcggaaagctaccccgatgaatgctggctgttttgcaatgcggtcggtctggcggcgatccgcatgtccgacgcgctggacggcaccgaccattccgccttcctgaagacgtggatcgcgacggccaaaaccaaattgctcgatccgcagaccggcctgcttatcgccgccgccaccgttcggggaacaccggcgcccgccggcgaacatccggaaggctcgaccatttggctggtcaaccacatgctgcaactgatcgatcccgatttcgccgccgatcaatatcgccgggcgcggctcgaactcggccgttccatcgccggcttcggctacgcccgcgaatggccggcgatgtatccgacgcaacccgatatcgactcgggcccgatcgtgccgttgctgaacgccagcgccggctccagcggtctggccatgatcggcgccgccgccttcggcgacgcggattatttcacccgattgctggcttcgctcaattttgctgctttcccggtggaagaaaacggtcaattgaaatatctggccagcaatccggtgggcgatgccgtcatgctatatgcgatggtcctcggcccgctgtgggccgaagtcgaacggagggccgaatcatgaattggtcgctattcaagccgctccgacgccgccgattggtggtttatccgatcatcttcttcgtcctcttgattgcggcgcacctggccggcttccgcgagcatttgcaggtgctgtccggcgcctgcggcttcgttccctggtcgatgtttcagggcgcagcttacttgatattgtattttctgtgcctgatcgcatcgccgatcatgctgctggccgccgccctctcggcgatggcccgaatggtgatccgccgctcatcccggtgaattcagcaactgcaggcgtcttcatcgtcgtcgtcgtcatcgtcatccgacggtgattcgtcgttatcatcatcattaatatcatcatcatcgtcgtcgtccaccgcgtcatcatcgttattgtcattattgtcattgtcgtcgttgtcatcgttgtcatcgtcgtcggccggttcgccgagaatgccggcctgttcccccaggtaggcgacgaccagccgcgcaacgttgttgcattgctccagatcgagacgttcatacgtatcgtcccagtgcataaagccgctgagttggtaggcgctgcccagaatataggcgtggtaaccgaaatcccagaaactggcgtgatcggacgagtcgttgccgggccagaccaccccgacatgcgccgtccccgccgggtagacgtgggccagttgattcatcacctgaagatcgggccaggagggataattggaactggacaacgccgcgttgattccctccagacgccagccgggcagatcgaggttgagcagattgcggatttcgtcctggcgattgaaggacgcctccgcatgcactcggctgcccatgtgaccgctttcctcggagtcgaaaaggatgaaacgcaaggtttgcgcgaaggtgtagtcgctcagcacccgcagggcttccaacacgatgatcacgcccgaggcgttgtcgacggcgcccggcgcgtaatcgggatcctgggtggaatccagatgggcgcccaccatccagatggcgcctggatcggtctcgcccgcgatttccacatacaggttgctgcaactcaggtccgtgcgacagtcataggtctccacttcgaaaggcaaaccgatttccgtcaaccgatcctgtaaaaaatccagggctttgtcgtgatccgggtggtcgatatcacggctgagaatgtattcgccgtgatagggatccacgccggtaagaatccgggcgtcggcatcgatgcgcgccgggtcgattttcccgtaagcgtcgaggatttgcggattggctacctgggcccgggcgattccgccgcccaccgccagacaaacgagcagcaaaagactccattgcacacatgaccgctccatgatccctccatcgaccgtcatttcattatcaacattcgctccagcgctctccgtaacattctaccacaacatcgccaagaaatgatctattcaaaatcgactttcaggaaaacatcggcagcttctcggcgcaggcggtcaaaggtcaataaatcgaggggcgtcgccaaacccgcatggttcaatctcccggacaggcattcccgggcgatcatgaccggcaggcattccatcggggcggcgccgtcccgcagcagcaccgtgccggtgcgcgtcgatccggctccatagaccgtgacggagagaagcgcttcgcggcggaaaccggcggcgacggcgcgttgttgttctttcacgttcatcgggcgcgcgatggtttcgatcaggcgataagcccatggccgcttctgcggctggagcaggcgaatcaacccgaagatccaggtcggttgctcgcccaaatagaaccaggtgtgcaattcgcgcaggggaaagcgtgcggaaagcgccggcgtgtcgatcgtcgggacctccagcagccggagccggccgaacggaaaaggcagttcgacgtttttctgcgaatcgccgagccgcaccggctgatccttgccgccggataaggcgacggggcggtacccggcatccaaaacgccgctcatcatcgaggcgagtccggaattcgcataggcatgttgaaattgggcgaagatgatttcggcggccttcgcccagggcgcatcctccagaagtctggcggccagcagcgtcgatacgccgggaatcgcgcccgccccggtggccaacagcagcccgtttcttcgggcttcggcgtccaactcgcgcatccgacggtaatgcacctgttcattggcgcaatccacataggggcgaccgcactcgacggccaggcgggcgatcgccgcgccgtggacggcatagggaccgatcgcattgatgaccagggccgattgttggaaagcccgccgcaaagccggttggtcggtcgcttccgagatcagcagttcgatgcggtctcttccctcgctcggtaaaaccgccgtgagtttttcagggttgcgtccggcggcgacaactcggtaaggggttcgcttgatcaagccctcgacgatcgtccggcccgccagaccgttggcgcccaataccaaaatcgactggtcggaaatcttcatcggttcattgcacctgatgcgtcttccatcaacgccaaaccacattcaatcaatcccgtaccccgacaattgaacatagcaccaaacgccggccggcaacaggacatgaaacggggggagggaggggattgcgcggtacgggcttttcatttctcatctccagccggttgcttcacccgagtaaatgaagcttttcacctccgtgcgcaatggccgattaattagcggctgccggcccgaaaaccggcagccgcgggaggaaatgggactcgtatcaacatcaggcgggcggcgtcggtggcgccgcgtcgcgccccggcacgcactcagtcaggcttgcgtttgcgcaggaaagccggcacatccagatcgtaggcgtcttccgcggcacgcagatcgggtgtttctttttccttgagccgaggatccagcccccgcggcggattgagccgtgcgcttcccacgtttttcttgccgaaatcgggccggcggatctggggctcgcggcgattggccggcggctgctcgcgtccgccctgttcctcctcgcccttgaacggttcgggacggggaatgttttgggaggtgaacgccgcgtggtattcggactggctgacatgatgggtggagcggttcagataggtcggcaccgtccgttcgatcatctgttcctgggcttcatcaaagccggtggcgatcaccgtcacgcggatttcctcgcgcaggttctcgtcgatgacctgtccccaataaatttccgcgtcgcgcgagcaggatttcatcaccagatcggccgcctcgctgacttcggccagacgcagatcgaaaccgccggtgatattgatcaacacgccccgggccccgtcgatgctgacgttttccatcaacgggcaactgatcgcctgcgccgccgcgtccacggcgcgcttctcgccggtggcctgaccggtgcccatcagcgccagttcgccggagacgttggtcgccttcatcaccgagcgcacgtcggcaaaatccagattgacgtgaccctgctggacgatcaggtcggagagcgagcgcacgcccttgagcagcacgtcattggcctttttgaaggcatccatcaacgtcgtgtcgctgccggccacggccagcagtttttggttggggatgacaatgatcgtgtcgatctcatcgcgcagccgcttgatgccctcctcggcgacggtcatccgccggcggccctcataatggaagggcttggtgaccaccccgacggtcagggcgcccatttcccgggccagcttggcgatcatcggagcggcgccggtgccggtgccgccgcccatgccggcggtgatgaagaccatatccgcgccctcgagcacttcccgcagggcttcgacggacttctccgcctcgcgcaaaccgatttccggattgccgcccgcgccgagtccggagcccaacgacaccttgatgccggccagattgttggccaacacctgcttgtcggtgttgcaggcgatgaactcgacgccctgcacattgtcctcaatcatggtgttgatggcgttgttgccgcagcccccgacgccgatcaccttgattttggctccggcccgttccggttccacaatgttgaacttgagacccatgataacctcccttgttgggggcttttcgcccccgtgccgcgtaattcaaacagagatcacggacttcccaacaatccggtgatccttgatttcacaccttgcaacatccgggaaaaccagatcggtttttcctcgtcccagggcgtcagattgacgttgtgcaaacccaacagcaccaagccgacggccgtggcgttgccgggactggccaccacatcgaccaggccgccgatatgatgcggtagaccgatacgcacccggcggttgaaaatcgaccaggccacatcgtcgattccccgcaggtgacaaacaccgccggtcaggaccaccgcggcgacgctgcgatccaggtcttggcggataatttcctcgttgaccaattgcaggatctcggccacccgcgcttcgatcacctcgcacagcttgcaatgatcgatgagatgggtccggccgttggcgccggcctcgacctcgatttcgtcgcccgggatcgcttctcccggcagacaatggccgtaacgtttcttgagccattcggcgttggacgctgaaatattcatcatctgggcgatatcattggtgatgtgattgccgccgacgggcagcaccgccgtatgcagcaccgcgtccttcttcatgaccagcaaatcggtcgtcccgccgccgatatcgatgaccgccacacccatttcccgctcatcggacgacaaaacagcctcggcgctggccaacgccgaaaggaccaactgatccacatccacgtcgcattgcttgcaacactgccgccggttggccaaagaggttttcgagaccgtgacaatgtagcaacgggcttccaggcgcatgccgcgcatcccgatcgcattcttgatgccggagacctcgtcgagcatgtattcctggggcaggacatgcaacacctcggattcctccggaatcgtcaccgattgcgtgccttccacgacacgccggacgtcctccgccgtcacggtgcgaccctgcaacggcaacatgctgtcgctgttgaaacccttgacgaagctgttggagatgctgacgttggccgagcggatctgcacctgcgccattttctccgcttcctcgacagccttggagatggcttgggcggtcttgttgaaatcccgaaccacgcctcgccgcaaaccgacggaaggatgcgtgcccaggccgatgacctcgattccgcgatccgtttcctcggcgacgacgacacagattttcgtcgtgccgatgtccaatccgactactaattcgccgttcttgttcttcatgctcccgaaccccttcgcaggccgcgcaccacgaccttaccggccacggccaaatcgacgacacggacttgattcatttgctcacccaaatgctcggcgaccaaggaaaaatgcctaagcttgcgctcgtaatccccgtatccgaagtgcaccagcatccccgtttgcgcggtggtcaacgagaaaccactgaccgtatcgaaaccgatttcactgacgcgctcgtccggaaagacgccggtttcaccgcccagccgcaacaactgcaccgcctcggccacccgggcggcctgatggctggccgaagagccgcccgccgcgaaggagtcgccgcggaacccggtcagcacgggcaaatcgatcggatcgccgctaccctgccgcttgaaaacaacgccgcgctcgtccaccagataaaggccgccggcgtgcagcaacgccacggcatgccgctcccggatgtcgacgaccatgccgtcgggcaattcgcggcgcacggtggcagcttccacccagggatgcgaaacgacacgctgcgccacgtcgttcagatccactgaaaaaatgttttgccccagccgcgtatgcagaaagtccagcagttcctcgcgcgacacttgctcttcggtccggacgtcaatccgggtcagacgaaagtgatccgcataacgcgtttgatgccagacggttagcccgatcgccagcagcaacaccaccggccaggcccgccaggcgtgggctttaatgaacgccgccgcccaatgccaaaccgggcgcaacggtttggcgacacccgcggccgcccgtcgcagggtcttgaccaggcgcccccgataatttttgggaggcgtccgccgcttattgggtctggttttcgcgcgcctcgacattgtgctccaccgtcaaaccggcgactcgattttcaagcgcgccgtgttcaacaccgtttccaccaactgctcgaacgccatcccctgccagtcgcgggcaatcatcggcaccaacgacaattcggtcagaccgggcaaggtattgacttccaacaaccaaggctgcctctgttcgtcgaggatgaaatcgacacgcaccacgccctcggcccgaatcgtttgggcggcggcgacggccaggttctgcacctgggcgacgacattgtcgtccaaaccctcgggacgggtgatgtagtcggtcatgcccttggtgtatttgtgccggtaatcgtaaaaagtaacgctttcgcccggcaacttcttcgggcggatttcgaccaggccaaacgcctgttcacctaaaacggccacggacaattcgcgcccgggaatgtactgctccaacagaacgcattcgtcgtagcgaaaagcttccgtgagcgctttttccagttcgtactggcggccgacgatggcgatcgcgacgctggagccctcggcggccggtttgacgaccagcggccagccgaaaggggattccatcaccccattgcgcggtccgctccgccgcagcgtccaatacggcggcaccggcaagccctcgtcctcgaacagttttttactcaccaccttgtccatcccgatcgccgaacccagcacgccggggccggtatagggaatccgcaggatttccagcaggccctgaacgcagccgtcctcgccccacttgccgtgcaaggcgttgtagaccacgctgacgccctcggcgacaagaagcgcggctgtttgttcattcagatccagctcgaccacatcgtagcccgtgtcccgcagcgcccgcgcgacagcccggccggtccgcagcgaaacctcgcgctcggaactgggaccgcccatcagcacgcccacttttttattgcgatacatcacgctctccccaaatgatcacttcgggttccagccagatcccggtttgttcgaagacgatctgacgggcttgttcgatcaacgccagcacatccgccgccgaggcgccgccctcgttgacgatgaaattggcgtgcttctcgctgatccgggcgccgccgatccgccgccccttcaagccgacggcctcgatcagccgcccggcgtaatcgctttccggattcttgaaggtcgaaccgccgctgggcagttccaggggatagcgggcgcgccgccgttcgattgtttcctccacccggcgccggatcctttccgctgcaccgcggcgcaaggacaaaaccgcctgggtgatgacgtacgggccgtccaaggccagaccgcggtaacggtaaaccagctcggcgcggggcaatcgccgcagtcgcccttcggcgtcgactatttcaatctctgcgagcaccgaggcgaaatcgccggcgctggtgccggcgttcatccgcacaccgccgccgatgcagccggggatgccggccagaaactccaggccggcgatgccttgttccatgcagcgctccagcgcgatttccatggacaggccggcgcccaatgtcaggcgtacggcgtctctggcttctgtggccgcgaattccgtaaagttctcgcgcatcaggatcgtgacgccgcgcaatccgccgtcgagaaccagcagattcgagccggcgccgatgacgcgcgtctgttgcccggccgccagtgaccagcgaacgatcttggcgatttccaccgccgtttcgggctgcaccaggcaatccgccggaccgccgacgcgccaggtcgtcaacgaggccatcgataccccgaggcgacaacgcgcgccgagcaattcggtcaattgcctttgcagcttcagatcgatcacgctctctcccgcttcaaacgttcgaccaaccgcgcggacaattgattcaaatcgccggcgccgagggtcaggatcaagtcttccggttgggccgccgcgatcagcaaatcgagcatctcctgttgatcggcgacataggttacatccgggtggcccatcgcccggatgccgtccaccagcttgcgcgagttgacgccttcgatcggcgtttcgctcgctgcgtaaatatcggttaccaacagcttgtcggcctggtcaaaagcggtgagaaactcatcgaacaggtcctgcgtccgggtaaaccgatgcggctggaaggcgacgaccaaccgccggtcgaagccggcgcgcgccgcggagagggtagcgcgaatctcggtcgggtgatggccgtaatcgtcgatcaccaggatgttgtcgatctcgccgatgcgctggaaacgccgccgaacgccggtaaacgaactgagcgacttggcgacaatctcgaagggcacaccgagctcgcgggccacggcgatcaccgccaccgcgttttgcaccatgtgccgaccgggcaacggcagcaccacttcgcccagttcgccctcgcggttgctgaccgcggtgaattgcgtctggaagtcatgctggcggattttcacggcccgcgtctccgcctccggcgacaggccgtaagtggcgatgcgcttgcgcacgcccgggatgatttcgcggacgctttcatcatcgatgcacaacaggcagagcccgtaaaacggcaccttattcagaaactccagaaatgtgcggcgcagttgctccattccagaatagtgatccaggtgttccagatcgatgttggtgacgacggcgattgtcggattcaacagcagaaaactgccgtccgattcatcggcctcggtcacaaaggtgtcgccggcgccgagtttggcgttggagccgatggcgtcgacgcgcccgccgacaaccaccgtcggatcaaagccggcggcgcccaataccgtcgccagcaggctggtggtcgtcgttttaccgtgacttccggccaccgcgacgccgtattttttcatccgcatcagctcggccaacatttcggcccggggaatcaccgggatcttggccgccttggcggcgatgtattccggattgttcgacttgatggcgctgctgatcaccaccacgtccgcgtcgtcgatgaacctgctttcatggccgtgatgaatccgcgcgcccagacgctccaggttggtggtgatgtcggtttcccgcaggtcggacccggaaactctaaagcccaggttgagcaagatttcggcgatgccggacatgccgatgccgccgatgccgaccaggtggaggtgttccgtcataccaagcatgttcattctcccgcttccgcttcttggtggcgcatcgccagcaggttgaccacccgttgtttgccggcggcctcgcctcgcgtctgggcgacagcgaggatgatgcccatcaggatgaaattgagcagcgtgttcgaaccaccgtaggaaaaaaacggcatggccagacccttgttcggcaacacggacatcaccaccgccgcattgacaatgatctgcagtcccaacaagcttgccgcgcccaccccgcaatatcgcaggaaggagtcttccacccgcatcgtcagacggatcgagcgccagacaatgaaaaagaagatgcccaacacgcccagtaatcccaccagtccgaattcctcgcccaagttcgccaaaatgaaatcggtgtgaatttccgggacgtaatgcgctttttgccagccgttgccgaaaccgacgccgctcagcccgccggagccgatggctatcttcgcctgccaggcctgccaattgacctgatagagattctgatccggattcagatagccccgcagccgctccatccgccaggatgaggtgaggatcgccagcgtaacgaatgtcacgcccgccgcgcccaggatgcccagggaactgagacgcgccccgccgatgaacaacatgacgatcaacaaaccgcagataacaaccgcgccgcccaggtccggctctttcgccaccagcccgatataggccgtgacgatcagggtcaccggcagcacgccgaaaatcaaagaccgaatccggtcctggcgcaccgccagataatgcgccagaaacaacacgaggaccgccttggtcaattccgagggctgaacattcagccccccgcatttgaaccagcgatgggcgcctttggcttccccgccgaaggccggaacaaagaccaacaccaacaacaacaacgccccgcccatcaaactggaaatcaacaccttattattgaaggctttcagatttattcgggtgatcaacagcatgaaaaacaatccgacggccacgttgaaactctgtttttccaagtaaaataccggcccgtgtttcatcggctgggtgacgctgtaaatggtgagcaagccccagaccgccaaacccagcaccagcgtcaggagaatccgatccaaaccgggcgcccgctgttctttgactctgttcattgcgcctccacccagcggcgcatggcctcgccgcgctcctcgaaattggcgaattgggcgaagctggcgcagccgggcgacaagagaatcgcttcgccggaccgcgccgcggcgcgcgcccactccaaggcttcggccatgggcccgacccgatgcatcgccgcgtcaggaagcgccccggcgatcaactcggccgcttcgccgtaagccaccaccgccgcgcatttttcccgcagcagcccggccagaaccgtccaatccgttcccttgtcccggccgcccagaatcagcacggccgggcgatccagcgccaacagggaagtgcgcaccgcgccgggcgtggtggccttggaatcgttgatgaaccgcacaccctttttctcgcccaggtcttccaggcgatgcggcagaccgcgaaattcgaccatggcgctttcaatcgccgccggatcggccccagccaacgtcgccagcagcgccgcggcggccaggttttcgcggttgtgccgtcccggcagacggtaagcgcgcaagggaatccgttgctcccgttccgttagtcgcaacaccagatcctgatccgtgcaaaaggcgttcgcctgcaggccgttgaacgtgaacagccggcccggcaacgatccggcaaagcgcatcaccccggcatcttccgcattgaagaccgccgcgtcgcccggcaattgccgggcgaacagtcgcattttggctgcggcgtaagcggtcatatccgggtagcggtcctggtgatccgaagccagattgagaaacgcgccgatgatggggcgcaattcaacgatggtttccaattggaagctggacaattcgacgaccgccagatcgagcgtcgcgtcatcgagcagcgcctcgctgagcggttgcccgagattgccgccgacgaaaacccgcttgccggccgctttgagaatttctccggtcagcacggtggtggtcgatttgcccttggttccggtgatgcccagcagcggacaagacagttcgccgaacgccagctccacttcgccgatgatccgcgcgccgcgttcgcgggcctgcgtaaaaagcggctgggccagcgggacgccgggactgatgacgatcgtgtcggcccaggagaaaagctccggtgtatggccgccccattccaccgcttccaactcggctcggatcggctccaacagactgcgcaacttcggattgtcgcccgcttcgctcaccgccacccgggcgccgcggcgcaaggccagccgcacggcgtcgcggccgctgcgaccgtaaccgacgacgagcacccggcgccctgtccaatccatcagatttcttcccccttgaggccgcggaccacgcgctccatgcgcatcccccggctgcctttgaccagaatgacatcgccgcggcggccgtcgcgccgcaactcggccacaatcgccgcatggtccggcgccgcgacaatggcggccggggacattttttcctcgcgcgctccttccgccaccaggccggcgtgctcgcccaggagaaacaaccggtccaggccgatcttggccgcatggcggcccaggcgccggtgagccgcctcggtttcggggcccagttcgaacatgtcgcccagcacggcgatcttccgcccttctccggccagttcgtccagcgccgagagggcggcatccatgctgcggggattggcgttgtaggtgtcgtcaatgacggtgatgccgaagatgctcagcacccggctgcgcatcgccgccggccggaaggtttccaagccttgtttgatcgccgccggcgacacgccgaaagcgcgggccgcggcggcggcggccagggcgttatacacgttgtggcgaccgaaggtggagagtgccacgtccaacggctcgcccagcacgctcagcgacaggtcgatgccttcaaagcccttggtccgcaccgccagggctttcacctgcgcgtcggcggcgggatcggccgagaaatacacacagcggaaaggcttgtcttgccccatgcgggcgactcgcggatcatcggcgttgagcaccgcaatgtgatcggcgccgaagccttcaagcagttcgcccttggcctcggcgaccgcgccgatggttttcagatgctccaagtgcaccgcactgacgttggtgatcacgccgatggtcggccgggcaatttgcgccagccggcggatttcaccgcgcatcgacatgcccatttccaacagcgccacccgatgcgcggccgtcaacctgaaaaccgtcaacggcaggccgatcaaattgttgaagttgccctcattgcgcagcacccgaccgggcagatgcgcctctaatatttgatagagcatctccttgctggtggttttacccgtcgagccggtgacggccagcacgggaatcccccgccggtccagcgtccagcgagccagatcgcccagggcttgcagcgtatcgtccacccggatcaccgccaagtctttcggcgccggggcggtgagcgttcgactgatcacgacgccggccgcgcccttggcgatcgcttgctcgagaaagttgtgaccatcgaaattgggtccggtcagggcgaaaaagcactcggccggcagcacctgccgggtatcggtgcaaattccggaaaacggctggtcggctcttccggcgatcaattcaccgccgatggcgcgactgactgtttccgccctatacagatcgtgcatcagctttctccgaagcggcgggccaatgccgccgccgccatttccgtgtcgtcaaaatgaatacgctgagatccgaaaatttgataatgttcatgtcccttccccgccagcagcactacgtcgcccgcctcggccagatcaatcgcccaggcgatggccttggcccgatcgggctcgatcgcgtaagccggaccttcctcccaccgcggcgactcaccggatttgaggaatcgccggccgaccttctccacgccggggacgatcatgtcgatgatcgcctgcggatcttccgaacgcggattatcgctggtgatcagggtcaggtccgcctgctgggcgaccgccttgcccatcaacggccgtttgccctgatcgcggtcgccgccgcagccgaaaacaaccaacaagcggccggccgccaggcggcgcaaggtggagatcacattttccagcgcatcgggcgtatgggcgtaatccaccagcgtcaggaaatcctgccgacccaccggttccaggcgacccgggatactgcggcaaccggctaatccctgttccacgacccggccgtccaccttcagaccgtaagccacggccgcggcggccagtacgttcatggcttgaaaatcgcccagcagcgggcagcggatgtccaacacttcctgcccgtactgcagagagccacgcaagccattgaaatcgcaggtcaattcacgccaataaatcgaggcgtttttcccgaaggtaatcgtcggcatcggggtggctttcatgattttttgcccggccggatcatctgcattgacgaccgcgaaagccttcggcttgcggctggccgaaaccggcagcaactcatcaaacagacggatcttggcgcccagataagcatccagcgcgccatggaaatccagatggtcgcgcgaaagattggtgaaaacgcctacatcgaaatggcaccccacggcccggcgcaactgcagggcgtggctggatacttccatgatcacgatttccacgccgaaattcttcatttccactagaatttcaaccagatctggagcctccggggtggtgtatcgcgattggatcgtatgaccgttgtaatgataatcgaccgttccgatgatccccactttgcgaccctgagccttaaaaatcgcctcgagttcataggccacggaggtcttgccgttggtgccggtgattccgatcaacgttaatccggccgtcggatcgccggccaggcgatgtgatatcagcgcgacaaagcggcgggcatcaggcactcgaacgagcggcacccccttggtatcgagatcatcctccgcggcaatcgccgccgccccggcttccagggcttgcgggacaaagcaggcgccgtcggtttgcaggccgcgcaccgcgacgaacaaatcaccgggccgcacctgacgggaagcgaccacggcgcgaatgacctcgacttgccggttgaccgaagcccaaggcaggtcatcgatcacctgattgagcagcatgtttcctccactactgtctgggggcgaaaacccccgttatttgtctgttttcagccaacgtttgcccgggtgcgggttcctgcttgatcgccactcccgagccttcgaaggtcatatcgatggtcatccggtgcgccaggctccgggccgcccgaatgctaagacccctgaaatccggcgcttgatccgcgccgaacaatcgtttgtccatggtgacgccatgattctccggcgccgcgtaaacaatgtttttttccaattcactgaccaaagttgcctcatcttgccgctgttccgaatacacgccgagataatccagcgttttttcagcgatttccctgaacgccggcgcagccacggtaccgccgtacgtccggcccggaggttcgtccgcgaccaccaggatccccaggatgggctcgtcgccgggcaccaaacccacaaagctcacgacacgccgcgatggatcgggttggccggtgcgggggtggtaatggaacgcagttcctgtctttcctgcgatcggaaaaccggtcaccgccgcccgtgtccccgtcccgccgtcctcagtgacctcgaccatcattttaaggacttccttggcgattttagcgctgacggcgcggccggcgatcgtcggattgtttttcctgctgccaatcccgtcgggactgatttgttcgagaaccacaaacggcgtcatcattcgaccgccgttgcccaaggcggcggtggccatgagcatctgcagaccggtcacggcaatcccctgcccataagccttggtagccgcgtcgatgggataccaggttttgtagaacttaagggagccggccgcttcggcggccagatcgatcccggtgcgttgaccgaaaccgaaccggcgcaagctttcatagtattgttgataggtcatgcgaatcgccaatttggcgatgccgatgttcgaactgtatttgatgatttgcgccggcgtggcgttgccgagcttatgcgtgtcggaaatggttttaccgccgtaatgccattgaccgtattcacaatcgaccagctcatcgagcctcaccttgccgtccgctaaaaccatcgccatggtcagaggtttcatcgtgctgccgggttcatattgatcaagcaccgcccgattgcgccggtccagatcggcgctctcacccggacggctcggatcgaaggtcggacgggtggccatggccaggatttcgccggttcgtacgtccaccacaatggcccaggcatgtttcggtttgaattccctgaccattttatccagcgcctcttcgacgaaccattgaatatgaagatcaagggtcaagcgcagggtttgaccatccttgcggccgaccacctgattgtcgctgaacaggtattgggtgcctttagcgtccttgatggaaaccagatgtccggcttccccgaccagggattgttcataagtggcctccaacccttcacgccctttgatgtcgatgtcggtccagcccagcagattggcggccagcgctccgcgcgggtagatgcgcttggtttccttgcgcagtctgacgcccgccaacgactcgggggccaaggccgccagagcggctgattcctcattggtgatgaagcgcttgatccattcgaattgcgtatcactgcggcatttgcggtaaatgtccacctcgccgatctggagcacatcggccagcgccttggacgttcgcgcggggtccttgaccagggtcggatcaacccacaccgagtccaccgtcaccgtggtggcaagaacttcgccatggcggtccaggatgtcgccgcgcggccgcggcagtttgatttcaaggctgtgaattttttccgcctggttgaccagttcctgatgtttgatgatcgtcaaatagaaggcgcggcaaccgagggaaaaaaagccgatgataaacaacaccaatagcgtgccgacccgcacgcgacgggcctcatccaagttgaagggtttctccggttggatgtgcttggcctggaggcgtcgtccaggcaaaagtccccggtgcgaaccgtataactgtggttgtctagggttcctcatgcaaaacaatccgttgggttagccgagattccttcagattgagttttctcgcctccgccgtcagacggtctttgcgtcccaactgttcatattcaaggcgtacatcattcacttctttttccagcgatcggatttcatcccccagcaccaaaacatcgtgacccagcgccaccacttccccccggatgtggcccagatacagcaaataggccgaaaccagcgccatcacgccgatcgtcaccagaatacccgtcaaatccagccatttccccagcgccacacgcaccgaacgccgccagcccccccgtttgacctttttttgtccgatcgttcgcgcccgaggcaaaatatattcagacatcatcatcctctttcatggattggcgactcgccgattttttccgccacacgcagcttggcgctgcgcgcgcgcggattcccccgcacttcctccgccgagggcgcaagcggtttgcgcgtcaggacccgcaaccgcggccgatgaccgcaaacgcaagtcggtatgttcggcggacaaaggcaccccttctcttcctcctgaaaccggcgtttaatccgccggtcctccaagctgtgatacgcgatcaccgccaggcggccccccgaccgcaacagcgagatcgacgcatccagcagttcatccagcgcgttcaactcgtcgttcactgcaatgcgcaacgcctgaaaaacctgggttgccgaatcgatgccgcgacgccggggcgtcccgaccgcccgatgaaccaactccgcgaaggcgcgaccggtgaacggccggtccgactgcctttccctcaccgtcaaccgggccaccgcccgccagcgcgcctcttcgccgtactcccgaaagatgcgccccagttcctcctcggaggcggcggccagcaaaacggccgccgtgcggggcgaccgccgatccagccgcatgtccaactcccgctcgctccggaaggaaaaaccccgctccggatcgtccagttggaaactggccagccccaaatcggcgcaaacggcatcgacttgttcaatttcgaaagaacgcagcacctgtcgcaattcgcgaaagttggcccggtgaaacttcacttgcggcaactcacgcaatcgccgccgggcgatttccagggaggcgtcgtcctgatccagggcgatcaccatgccggtcggtccgacctggcgggcaatcgcttcgctgaagcttccgcctcccgcagtgacgtccaggacgatctggcccggctgcaacgccaaacccgcgatcgtctccggcaacagcaccggttggtgctcgatcattaatcaaagagccccgacaaagcggccttgatttccggaatatgctccgccgtttccgtcagcgacttggaccacgattccgcatcccagatctgcagcgtcttgatggcgccgacgatgataacctggcgatccagaccggcccattcgcgatgcaattgcggaatcaaaatgcgtcccgccgaatcgaacgacaccttcttcgccggcatgacgtaatacttgatgtactcctcgagcacgggatctgccggatacttggaaaacagcttgtccatccgtttgacccattcgggccacggcaccaggtcgagatacgaatacgtcttgacctgttcgtgcttgctggaaccacggtccatcgccaggaccagttcggtgacgccttcggcatgaaacaactcgcgcaactctttggggacaatcgccctacccttttcatcgatcttgaccgggtaggagctgatgtacattgtttcgcttccttaagtccccacagcagtggagtttagcgccacattttcacaattttctacacgatactccccaaatccccaccgtgtcaagaaaaaaaatgaccgccccccacattcaaccatttgaaatgaaaagtaatttttacgaagtctatatctggctcgttttccgtaaaatacaccacagattgtgccaatccccaccggctagtgctttccggcgaaaaaatcctctaaaatttttcgatggtcgaaggccaacgacaaggctaatgcttcatttttcgtaaacttggcgaccgttttcgcatcgtcagcggcacgcggttccccggcggcggttgcctcgaaaaccaccgacagcgtatgaaaacgcgtatcgcgcgccgggtccgaataaacgtgaacctgacgcaccagccgcacatcgagacaggtttcctctctggcttcgcgaaccgcggcgctttcggccgattcgcccacatcgataaaaccgccggggatcgcccaaccgtaaggcgggttcttgcgttcgatcaaaacgatgcgctcgtcgggaagacggatgatgatatccaccgtggccaggggggttttcgggaggggtctcatggctgggccgctttaaattgttcaagtctggcttgccattcgccgcgttggtcgatttgcagcgcccacttcatgtggcgcacggcgtcccgataattcttgtcggcgtaagccgtttcggcttgttgcgccaaagcctgagcgatgagatcgaggcgctcccaggcatagtggttgtttttatcgtaccgcacggccatcccgtaaaaggacgtcgcgttgaacagcatcggttggcgatacatttcggcgtcgaaatacgcgtcgccccacgcggtcaaatatctgctggttgattgactgacgatgaagctggccgccagcgcgatgaacaacgcggccaccaccgcgagcccggcaatcaaaaccaaacgcggccattttctccggcgcggcacggtttccgtggggctgattttttcctcttcggcaatcggtgcggccgatgttttaccgagcgaggcaagaaacgaatcgtccgtcggatttcccggatcgcccgaaaccgtctgcggcggctgatgcgtggcggttcccgcctgcgtccgtaattcctccgcatccagccggagcgtgctttcctccctggcttcccggctcagcgccgcctggctggtggtgtgaatcgtccgatcggtgaattccagggcggcgcatagatccgccgcggtggcgtagcgatcgttcggatttttcgccaggcagcaatgcaccacctgcgccagcgcctcgggcacttgcggtcggacattgcgcaagggcgtgggcggtttgcgcagatgcgccaccatgatttccgaaatgctgtcgccggcgaacggcggcgagcccgccaacatttcatacatcaggatgcccagggcgtagatgtccgagcgcggatcgttcaagccttcccactgttccggagccatgtacggcgcggtgcccaacacctcgccgtcggcggtcaggttggcgccgccggcgatcttggcgatgccgaaatccatcaacgtggcgttgtcctgctcgtcgagcatgatgttcaccgatttgatgtcgcgatggatcgccccggcgcgatggatatagtccaccgcccgcgaaatttggatcatgatgaccgtgacctgctcgggcgagagggtgccgctgtggcggatgcggcccttgagcgtttcgccccgcaggtacttcatcacgtagtagacgatctccccctcttcgccgatcgtatagatcggcacgatgttggggtgctccaagcgggccaggatattgatttcttcccgaaaacgcttgaccagcttttcatcggccgccaggtggctgggcaggattttgatggcgacggagcgctcgacgtcgaaatcgagatcctgggctttgaagaccgcgcccatgccgcccatcccgatcttctccagcaccttgtatttcccggaaagtatggctcccggttcgatcatgcagccatcctgttttcgctcgaatcccgtcgccttcaccccggcggggcggcgttcattatcttttccacaccaagcgtatcgggcgcattaaaattatttttcttcgtgaatgcaagcgcattcgatccttcccttcagtcactccttgcctttttccctttgcccttccagcaaatccctgggcctgtacctggatttcaggatttacgcgggggttcgattagctcctggtctactcggggcggaaggcttttgttaccgccgcattatccctggcgtttttaccataatggaaagcatgtttgcatttatttagcgaaaaggtgaagggaaaaaggaactgtgccccttcatgacatgggtcgattatggtatagctaatcgtcatcaaaaattcgttggaagaccggagcggaatggaaaatagttttgcaggcgtatgcaggggatgtcaaaatcaatattcattaatcatgggggtcctacatgaactacaaccttctcgatgaaaaatggattccggttctctataatgatgggcgcacggatcgcgttggcattaaagcggctttcaaggaagcaggccacatccgccagattgccgccagcaatccgatggatcgttttgcaattttgcgatttctaatagcattgctatattggtgtaaagggaacccttcaaccgatgatttcaccgacttagataaaccgttccctgaaagctggtttaaaaaattagaagaccaaaaaagctgtttcgatctttttgccgaaaacaagcgattttgccaggcccttacacattctaaaccggtaccggatcggcttactgtaaattatctaatacaagaggttccgactaaaacaaattttaatcattttcgccatgcaattgataaaaaagacggtctttgtcccgcgtgttgtgcaattggcctcctacgaatacccatattttccacatcagggggaaaaggcaaatccccaggcattaattttaaaccgccaatttatctcatcttacttggccatacgctcgcaacaagtatcaggctttcttggttgcccgtaaaaagtattggcttcccattttgggagaaagccgatttttcacttcctgaaggtgaggaaatccccttactgactggtatgacttggctaccgcgacaagtatggcttgatgagccatcagaaaaagaaggcaaatgcattttatgcggcaggcaagaacgattggttgaacaaaccatttttgccgggctggggagcaccaaagacaaggatgaatcaaaagtgcgaatgtggattgatccacatgtcatttacgatacagcgaaagatgggaaacaaatttcgctacacagtaagaatacgattggactagccgatactggggctggccaatggttggatatattattcggccaactctatttggatagaatccattcaccggcggttaaggaagcaatccaaaaaacaaccgaatcaggaagccaaatcaaatcatgggcaattgggttttcaactattcaaaacgataagtacttggaagcaatagaatatttgcttcccatctcgaatcaaggagatgccccaacctcaggaatcgatcaagtaaagcagtggcaagatgagggtaaaacaattgataaaacaataaggaaaaggactgcatggggaaaagatgaatccttaaaaaagcgaaagaacagcgaattaaaacctgccatatccgccattcgcccgcatgtggagcaccaggtatcgtcagcggcgggaaagctgctgaccgatgaccgcgaaacgtgggagcgggcggcggaagaataccgaccgatgatggaagtcgtggcacaggcgctttcacccggttatacggccaaggccttgcgaaggcggcgacaaatagccaatgccattccgaacatgcgtcaaaccgaaccaaagaaaaagggcaagaacaaagagaaaggaggtgaggaatgaacgcgaccgaactcttcattgacgctttgaccagtctaaaagaaggtgaactcgggctattgcgaaagcatgcagggcaaggtttagatgaaacggtagaggggttcgatctgttcaccggtatctggtggccgctgcgatctcaaaaacatggaattccgcccaagagggaagttgcctggttggtggccaagctttacgcattccggcctttagcaccctcaccgggagacaccctttctaagcaattagcaaaaagcattccgagaaacgaacaagaacaaatccgctacgtggaacgattcgatcagatgctgtctttgcccatccggaaaatcgaggccgggttgttatgggcgctcgatgtcatcgctaaaaaggaaaacagactcgattgggtcagattggcggaagatctccgctcttggaataacgaatctacccggctgagatggtcggaagaattcacaaaaattgatgaaaggaaagaaccatgttgatcgaaattcatgccattcaaaaccacagcccggctaatttgaaccgagacgaccttggggcaccgaaaacctgttacttcggcggagtattgcggtcgcgcatttccagccaatgcttgaagcggagcatccgcaccagcgatgaatttaagacactttgcggaggaattcgtacccgtcagttggcgaaaaagatcgcggagcaaattccggacgtgaagaaggccagggaacgggcggaaaaaatactcgaacaatgcggttttaagtcaaagaagaaaaaaggagaagaagaacaagacgacaaaagcaagatgctgatatacacgacttatgccgccatcaaagaaatggccgaattgattaaaaacaatgaagggaaaccggaaggcaaactggcagaacaattcggcgccatcatcagcaagcacgtcagtgtgccggatatggctctatccgggcgcatgttggaaccggatgcgtctgctaaagagatttggaaaaacaacgaaacgaccgtggaagcagccttgcaagtggcgcatgccatttccacacatgccgcgcgcccggaagtggattactacgtggccaaggacgacgtgccgggtgaagacgcgggcgccggatttctggacgaggcgatgttcgcctccgcctgtttctacaagtatttttcgatccattgggagaagttggtcgaaaaccttaagggaaatcaggaactagcggcccatacaattggggcgtttctgcgcggcgtcgctaaaatcacccccacaggaaagcaaaacagctatgcagccaacaattatccggacgggctgctagttgagatcaaaaaaacaccggtcagttatgccaacgcatttgccaaaccggtggaagaaggacagcgtggcatcatcgagcaaagcatcgctcaacttgcccaatacgcccacgacctggatgtcggattcgggaatccggagcatcgattttggttttcgcccaaccttcgctatcccttgatgctggtcgaggatggaacagaaaaggcgatgaccgaaaacaacatcaaatcccttgatgagttgatcgccgtgatcgttcgcgcgctcggccatgattggcagtcggttcagaagacggtgaccagcatggagcccacattatgagcgaaaacacgttgtttcttcgcttggaggggccgttgcaagcctgggggaatcaggaatcaaaatttctgattcggcgcacttcagatgcaccgacaaaatcgggagtcatcggtatgctttgcgccgctttgggcatcccgcgagcactggccggcgaggaatggctgccgaagcttagtgccttgcgctttggggtacgaatcgaccggccgggaatccgctggtgggattaccataccgtgggcgccaagatggaaatgcggattgcggaaggagaagggaagtccaagccgggcgcgatgttaacccgacgcgaatacctttgcgacgcttcctttctggttgttttacaaggcgaatcgggactcatcgagttattggaaacaaaacttcgcgaaccggtatggacgctttacctcggccgaaaatcctgtccgccatcgcggccgatattgaatgccaaagactcatcgggagattaccccgcccttctttcagcgctttcatccgttccatggcaaagaaggtatcaaggggaaccggcgccaccaagtgtaaagtttctcatggattggaatcccaccccaagccagccaaatgcaccgccggatgcactgattctttatgatgtggcactgacgttcgatcctcccgctcatgagccgcgtttcgccattcagggcgaactcaatgtcggtccggatgccaatgtacacttcaaaacaacgccgtcccagaagataaccccagcaccgccaagaccaagggcagattacgcaaacgatcaataccggaaaatgcgaaagaaacgcctggcggcagatcatggcctttgtgttttgtgcaaatcgccggcgacaaccgttcagcatattacctatcgaagagcaggcggcaatgaagccctggaagacctccgatctctctgtcgtttgtgccacgatgcggtaaccatgctcgaatatgggttgaacatggacctggatcgaatcaacccggaagagtcccactggcgcgaggccattttagaaaagagaaaagagatcgaacaaaaccgctcccttgtcaaacgccaccgcagattatcagccgaggaggtggagtaaaatgtatcactcgacccttttagtaaacgtcggcgacaacccggatcaaccaagacccggccgactatggttacggaacgcctatcgagtccatcaacgcttgtgcatggcgtttcagacagaggctaagaaaaaggccgatcccgattttctcaacccatacaatccgaccaaagatctggatcaacagcaagtgcatgtgccgcggtatgatcccaaacggaatgttactgccgggtttctttatcgcattgatccgcatccgggtgggtcagtggcgattgtcgttcagtcaacccaacgtccggattggaactacgcttttcacaacgccccttctcttttagcggccgatccggaggtcaaaccgttcaatccggaattttccaaagaacaactgcttcgttttcgattacaagccaatccgacgaagaagatcgttgcaatgaccgagagaggtgaaataaaacgaaacggcaaacgcattccggtgaaatacgatgagctaaacgattggctgacccgccatgccaccgcaggaggcttttctcttgatgaggaatccatcggcgtacagacaggttatgtctatatcaatgactcgcacgagggaaaagggcgtcgtgtgttttcaacacggtatgagggcacactgaccgttaccgatccggaacgcttttaccaaacgataaccggcgggatcggtccatccaagtgcttcggcttcggtttgctgagcgtggcgccggtgcggtagcgagccatgaaggatttgcacgatctgcccaagctgcgggacggcctgagctttctgtacgtcgagcatgcgcgggtggaaaaggagcaacaggcgatcgcgctgtaccgggcggaagggtgcgtgtccgtgccggcggcggggctggcggcgctgctgttgggtccgggcacgaacatcacccacgacgccgtgcgcgccctggccgaaaacggctgcacccttctgtggtgcggcgagcaaggggttcgctgctatgcccagggcctcggcgaaacgcgtaaagccgcgcggctgctgcaccaggcgcggctgtgcgccgatccggccttgcacctggcggtggtgatgcggatgtatcgcaaacgctttgccgaagcgctgccgaaggacttgaccctggcgcaaatccgcggccgggagggcgtgcgggtgcgcgaggcctacgcgaacgccgcacagcgctacggcgtggtctggcagggccggcagtatcggcgcgaccggtgggaggcgacggacccggtcaaccgggcgctgtcggccgccaacagttgcctttacggcctctgccatgcggcgatcgtctccgcgggctactcgacggcgctgggcttcgtgcacaccggcaagcagttgtcgttcgtgtacgacatcgccgacctgtacaaaaccgaagtgacgatccccgtcgctttcaaaatcaccgccgagggaccgacgaacctggaaagcgccgtgcgccacgcctgccgcgatatcttccgcgaggtgcggctgttggatcggctggtaccggacctcgattgggtcttggatgcaacggggctggacgacgaggacggcgccggcgacccggacgccgacgaggccttgccgggcgggctgtggaacgggtcggagacaacggcaatgggagggcaaaactatggtggtgatgatcctggaaaacgtggccccggggctgcggggaaaactgagccgctggctgatcgagccgcgggcgggggtcttcgtggggaaggtgagcgcgatggtccgtgacaagctgtgggaaaaggtgctgaaacaaaaaggcgccggatcctgcgtgcaaatcttctcggcggcaaatgagcagggcttcgaggtccgcgccgccggcgaccgcagccgtgagctcatccgcatggagggacttatccttgttttaaagaaaaaagtcgtgtgataatcaagtatgatccccacgcgcgtggggatgaaccgagcggcctgggcctgctgtaaggaggcaacatatgatccccacgcgcgtggggatgaaccgctctcgcctgggttcggcaaatgaccgctctgatgatccccacgcgcgtggggatgaacc

SEQ ID NO: 970 - DNA, 103276 bp, Artificial Sequence
  Synthetic Oligonucleotide
  misc_feature (1)..(54877): n is a, c, g, or t
nnnnnnnnnnnnnnnnnnnnnnnnnnnnnnnnnnnnnnnnnnnnnnnnnnnnnnnnnnnnnnnnnnnnnnnnnnnnnnnnnnnnnnnnnnnnnnnnnnnnnnnnnnnnnnnnnnnnnnnnnnnnnnnnnnnnnnnnnnnnnnnnnnnnnnnnnnnnnnnnnnnnnnnnnnnnnnnnnnnnnnnnnnnnnnnnnnnnnnnnnnnnnnnnnnnnnnnnnnnnnnnnnnnnnnnnnnnnnnnnnnnnnnnnnnnnnnnnnnnnnnnnnnnnnnnnnnnnnnnnnnnnnnnnnnnnnnnnnnnnnnnnnnnnnnnnnnnnnnnnnnnnnnnnnnnnnnnnnnnnnnnnnnnnnnnnnnnnnnnnnnnnnnnnnnnnnnnnnnnnnnnnnnnnnnnnnnnnnnnnnnnnnnnnnnnnnnnnnnnnnnnnnnnnnnnnnnnnnnnnnnnnnnnnnnnnnnnnnnnnnnnnnnnnnnnnnnnnnnnnnnnnnnnnnnnnnnnnnnnnnnnnnnnnnnnnnnnnnnnnnnnnnnnnnnnnnnnnnnnnnnnnnnnnnnnnnnnnnnnnnnnnnnnnnnnnnnnnnnnnnnnnnnnnnnnnnnnnnnnnnnnnnnnnnnnnnnnnnnnnnnnnnnnnnnnnnnnnnnnnnnnnnnnnnnnnnnnnnnnnnnnnnnnnnnnnnnnnnnnnnnnnnnnnnnnnnnnnnnnnnnnnnnnnnnnnnnnnnnnnnnnnnnnnnnnnnnnnnnnnnnnnnnnnnnnnnnnnnnnnnnnnnnnnnnnnnnnnnnnnnnnnnnnnnnnnnnnnnnnnnnnnnnnnnnnnnnnnnnnnnnnnnnnnnnnnnnnnnnnnnnnnnnnnnnnnnnnnnnnnnnnnnnnnnnnnnnnnnnnnnnnnnnnnnnnnnnnnnnnnnnnnnnnnnnnnnnnnnnnnnnnnnnnnnnnnnnnnnnnnnnnnnnnnnnnnnnnnnnnnnnnnnnnnnnnnnnnnnnnnnnnnnnnnnnnnnnnnnnnnnnnnnnnnnnnnnnnnnnnnnnnnnnnnnnnnnnnnnnnnnnnnnnnnnnnnnnnnnnnnnnnnnnnnnnnnnnnnnnnnnnnnnnnnnnnnnnnnnnnnnnnnnnnnnnnnnnnnnnnnnnnnnnnnnnnnnnnnnnnnnnnnnnnnnnnnnnnnnnnnnnnnnnnnnnnnnnnnnnnnnnnnnnnnnnnnnnnnnnnnnnnnnnnnnnnnnnnnnnnnnnnnnnnnnnnnnnnnnnnnnnnnnnnnnnnnnnnnnnnnnnnnnnnnnnnnnnnnnnnnnnnnnnnnnnnnnnnnnnnnnnnnnnnnnnnnnnnnnnnnnnnnnnnnnnnnnnnnnnnnnnnnnnnnnnnnnnnnnnnnnnnnnnnnnnnnnnnnnnnnnnnnnnnnnnnnnnnnnnnnnnnnnnnnnnnnnnnnnnnnnnnnnnnnnnnnnnnnnnnnnnnnnnnnnnnnnnnnnnnnnnnnnnnnnnnnnnnnnnnnnnnnnnnnnnnnnnnnnnnnnnnnnnnnnnnnnnnnnnnnnnnnnnnnnnnnnnnnnnnnnnnnnnnnnnnnnnnnnnnnnnnnnnnnnnnnnnnnnnnnnnnnnnnnnnnnnnnnnnnnnnnnnnnnnnnnnnnnnnnnnnnnnnnnnnnnnnnnnnnnnnnnnnnnnnnnnnnnnnnnnnnnnnnnnnnnnnnnnnnnnnnnnnnnnnnnnnnnnnnnnnnnnnnnnnnnnnnnnnnnnnnnnnnnnnnnnnnnnnnnnnnnnnnnnnnnnnnnnnnnnnnnnnnnnnnnnnnnnnnnnnnnnnnnnnnnnnnnnnnnnnnnnnnnnnnnnnnnnnnnnnnnnnnnnnnnnnnnnnnnnnnnnnnnnnnnnnnnnnnnnnnnnnnnnnnnnnnnnnnnnnnnnnnnnnnnnnnnnnnnnnnnnnnnnnnnnnnnnnnnnnnnnnnnnnnnnnnnnnnnnnnnnnnnnnnnnnnnnnnnnnnnnnnnnnnnnnnnnnnnnnnnnnnnnnnnnnnnnnnnnnnnnnnnnnnnnnnnnnnnnnnnnnnnnnnnnnnnnnnnnnnnnnnnnnnnnnnnnnnnnnnnnnnnnnnnnnnnnnnnnnnnnnnnnnnnnnnnnnnnnnnnnnnnnnnnnnnnnnnnnnnnnnnnnnnnnnnnnnnnnnnnnnnnnnnnnnnnnnnnnnnnnnnnnnnnnnnnnnnnnnnnnnnnnnnnnnnnnnnnnnnnnnnnnnnnnnnnnnnnnnnnnnnnnnnnnnnnnnnnnnnnnnnnnnnnnnnnnnnnnnnnnnnnnnnnnnnnnnnnnnnnnnnnnnnnnnnnnnnnnnnnnnnnnnnnnnnnnnnnnnnnnnnnnnnnnnnnnnnnnnnnnnnnnnnnnnnnnnnnnnnnnnnnnnnnnnnnnnnnnnnnnnnnnnnnnnnnnnnnnnnnnnnnnnnnnnnnnnnnnnnnnnnnnnnnnnnnnnnnnnnnnnnnnnnnnnnnnnnnnnnnnnnnnnnnnnnnnnnnnnnnnnnnnnnnnnnnnnnnnnnnnnnnnnnnnnnnnnnnnnnnnnnnnnnnnnnnnnnnnnnnnnnnnnnnnnnnnnnnnnnnnnnnnnnnnnnnnnnnnnnnnnnnnnnnnnnnnnnnnnnnnnnnnnnnnnnnnnnnnnnnnnnnnnnnnnnnnnnnnnnnnnnnnnnnnnnnnnnnnnnnnnnnnnnnnnnnnnnnnnnnnnnnnnnnnnnnnnnnnnnnnnnnnnnnnnnnnnnnnnnnnnnnnnnnnnnnnnnnnnnnnnnnnnnnnnnnnnnnnnnnnnnnnnnnnnnnnnnnnnnnnnnnnnnnnnnnnnnnnnnnnnnnnnnnnnnnnnnnnnnnnnnnnnnnnnnnnnnnnnnnnnnnnnnnnnnnnnnnnnnnnnnnnnnnnnnnnnnnnnnnnnnnnnnnnnnnnnnnnnnnnnnnnnnnnnnnnnnnnnnnnnnnnnnnnnnnnnnnnnnnnnnnnnnnnnnnnnnnnnnnnnnnnnnnnnnnnnnnnnnnnnnnnnnnnnnnnnnnnnnnnnnnnnnnnnnnnnnnnnnnnnnnnnnnnnnnnnnnnnnnnnnnnnnnnnnnnnnnnnnnnnnnnnnnnnnnnnnnnnnnnnnnnnnnnnnnnnnnnnnnnnnnnnnnnnnnnnnnnnnnnnnnnnnnnnnnnnnnnnnnnnnnnnnnnnnnnnnnnnnnnnnnnnnnnnnnnnnnnnnnnnnnnnnnnnnnnnnnnnnnnnnnnnnnnnnnnnnnnnnnnnnnnnnnnnnnnnnnnnnnnnnnnnnnnnnnnnnnnnnnnnnnnnnnnnnnnnnnnnnnnnnnnnnnnnnnnnnnnnnnnnnnnnnnnnnnnnnnnnnnnnnnnnnnnnnnnnnnnnnnnnnnnnnnnnnnnnnnnnnnnnnnnnnnnnnnnnnnnnnnnnnnnnnnnnnnnnnnnnnnnnnnnnnnnnnnnnnnnnnnnnnnnnnnnnnnnnnnnnnnnnnnnnnnnnnnnnnnnnnnnnnnnnnnnnnnnnnnnnnnnnnnnnnnnnnnnnnnnnnnnnnnnnnnnnnnnnnnnnnnnnnnnnnnnnnnnnnnnnnnnnnnnnnnnnnnnnnnnnnnnnnnnnnnnnnnnnnnnnnnnnnnnnnnnnnnnnnnnnnnnnnnnnnnnnnnnnnnnnnnnnnnnnnnnnnnnnnnnnnnnnnnnnnnnnnnnnnnnnnnnnnnnnnnnnnnnnnnnnnnnnnnnnnnnnnnnnnnnnnnnnnnnnnnnnnnnnnnnnnnnnnnnnnnnnnnnnnnnnnnnnnnnnnnnnnnnnnnnnnnnnnnnnnnnnnnnnnnnnnnnnnnnnnnnnnnnnnnnnnnnnnnnnnnnnnnnnnnnnnnnnnnnnnnnnnnnnnnnnnnnnnnnnnnnnnnnnnnnnnnnnnnnnnnnnnnnnnnnnnnnnnnnnnnnnnnnnnnnnnnnnnnnnnnnnnnnnnnnnnnnnnnnnnnnnnnnnnnnnnnnnnnnnnnnnnnnnnnnnnnnnnnnnnnnnnnnnnnnnnnnnnnnnnnnnnnnnnnnnnnnnnnnnnnnnnnnnnnnnnnnnnnnnnnnnnnnnnnnnnnnnnnnnnnnnnnnnnnnnnnnnnnnnnnnnnnnnnnnnnnnnnnnnnnnnnnnnnnnnnnnnnnnnnnnnnnnnnnnnnnnnnnnnnnnnnnnnnnnnnnnnnnnnnnnnnnnnnnnnnnnnnnnnnnnnnnnnnnnnnnnnnnnnnnnnnnnnnnnnnnnnnnnnnnnnnnnnnnnnnnnnnnnnnnnnnnnnnnnnnnnnnnnnnnnnnnnnnnnnnnnnnnnnnnnnnnnnnnnnnnnnnnnnnnnnnnnnnnnnnnnnnnnnnnnnnnnnnnnnnnnnnnnnnnnnnnnnnnnnnnnnnnnnnnnnnnnnnnnnnnnnnnnnnnnnnnnnnnnnnnnnnnnnnnnnnnnnnnnnnnnnnnnnnnnnnnnnnnnnnnnnnnnnnnnnnnnnnnnnnnnnnnnnnnnnnnnnnnnnnnnnnnnnnnnnnnnnnnnnnnnnnnnnnnnnnnnnnnnnnnnnnnnnnnnnnnnnnnnnnnnnnnnnnnnnnnnnnnnnnnnnnnnnnnnnnnnnnnnnnnnnnnnnnnnnnnnnnnnnnnnnnnnnnnnnnnnnnnnnnnnnnnnnnnnnnnnnnnnnnnnnnnnnnnnnnnnnnnnnnnnnnnnnnnnnnnnnnnnnnnnnnnnnnnnnnnnnnnnnnnnnnnnnnnnnnnnnnnnnnnnnnnnnnnnnnnnnnnnnnnnnnnnnnnnnnnnnnnnnnnnnnnnnnnnnnnnnnnnnnnnnnnnnnnnnnnnnnnnnnnnnnnnnnnnnnnnnnnnnnnnnnnnnnnnnnnnnnnnnnnnnnnnnnnnnnnnnnnnnnnnnnnnnnnnnnnnnnnnnnnnnnnnnnnnnnnnnnnnnnnnnnnnnnnnnnnnnnnnnnnnnnnnnnnnnnnnnnnnnnnnnnnnnnnnnnnnnnnnnnnnnnnnnnnnnnnnnnnnnnnnnnnnnnnnnnnnnnnnnnnnnnnnnnnnnnnnnnnnnnnnnnnnnnnnnnnnnnnnnnnnnnnnnnnnnnnnnnnnnnnnnnnnnnnnnnnnnnnnnnnnnnnnnnnnnnnnnnnnnnnnnnnnnnnnnnnnnnnnnnnnnnnnnnnnnnnnnnnnnnnnnnnnnnnnnnnnnnnnnnnnnnnnnnnnnnnnnnnnnnnnnnnnnnnnnnnnnnnnnnnnnnnnnnnnnnnnnnnnnnnnnnnnnnnnnnnnnnnnnnnnnnnnnnnnnnnnnnnnnnnnnnnnnnnnnnnnnnnnnnnnnnnnnnnnnnnnnnnnnnnnnnnnnnnnnnnnnnnnnnnnnnnnnnnnnnnnnnnnnnnnnnnnnnnnnnnnnnnnnnnnnnnnnnnnnnnnnnnnnnnnnnnnnnnnnnnnnnnnnnnnnnnnnnnnnnnnnnnnnnnnnnnnnnnnnnnnnnnnnnnnnnnnnnnnnnnnnnnnnnnnnnnnnnnnnnnnnnnnnnnnnnnnnnnnnnnnnnnnnnnnnnnnnnnnnnnnnnnnnnnnnnnnnnnnnnnnnnnnnnnnnnnnnnnnnnnnnnnnnnnnnnnnnnnnnnnnnnnnnnnnnnnnnnnnnnnnnnnnnnnnnnnnnnnnnnnnnnnnnnnnnnnnnnnnnnnnnnnnnnnnnnnnnnnnnnnnnnnnnnnnnnnnnnnnnnnnnnnnnnnnnnnnnnnnnnnnnnnnnnnnnnnnnnnnnnnnnnnnnnnnnnnnnnnnnnnnnnnnnnnnnnnnnnnnnnnnnnnnnnnnnnnnnnnnnnnnnnnnnnnnnnnnnnnnnnnnnnnnnnnnnnnnnnnnnnnnnnnnnnnnnnnnnnnnnnnnnnnnnnnnnnnnnnnnnnnnnnnnnnnnnnnnnnnnnnnnnnnnnnnnnnnnnnnnnnnnnnnnnnnnnnnnnnnnnnnnnnnnnnnnnnnnnnnnnnnnnnnnnnnnnnnnnnnnnnnnnnnnnnnnnnnnnnnnnnnnnnnnnnnnnnnnnnnnnnnnnnnnnnnnnnnnnnnnnnnnnnnnnnnnnnnnnnnnnnnnnnnnnnnnnnnnnnnnnnnnnnnnnnnnnnnnnnnnnnnnnnnnnnnnnnnnnnnnnnnnnnnnnnnnnnnnnnnnnnnnnnnnnnnnnnnnnnnnnnnnnnnnnnnnnnnnnnnnnnnnnnnnnnnnnnnnnnnnnnnnnnnnnnnnnnnnnnnnnnnnnnnnnnnnnnnnnnnnnnnnnnnnnnnnnnnnnnnnnnnnnnnnnnnnnnnnnnnnnnnnnnnnnnnnnnnnnnnnnnnnnnnnnnnnnnnnnnnnnnnnnnnnnnnnnnnnnnnnnnnnnnnnnnnnnnnnnnnnnnnnnnnnnnnnnnnnnnnnnnnnnnnnnnnnnnnnnnnnnnnnnnnnnnnnnnnnnnnnnnnnnnnnnnnnnnnnnnnnnnnnnnnnnnnnnnnnnnnnnnnnnnnnnnnnnnnnnnnnnnnnnnnnnnnnnnnnnnnnnnnnnnnnnnnnnnnnnnnnnnnnnnnnnnnnnnnnnnnnnnnnnnnnnnnnnnnnnnnnnnnnnnnnnnnnnnnnnnnnnnnnnnnnnnnnnnnnnnnnnnnnnnnnnnnnnnnnnnnnnnnnnnnnnnnnnnnnnnnnnnnnnnnnnnnnnnnnnnnnnnnnnnnnnnnnnnnnnnnnnnnnnnnnnnnnnnnnnnnnnnnnnnnnnnnnnnnnnnnnnnnnnnnnnnnnnnnnnnnnnnnnnnnnnnnnnnnnnnnnnnnnnnnnnnnnnnnnnnnnnnnnnnnnnnnnnnnnnnnnnnnnnnnnnnnnnnnnnnnnnnnnnnnnnnnnnnnnnnnnnnnnnnnnnnnnnnnnnnnnnnnnnnnnnnnnnnnnnnnnnnnnnnnnnnnnnnnnnnnnnnnnnnnnnnnnnnnnnnnnnnnnnnnnnnnnnnnnnnnnnnnnnnnnnnnnnnnnnnnnnnnnnnnnnnnnnnnnnnnnnnnnnnnnnnnnnnnnnnnnnnnnnnnnnnnnnnnnnnnnnnnnnnnnnnnnnnnnnnnnnnnnnnnnnnnnnnnnnnnnnnnnnnnnnnnnnnnnnnnnnnnnnnnnnnnnnnnnnnnnnnnnnnnnnnnnnnnnnnnnnnnnnnnnnnnnnnnnnnnnnnnnnnnnnnnnnnnnnnnnnnnnnnnnnnnnnnnnnnnnnnnnnnnnnnnnnnnnnnnnnnnnnnnnnnnnnnnnnnnnnnnnnnnnnnnnnnnnnnnnnnnnnnnnnnnnnnnnnnnnnnnnnnnnnnnnnnnnnnnnnnnnnnnnnnnnnnnnnnnnnnnnnnnnnnnnnnnnnnnnnnnnnnnnnnnnnnnnnnnnnnnnnnnnnnnnnnnnnnnnnnnnnnnnnnnnnnnnnnnnnnnnnnnnnnnnnnnnnnnnnnnnnnnnnnnnnnnnnnnnnnnnnnnnnnnnnnnnnnnnnnnnnnnnnnnnnnnnnnnnnnnnnnnnnnnnnnnnnnnnnnnnnnnnnnnnnnnnnnnnnnnnnnnnnnnnnnnnnnnnnnnnnnnnnnnnnnnnnnnnnnnnnnnnnnnnnnnnnnnnnnnnnnnnnnnnnnnnnnnnnnnnnnnnnnnnnnnnnnnnnnnnnnnnnnnnnnnnnnnnnnnnnnnnnnnnnnnnnnnnnnnnnnnnnnnnnnnnnnnnnnnnnnnnnnnnnnnnnnnnnnnnnnnnnnnnnnnnnnnnnnnnnnnnnnnnnnnnnnnnnnnnnnnnnnnnnnnnnnnnnnnnnnnnnnnnnnnnnnnnnnnnnnnnnnnnnnnnnnnnnnnnnnnnnnnnnnnnnnnnnnnnnnnnnnnnnnnnnnnnnnnnnnnnnnnnnnnnnnnnnnnnnnnnnnnnnnnnnnnnnnnnnnnnnnnnnnnnnnnnnnnnnnnnnnnnnnnnnnnnnnnnnnnnnnnnnnnnnnnnnnnnnnnnnnnnnnnnnnnnnnnnnnnnnnnnnnnnnnnnnnnnnnnnnnnnnnnnnnnnnnnnnnnnnnnnnnnnnnnnnnnnnnnnnnnnnnnnnnnnnnnnnnnnnnnnnnnnnnnnnnnnnnnnnnnnnnnnnnnnnnnnnnnnnnnnnnnnnnnnnnnnnnnnnnnnnnnnnnnnnnnnnnnnnnnnnnnnnnnnnnnnnnnnnnnnnnnnnnnnnnnnnnnnnnnnnnnnnnnnnnnnnnnnnnnnnnnnnnnnnnnnnnnnnnnnnnnnnnnnnnnnnnnnnnnnnnnnnnnnnnnnnnnnnnnnnnnnnnnnnnnnnnnnnnnnnnnnnnnnnnnnnnnnnnnnnnnnnnnnnnnnnnnnnnnnnnnnnnnnnnnnnnnnnnnnnnnnnnnnnnnnnnnnnnnnnnnnnnnnnnnnnnnnnnnnnnnnnnnnnnnnnnnnnnnnnnnnnnnnnnnnnnnnnnnnnnnnnnnnnnnnnnnnnnnnnnnnnnnnnnnnnnnnnnnnnnnnnnnnnnnnnnnnnnnnnnnnnnnnnnnnnnnnnnnnnnnnnnnnnnnnnnnnnnnnnnnnnnnnnnnnnnnnnnnnnnnnnnnnnnnnnnnnnnnnnnnnnnnnnnnnnnnnnnnnnnnnnnnnnnnnnnnnnnnnnnnnnnnnnnnnnnnnnnnnnnnnnnnnnnnnnnnnnnnnnnnnnnnnnnnnnnnnnnnnnnnnnnnnnnnnnnnnnnnnnnnnnnnnnnnnnnnnnnnnnnnnnnnnnnnnnnnnnnnnnnnnnnnnnnnnnnnnnnnnnnnnnnnnnnnnnnnnnnnnnnnnnnnnnnnnnnnnnnnnnnnnnnnnnnnnnnnnnnnnnnnnnnnnnnnnnnnnnnnnnnnnnnnnnnnnnnnnnnnnnnnnnnnnnnnnnnnnnnnnnnnnnnnnnnnnnnnnnnnnnnnnnnnnnnnnnnnnnnnnnnnnnnnnnnnnnnnnnnnnnnnnnnnnnnnnnnnnnnnnnnnnnnnnnnnnnnnnnnnnnnnnnnnnnnnnnnnnnnnnnnnnnnnnnnnnnnnnnnnnnnnnnnnnnnnnnnnnnnnnnnnnnnnnnnnnnnnnnnnnnnnnnnnnnnnnnnnnnnnnnnnnnnnnnnnnnnnnnnnnnnnnnnnnnnnnnnnnnnnnnnnnnnnnnnnnnnnnnnnnnnnnnnnnnnnnnnnnnnnnnnnnnnnnnnnnnnnnnnnnnnnnnnnnnnnnnnnnnnnnnnnnnnnnnnnnnnnnnnnnnnnnnnnnnnnnnnnnnnnnnnnnnnnnnnnnnnnnnnnnnnnnnnnnnnnnnnnnnnnnnnnnnnnnnnnnnnnnnnnnnnnnnnnnnnnnnnnnnnnnnnnnnnnnnnnnnnnnnnnnnnnnnnnnnnnnnnnnnnnnnnnnnnnnnnnnnnnnnnnnnnnnnnnnnnnnnnnnnnnnnnnnnnnnnnnnnnnnnnnnnnnnnnnnnnnnnnnnnnnnnnnnnnnnnnnnnnnnnnnnnnnnnnnnnnnnnnnnnnnnnnnnnnnnnnnnnnnnnnnnnnnnnnnnnnnnnnnnnnnnnnnnnnnnnnnnnnnnnnnnnnnnnnnnnnnnnnnnnnnnnnnnnnnnnnnnnnnnnnnnnnnnnnnnnnnnnnnnnnnnnnnnnnnnnnnnnnnnnnnnnnnnnnnnnnnnnnnnnnnnnnnnnnnnnnnnnnnnnnnnnnnnnnnnnnnnnnnnnnnnnnnnnnnnnnnnnnnnnnnnnnnnnnnnnnnnnnnnnnnnnnnnnnnnnnnnnnnnnnnnnnnnnnnnnnnnnnnnnnnnnnnnnnnnnnnnnnnnnnnnnnnnnnnnnnnnnnnnnnnnnnnnnnnnnnnnnnnnnnnnnnnnnnnnnnnnnnnnnnnnnnnnnnnnnnnnnnnnnnnnnnnnnnnnnnnnnnnnnnnnnnnnnnnnnnnnnnnnnnnnnnnnnnnnnnnnnnnnnnnnnnnnnnnnnnnnnnnnnnnnnnnnnnnnnnnnnnnnnnnnnnnnnnnnnnnnnnnnnnnnnnnnnnnnnnnnnnnnnnnnnnnnnnnnnnnnnnnnnnnnnnnnnnnnnnnnnnnnnnnnnnnnnnnnnnnnnnnnnnnnnnnnnnnnnnnnnnnnnnnnnnnnnnnnnnnnnnnnnnnnnnnnnnnnnnnnnnnnnnnnnnnnnnnnnnnnnnnnnnnnnnnnnnnnnnnnnnnnnnnnnnnnnnnnnnnnnnnnnnnnnnnnnnnnnnnnnnnnnnnnnnnnnnnnnnnnnnnnnnnnnnnnnnnnnnnnnnnnnnnnnnnnnnnnnnnnnnnnnnnnnnnnnnnnnnnnnnnnnnnnnnnnnnnnnnnnnnnnnnnnnnnnnnnnnnnnnnnnnnnnnnnnnnnnnnnnnnnnnnnnnnnnnnnnnnnnnnnnnnnnnnnnnnnnnnnnnnnnnnnnnnnnnnnnnnnnnnnnnnnnnnnnnnnnnnnnnnnnnnnnnnnnnnnnnnnnnnnnnnnnnnnnnnnnnnnnnnnnnnnnnnnnnnnnnnnnnnnnnnnnnnnnnnnnnnnnnnnnnnnnnnnnnnnnnnnnnnnnnnnnnnnnnnnnnnnnnnnnnnnnnnnnnnnnnnnnnnnnnnnnnnnnnnnnnnnnnnnnnnnnnnnnnnnnnnnnnnnnnnnnnnnnnnnnnnnnnnnnnnnnnnnnnnnnnnnnnnnnnnnnnnnnnnnnnnnnnnnnnnnnnnnnnnnnnnnnnnnnnnnnnnnnnnnnnnnnnnnnnnnnnnnnnnnnnnnnnnnnnnnnnnnnnnnnnnnnnnnnnnnnnnnnnnnnnnnnnnnnnnnnnnnnnnnnnnnnnnnnnnnnnnnnnnnnnnnnnnnnnnnnnnnnnnnnnnnnnnnnnnnnnnnnnnnnnnnnnnnnnnnnnnnnnnnnnnnnnnnnnnnnnnnnnnnnnnnnnnnnnnnnnnnnnnnnnnnnnnnnnnnnnnnnnnnnnnnnnnnnnnnnnnnnnnnnnnnnnnnnnnnnnnnnnnnnnnnnnnnnnnnnnnnnnnnnnnnnnnnnnnnnnnnnnnnnnnnnnnnnnnnnnnnnnnnnnnnnnnnnnnnnnnnnnnnnnnnnnnnnnnnnnnnnnnnnnnnnnnnnnnnnnnnnnnnnnnnnnnnnnnnnnnnnnnnnnnnnnnnnnnnnnnnnnnnnnnnnnnnnnnnnnnnnnnnnnnnnnnnnnnnnnnnnnnnnnnnnnnnnnnnnnnnnnnnnnnnnnnnnnnnnnnnnnnnnnnnnnnnnnnnnnnnnnnnnnnnnnnnnnnnnnnnnnnnnnnnnnnnnnnnnnnnnnnnnnnnnnnnnnnnnnnnnnnnnnnnnnnnnnnnnnnnnnnnnnnnnnnnnnnnnnnnnnnnnnnnnnnnnnnnnnnnnnnnnnnnnnnnnnnnnnnnnnnnnnnnnnnnnnnnnnnnnnnnnnnnnnnnnnnnnnnnnnnnnnnnnnnnnnnnnnnnnnnnnnnnnnnnnnnnnnnnnnnnnnnnnnnnnnnnnnnnnnnnnnnnnnnnnnnnnnnnnnnnnnnnnnnnnnnnnnnnnnnnnnnnnnnnnnnnnnnnnnnnnnnnnnnnnnnnnnnnnnnnnnnnnnnnnnnnnnnnnnnnnnnnnnnnnnnnnnnnnnnnnnnnnnnnnnnnnnnnnnnnnnnnnnnnnnnnnnnnnnnnnnnnnnnnnnnnnnnnnnnnnnnnnnnnnnnnnnnnnnnnnnnnnnnnnnnnnnnnnnnnnnnnnnnnnnnnnnnnnnnnnnnnnnnnnnnnnnnnnnnnnnnnnnnnnnnnnnnnnnnnnnnnnnnnnnnnnnnnnnnnnnnnnnnnnnnnnnnnnnnnnnnnnnnnnnnnnnnnnnnnnnnnnnnnnnnnnnnnnnnnnnnnnnnnnnnnnnnnnnnnnnnnnnnnnnnnnnnnnnnnnnnnnnnnnnnnnnnnnnnnnnnnnnnnnnnnnnnnnnnnnnnnnnnnnnnnnnnnnnnnnnnnnnnnnnnnnnnnnnnnnnnnnnnnnnnnnnnnnnnnnnnnnnnnnnnnnnnnnnnnnnnnnnnnnnnnnnnnnnnnnnnnnnnnnnnnnnnnnnnnnnnnnnnnnnnnnnnnnnnnnnnnnnnnnnnnnnnnnnnnnnnnnnnnnnnnnnnnnnnnnnnnnnnnnnnnnnnnnnnnnnnnnnnnnnnnnnnnnnnnnnnnnnnnnnnnnnnnnnnnnnnnnnnnnnnnnnnnnnnnnnnnnnnnnnnnnnnnnnnnnnnnnnnnnnnnnnnnnnnnnnnnnnnnnnnnnnnnnnnnnnnnnnnnnnnnnnnnnnnnnnnnnnnnnnnnnnnnnnnnnnnnnnnnnnnnnnnnnnnnnnnnnnnnnnnnnnnnnnnnnnnnnnnnnnnnnnnnnnnnnnnnnnnnnnnnnnnnnnnnnnnnnnnnnnnnnnnnnnnnnnnnnnnnnnnnnnnnnnnnnnnnnnnnnnnnnnnnnnnnnnnnnnnnnnnnnnnnnnnnnnnnnnnnnnnnnnnnnnnnnnnnnnnnnnnnnnnnnnnnnnnnnnnnnnnnnnnnnnnnnnnnnnnnnnnnnnnnnnnnnnnnnnnnnnnnnnnnnnnnnnnnnnnnnnnnnnnnnnnnnnnnnnnnnnnnnnnnnnnnnnnnnnnnnnnnnnnnnnnnnnnnnnnnnnnnnnnnnnnnnnnnnnnnnnnnnnnnnnnnnnnnnnnnnnnnnnnnnnnnnnnnnnnnnnnnnnnnnnnnnnnnnnnnnnnnnnnnnnnnnnnnnnnnnnnnnnnnnnnnnnnnnnnnnnnnnnnnnnnnnnnnnnnnnnnnnnnnnnnnnnnnnnnnnnnnnnnnnnnnnnnnnnnnnnnnnnnnnnnnnnnnnnnnnnnnnnnnnnnnnnnnnnnnnnnnnnnnnnnnnnnnnnnnnnnnnnnnnnnnnnnnnnnnnnnnnnnnnnnnnnnnnnnnnnnnnnnnnnnnnnnnnnnnnnnnnnnnnnnnnnnnnnnnnnnnnnnnnnnnnnnnnnnnnnnnnnnnnnnnnnnnnnnnnnnnnnnnnnnnnnnnnnnnnnnnnnnnnnnnnnnnnnnnnnnnnnnnnnnnnnnnnnnnnnnnnnnnnnnnnnnnnnnnnnnnnnnnnnnnnnnnnnnnnnnnnnnnnnnnnnnnnnnnnnnnnnnnnnnnnnnnnnnnnnnnnnnnnnnnnnnnnnnnnnnnnnnnnnnnnnnnnnnnnnnnnnnnnnnnnnnnnnnnnnnnnnnnnnnnnnnnnnnnnnnnnnnnnnnnnnnnnnnnnnnnnnnnnnnnnnnnnnnnnnnnnnnnnnnnnnnnnnnnnnnnnnnnnnnnnnnnnnnnnnnnnnnnnnnnnnnnnnnnnnnnnnnnnnnnnnnnnnnnnnnnnnnnnnnnnnnnnnnnnnnnnnnnnnnnnnnnnnnnnnnnnnnnnnnnnnnnnnnnnnnnnnnnnnnnnnnnnnnnnnnnnnnnnnnnnnnnnnnnnnnnnnnnnnnnnnnnnnnnnnnnnnnnnnnnnnnnnnnnnnnnnnnnnnnnnnnnnnnnnnnnnnnnnnnnnnnnnnnnnnnnnnnnnnnnnnnnnnnnnnnnnnnnnnnnnnnnnnnnnnnnnnnnnnnnnnnnnnnnnnnnnnnnnnnnnnnnnnnnnnnnnnnnnnnnnnnnnnnnnnnnnnnnnnnnnnnnnnnnnnnnnnnnnnnnnnnnnnnnnnnnnnnnnnnnnnnnnnnnnnnnnnnnnnnnnnnnnnnnnnnnnnnnnnnnnnnnnnnnnnnnnnnnnnnnnnnnnnnnnnnnnnnnnnnnnnnnnnnnnnnnnnnnnnnnnnnnnnnnnnnnnnnnnnnnnnnnnnnnnnnnnnnnnnnnnnnnnnnnnnnnnnnnnnnnnnnnnnnnnnnnnnnnnnnnnnnnnnnnnnnnnnnnnnnnnnnnnnnnnnnnnnnnnnnnnnnnnnnnnnnnnnnnnnnnnnnnnnnnnnnnnnnnnnnnnnnnnnnnnnnnnnnnnnnnnnnnnnnnnnnnnnnnnnnnnnnnnnnnnnnnnnnnnnnnnnnnnnnnnnnnnnnnnnnnnnnnnnnnnnnnnnnnnnnnnnnnnnnnnnnnnnnnnnnnnnnnnnnnnnnnnnnnnnnnnnnnnnnnnnnnnnnnnnnnnnnnnnnnnnnnnnnnnnnnnnnnnnnnnnnnnnnnnnnnnnnnnnnnnnnnnnnnnnnnnnnnnnnnnnnnnnnnnnnnnnnnnnnnnnnnnnnnnnnnnnnnnnnnnnnnnnnnnnnnnnnnnnnnnnnnnnnnnnnnnnnnnnnnnnnnnnnnnnnnnnnnnnnnnnnnnnnnnnnnnnnnnnnnnnnnnnnnnnnnnnnnnnnnnnnnnnnnnnnnnnnnnnnnnnnnnnnnnnnnnnnnnnnnnnnnnnnnnnnnnnnnnnnnnnnnnnnnnnnnnnnnnnnnnnnnnnnnnnnnnnnnnnnnnnnnnnnnnnnnnnnnnnnnnnnnnnnnnnnnnnnnnnnnnnnnnnnnnnnnnnnnnnnnnnnnnnnnnnnnnnnnnnnnnnnnnnnnnnnnnnnnnnnnnnnnnnnnnnnnnnnnnnnnnnnnnnnnnnnnnnnnnnnnnnnnnnnnnnnnnnnnnnnnnnnnnnnnnnnnnnnnnnnnnnnnnnnnnnnnnnnnnnnnnnnnnnnnnnnnnnnnnnnnnnnnnnnnnnnnnnnnnnnnnnnnnnnnnnnnnnnnnnnnnnnnnnnnnnnnnnnnnnnnnnnnnnnnnnnnnnnnnnnnnnnnnnnnnnnnnnnnnnnnnnnnnnnnnnnnnnnnnnnnnnnnnnnnnnnnnnnnnnnnnnnnnnnnnnnnnnnnnnnnnnnnnnnnnnnnnnnnnnnnnnnnnnnnnnnnnnnnnnnnnnnnnnnnnnnnnnnnnnnnnnnnnnnnnnnnnnnnnnnnnnnnnnnnnnnnnnnnnnnnnnnnnnnnnnnnnnnnnnnnnnnnnnnnnnnnnnnnnnnnnnnnnnnnnnnnnnnnnnnnnnnnnnnnnnnnnnnnnnnnnnnnnnnnnnnnnnnnnnnnnnnnnnnnnnnnnnnnnnnnnnnnnnnnnnnnnnnnnnnnnnnnnnnnnnnnnnnnnnnnnnnnnnnnnnnnnnnnnnnnnnnnnnnnnnnnnnnnnnnnnnnnnnnnnnnnnnnnnnnnnnnnnnnnnnnnnnnnnnnnnnnnnnnnnnnnnnnnnnnnnnnnnnnnnnnnnnnnnnnnnnnnnnnnnnnnnnnnnnnnnnnnnnnnnnnnnnnnnnnnnnnnnnnnnnnnnnnnnnnnnnnnnnnnnnnnnnnnnnnnnnnnnnnnnnnnnnnnnnnnnnnnnnnnnnnnnnnnnnnnnnnnnnnnnnnnnnnnnnnnnnnnnnnnnnnnnnnnnnnnnnnnnnnnnnnnnnnnnnnnnnnnnnnnnnnnnnnnnnnnnnnnnnnnnnnnnnnnnnnnnnnnnnnnnnnnnnnnnnnnnnnnnnnnnnnnnnnnnnnnnnnnnnnnnnnnnnnnnnnnnnnnnnnnnnnnnnnnnnnnnnnnnnnnnnnnnnnnnnnnnnnnnnnnnnnnnnnnnnnnnnnnnnnnnnnnnnnnnnnnnnnnnnnnnnnnnnnnnnnnnnnnnnnnnnnnnnnnnnnnnnnnnnnnnnnnnnnnnnnnnnnnnnnnnnnnnnnnnnnnnnnnnnnnnnnnnnnnnnnnnnnnnnnnnnnnnnnnnnnnnnnnnnnnnnnnnnnnnnnnnnnnnnnnnnnnnnnnnnnnnnnnnnnnnnnnnnnnnnnnnnnnnnnnnnnnnnnnnnnnnnnnnnnnnnnnnnnnnnnnnnnnnnnnnnnnnnnnnnnnnnnnnnnnnnnnnnnnnnnnnnnnnnnnnnnnnnnnnnnnnnnnnnnnnnnnnnnnnnnnnnnnnnnnnnnnnnnnnnnnnnnnnnnnnnnnnnnnnnnnnnnnnnnnnnnnnnnnnnnnnnnnnnnnnnnnnnnnnnnnnnnnnnnnnnnnnnnnnnnnnnnnnnnnnnnnnnnnnnnnnnnnnnnnnnnnnnnnnnnnnnnnnnnnnnnnnnnnnnnnnnnnnnnnnnnnnnnnnnnnnnnnnnnnnnnnnnnnnnnnnnnnnnnnnnnnnnnnnnnnnnnnnnnnnnnnnnnnnnnnnnnnnnnnnnnnnnnnnnnnnnnnnnnnnnnnnnnnnnnnnnnnnnnnnnnnnnnnnnnnnnnnnnnnnnnnnnnnnnnnnnnnnnnnnnnnnnnnnnnnnnnnnnnnnnnnnnnnnnnnnnnnnnnnnnnnnnnnnnnnnnnnnnnnnnnnnnnnnnnnnnnnnnnnnnnnnnnnnnnnnnnnnnnnnnnnnnnnnnnnnnnnnnnnnnnnnnnnnnnnnnnnnnnnnnnnnnnnnnnnnnnnnnnnnnnnnnnnnnnnnnnnnnnnnnnnnnnnnnnnnnnnnnnnnnnnnnnnnnnnnnnnnnnnnnnnnnnnnnnnnnnnnnnnnnnnnnnnnnnnnnnnnnnnnnnnnnnnnnnnnnnnnnnnnnnnnnnnnnnnnnnnnnnnnnnnnnnnnnnnnnnnnnnnnnnnnnnnnnnnnnnnnnnnnnnnnnnnnnnnnnnnnnnnnnnnnnnnnnnnnnnnnnnnnnnnnnnnnnnnnnnnnnnnnnnnnnnnnnnnnnnnnnnnnnnnnnnnnnnnnnnnnnnnnnnnnnnnnnnnnnnnnnnnnnnnnnnnnnnnnnnnnnnnnnnnnnnnnnnnnnnnnnnnnnnnnnnnnnnnnnnnnnnnnnnnnnnnnnnnnnnnnnnnnnnnnnnnnnnnnnnnnnnnnnnnnnnnnnnnnnnnnnnnnnnnnnnnnnnnnnnnnnnnnnnnnnnnnnnnnnnnnnnnnnnnnnnnnnnnnnnnnnnnnnnnnnnnnnnnnnnnnnnnnnnnnnnnnnnnnnnnnnnnnnnnnnnnnnnnnnnnnnnnnnnnnnnnnnnnnnnnnnnnnnnnnnnnnnnnnnnnnnnnnnnnnnnnnnnnnnnnnnnnnnnnnnnnnnnnnnnnnnnnnnnnnnnnnnnnnnnnnnnnnnnnnnnnnnnnnnnnnnnnnnnnnnnnnnnnnnnnnnnnnnnnnnnnnnnnnnnnnnnnnnnnnnnnnnnnnnnnnnnnnnnnnnnnnnnnnnnnnnnnnnnnnnnnnnnnnnnnnnnnnnnnnnnnnnnnnnnnnnnnnnnnnnnnnnnnnnnnnnnnnnnnnnnnnnnnnnnnnnnnnnnnnnnnnnnnnnnnnnnnnnnnnnnnnnnnnnnnnnnnnnnnnnnnnnnnnnnnnnnnnnnnnnnnnnnnnnnnnnnnnnnnnnnnnnnnnnnnnnnnnnnnnnnnnnnnnnnnnnnnnnnnnnnnnnnnnnnnnnnnnnnnnnnnnnnnnnnnnnnnnnnnnnnnnnnnnnnnnnnnnnnnnnnnnnnnnnnnnnnnnnnnnnnnnnnnnnnnnnnnnnnnnnnnnnnnnnnnnnnnnnnnnnnnnnnnnnnnnnnnnnnnnnnnnnnnnnnnnnnnnnnnnnnnnnnnnnnnnnnnnnnnnnnnnnnnnnnnnnnnnnnnnnnnnnnnnnnnnnnnnnnnnnnnnnnnnnnnnnnnnnnnnnnnnnnnnnnnnnnnnnnnnnnnnnnnnnnnnnnnnnnnnnnnnnnnnnnnnnnnnnnnnnnnnnnnnnnnnnnnnnnnnnnnnnnnnnnnnnnnnnnnnnnnnnnnnnnnnnnnnnnnnnnnnnnnnnnnnnnnnnnnnnnnnnnnnnnnnnnnnnnnnnnnnnnnnnnnnnnnnnnnnnnnnnnnnnnnnnnnnnnnnnnnnnnnnnnnnnnnnnnnnnnnnnnnnnnnnnnnnnnnnnnnnnnnnnnnnnnnnnnnnnnnnnnnnnnnnnnnnnnnnnnnnnnnnnnnnnnnnnnnnnnnnnnnnnnnnnnnnnnnnnnnnnnnnnnnnnnnnnnnnnnnnnnnnnnnnnnnnnnnnnnnnnnnnnnnnnnnnnnnnnnnnnnnnnnnnnnnnnnnnnnnnnnnnnnnnnnnnnnnnnnnnnnnnnnnnnnnnnnnnnnnnnnnnnnnnnnnnnnnnnnnnnnnnnnnnnnnnnnnnnnnnnnnnnnnnnnnnnnnnnnnnnnnnnnnnnnnnnnnnnnnnnnnnnnnnnnnnnnnnnnnnnnnnnnnnnnnnnnnnnnnnnnnnnnnnnnnnnnnnnnnnnnnnnnnnnnnnnnnnnnnnnnnnnnnnnnnnnnnnnnnnnnnnnnnnnnnnnnnnnnnnnnnnnnnnnnnnnnnnnnnnnnnnnnnnnnnnnnnnnnnnnnnnnnnnnnnnnnnnnnnnnnnnnnnnnnnnnnnnnnnnnnnnnnnnnnnnnnnnnnnnnnnnnnnnnnnnnnnnnnnnnnnnnnnnnnnnnnnnnnnnnnnnnnnnnnnnnnnnnnnnnnnnnnnnnnnnnnnnnnnnnnnnnnnnnnnnnnnnnnnnnnnnnnnnnnnnnnnnnnnnnnnnnnnnnnnnnnnnnnnnnnnnnnnnnnnnnnnnnnnnnnnnnnnnnnnnnnnnnnnnnnnnnnnnnnnnnnnnnnnnnnnnnnnnnnnnnnnnnnnnnnnnnnnnnnnnnnnnnnnnnnnnnnnnnnnnnnnnnnnnnnnnnnnnnnnnnnnnnnnnnnnnnnnnnnnnnnnnnnnnnnnnnnnnnnnnnnnnnnnnnnnnnnnnnnnnnnnnnnnnnnnnnnnnnnnnnnnnnnnnnnnnnnnnnnnnnnnnnnnnnnnnnnnnnnnnnnnnnnnnnnnnnnnnnnnnnnnnnnnnnnnnnnnnnnnnnnnnnnnnnnnnnnnnnnnnnnnnnnnnnnnnnnnnnnnnnnnnnnnnnnnnnnnnnnnnnnnnnnnnnnnnnnnnnnnnnnnnnnnnnnnnnnnnnnnnnnnnnnnnnnnnnnnnnnnnnnnnnnnnnnnnnnnnnnnnnnnnnnnnnnnnnnnnnnnnnnnnnnnnnnnnnnnnnnnnnnnnnnnnnnnnnnnnnnnnnnnnnnnnnnnnnnnnnnnnnnnnnnnnnnnnnnnnnnnnnnnnnnnnnnnnnnnnnnnnnnnnnnnnnnnnnnnnnnnnnnnnnnnnnnnnnnnnnnnnnnnnnnnnnnnnnnnnnnnnnnnnnnnnnnnnnnnnnnnnnnnnnnnnnnnnnnnnnnnnnnnnnnnnnnnnnnnnnnnnnnnnnnnnnnnnnnnnnnnnnnnnnnnnnnnnnnnnnnnnnnnnnnnnnnnnnnnnnnnnnnnnnnnnnnnnnnnnnnnnnnnnnnnnnnnnnnnnnnnnnnnnnnnnnnnnnnnnnnnnnnnnnnnnnnnnnnnnnnnnnnnnnnnnnnnnnnnnnnnnnnnnnnnnnnnnnnnnnnnnnnnnnnnnnnnnnnnnnnnnnnnnnnnnnnnnnnnnnnnnnnnnnnnnnnnnnnnnnnnnnnnnnnnnnnnnnnnnnnnnnnnnnnnnnnnnnnnnnnnnnnnnnnnnnnnnnnnnnnnnnnnnnnnnnnnnnnnnnnnnnnnnnnnnnnnnnnnnnnnnnnnnnnnnnnnnnnnnnnnnnnnnnnnnnnnnnnnnnnnnnnnnnnnnnnnnnnnnnnnnnnnnnnnnnnnnnnnnnnnnnnnnnnnnnnnnnnnnnnnnnnnnnnnnnnnnnnnnnnnnnnnnnnnnnnnnnnnnnnnnnnnnnnnnnnnnnnnnnnnnnnnnnnnnnnnnnnnnnnnnnnnnnnnnnnnnnnnnnnnnnnnnnnnnnnnnnnnnnnnnnnnnnnnnnnnnnnnnnnnnnnnnnnnnnnnnnnnnnnnnnnnnnnnnnnnnnnnnnnnnnnnnnnnnnnnnnnnnnnnnnnnnnnnnnnnnnnnnnnnnnnnnnnnnnnnnnnnnnnnnnnnnnnnnnnnnnnnnnnnnnnnnnnnnnnnnnnnnnnnnnnnnnnnnnnnnnnnnnnnnnnnnnnnnnnnnnnnnnnnnnnnnnnnnnnnnnnnnnnnnnnnnnnnnnnnnnnnnnnnnnnnnnnnnnnnnnnnnnnnnnnnnnnnnnnnnnnnnnnnnnnnnnnnnnnnnnnnnnnnnnnnnnnnnnnnnnnnnnnnnnnnnnnnnnnnnnnnnnnnnnnnnnnnnnnnnnnnnnnnnnnnnnnnnnnnnnnnnnnnnnnnnnnnnnnnnnnnnnnnnnnnnnnnnnnnnnnnnnnnnnnnnnnnnnnnnnnnnnnnnnnnnnnnnnnnnnnnnnnnnnnnnnnnnnnnnnnnnnnnnnnnnnnnnnnnnnnnnnnnnnnnnnnnnnnnnnnnnnnnnnnnnnnnnnnnnnnnnnnnnnnnnnnnnnnnnnnnnnnnnnnnnnnnnnnnnnnnnnnnnnnnnnnnnnnnnnnnnnnnnnnnnnnnnnnnnnnnnnnnnnnnnnnnnnnnnnnnnnnnnnnnnnnnnnnnnnnnnnnnnnnnnnnnnnnnnnnnnnnnnnnnnnnnnnnnnnnnnnnnnnnnnnnnnnnnnnnnnnnnnnnnnnnnnnnnnnnnnnnnnnnnnnnnnnnnnnnnnnnnnnnnnnnnnnnnnnnnnnnnnnnnnnnnnnnnnnnnnnnnnnnnnnnnnnnnnnnnnnnnnnnnnnnnnnnnnnnnnnnnnnnnnnnnnnnnnnnnnnnnnnnnnnnnnnnnnnnnnnnnnnnnnnnnnnnnnnnnnnnnnnnnnnnnnnnnnnnnnnnnnnnnnnnnnnnnnnnnnnnnnnnnnnnnnnnnnnnnnnnnnnnnnnnnnnnnnnnnnnnnnnnnnnnnnnnnnnnnnnnnnnnnnnnnnnnnnnnnnnnnnnnnnnnnnnnnnnnnnnnnnnnnnnnnnnnnnnnnnnnnnnnnnnnnnnnnnnnnnnnnnnnnnnnnnnnnnnnnnnnnnnnnnnnnnnnnnnnnnnnnnnnnnnnnnnnnnnnnnnnnnnnnnnnnnnnnnnnnnnnnnnnnnnnnnnnnnnnnnnnnnnnnnnnnnnnnnnnnnnnnnnnnnnnnnnnnnnnnnnnnnnnnnnnnnnnnnnnnnnnnnnnnnnnnnnnnnnnnnnnnnnnnnnnnnnnnnnnnnnnnnnnnnnnnnnnnnnnnnnnnnnnnnnnnnnnnnnnnnnnnnnnnnnnnnnnnnnnnnnnnnnnnnnnnnnnnnnnnnnnnnnnnnnnnnnnnnnnnnnnnnnnnnnnnnnnnnnnnnnnnnnnnnnnnnnnnnnnnnnnnnnnnnnnnnnnnnnnnnnnnnnnnnnnnnnnnnnnnnnnnnnnnnnnnnnnnnnnnnnnnnnnnnnnnnnnnnnnnnnnnnnnnnnnnnnnnnnnnnnnnnnnnnnnnnnnnnnnnnnnnnnnnnnnnnnnnnnnnnnnnnnnnnnnnnnnnnnnnnnnnnnnnnnnnnnnnnnnnnnnnnnnnnnnnnnnnnnnnnnnnnnnnnnnnnnnnnnnnnnnnnnnnnnnnnnnnnnnnnnnnnnnnnnnnnnnnnnnnnnnnnnnnnnnnnnnnnnnnnnnnnnnnnnnnnnnnnnnnnnnnnnnnnnnnnnnnnnnnnnnnnnnnnnnnnnnnnnnnnnnnnnnnnnnnnnnnnnnnnnnnnnnnnnnnnnnnnnnnnnnnnnnnnnnnnnnnnnnnnnnnnnnnnnnnnnnnnnnnnnnnnnnnnnnnnnnnnnnnnnnnnnnnnnnnnnnnnnnnnnnnnnnnnnnnnnnnnnnnnnnnnnnnnnnnnnnnnnnnnnnnnnnnnnnnnnnnnnnnnnnnnnnnnnnnnnnnnnnnnnnnnnnnnnnnnnnnnnnnnnnnnnnnnnnnnnnnnnnnnnnnnnnnnnnnnnnnnnnnnnnnnnnnnnnnnnnnnnnnnnnnnnnnnnnnnnnnnnnnnnnnnnnnnnnnnnnnnnnnnnnnnnnnnnnnnnnnnnnnnnnnnnnnnnnnnnnnnnnnnnnnnnnnnnnnnnnnnnnnnnnnnnnnnnnnnnnnnnnnnnnnnnnnnnnnnnnnnnnnnnnnnnnnnnnnnnnnnnnnnnnnnnnnnnnnnnnnnnnnnnnnnnnnnnnnnnnnnnnnnnnnnnnnnnnnnnnnnnnnnnnnnnnnnnnnnnnnnnnnnnnnnnnnnnnnnnnnnnnnnnnnnnnnnnnnnnnnnnnnnnnnnnnnnnnnnnnnnnnnnnnnnnnnnnnnnnnnnnnnnnnnnnnnnnnnnnnnnnnnnnnnnnnnnnnnnnnnnnnnnnnnnnnnnnnnnnnnnnnnnnnnnnnnnnnnnnnnnnnnnnnnnnnnnnnnnnnnnnnnnnnnnnnnnnnnnnnnnnnnnnnnnnnnnnnnnnnnnnnnnnnnnnnnnnnnnnnnnnnnnnnnnnnnnnnnnnnnnnnnnnnnnnnnnnnnnnnnnnnnnnnnnnnnnnnnnnnnnnnnnnnnnnnnnnnnnnnnnnnnnnnnnnnnnnnnnnnnnnnnnnnnnnnnnnnnnnnnnnnnnnnnnnnnnnnnnnnnnnnnnnnnnnnnnnnnnnnnnnnnnnnnnnnnnnnnnnnnnnnnnnnnnnnnnnnnnnnnnnnnnnnnnnnnnnnnnnnnnnnnnnnnnnnnnnnnnnnnnnnnnnnnnnnnnnnnnnnnnnnnnnnnnnnnnnnnnnnnnnnnnnnnnnnnnnnnnnnnnnnnnnnnnnnnnnnnnnnnnnnnnnnnnnnnnnnnnnnnnnnnnnnnnnnnnnnnnnnnnnnnnnnnnnnnnnnnnnnnnnnnnnnnnnnnnnnnnnnnnnnnnnnnnnnnnnnnnnnnnnnnnnnnnnnnnnnnnnnnnnnnnnnnnnnnnnnnnnnnnnnnnnnnnnnnnnnnnnnnnnnnnnnnnnnnnnnnnnnnnnnnnnnnnnnnnnnnnnnnnnnnnnnnnnnnnnnnnnnnnnnnnnnnnnnnnnnnnnnnnnnnnnnnnnnnnnnnnnnnnnnnnnnnnnnnnnnnnnnnnnnnnnnnnnnnnnnnnnnnnnnnnnnnnnnnnnnnnnnnnnnnnnnnnnnnnnnnnnnnnnnnnnnnnnnnnnnnnnnnnnnnnnnnnnnnnnnnnnnnnnnnnnnnnnnnnnnnnnnnnnnnnnnnnnnnnnnnnnnnnnnnnnnnnnnnnnnnnnnnnnnnnnnnnnnnnnnnnnnnnnnnnnnnnnnnnnnnnnnnnnnnnnnnnnnnnnnnnnnnnnnnnnnnnnnnnnnnnnnnnnnnnnnnnnnnnnnnnnnnnnnnnnnnnnnnnnnnnnnnnnnnnnnnnnnnnnnnnnnnnnnnnnnnnnnnnnnnnnnnnnnnnnnnnnnnnnnnnnnnnnnnnnnnnnnnnnnnnnnnnnnnnnnnnnnnnnnnnnnnnnnnnnnnnnnnnnnnnnnnnnnnnnnnnnnnnnnnnnnnnnnnnnnnnnnnnnnnnnnnnnnnnnnnnnnnnnnnnnnnnnnnnnnnnnnnnnnnnnnnnnnnnnnnnnnnnnnnnnnnnnnnnnnnnnnnnnnnnnnnnnnnnnnnnnnnnnnnnnnnnnnnnnnnnnnnnnnnnnnnnnnnnnnnnnnnnnnnnnnnnnnnnnnnnnnnnnnnnnnnnnnnnnnnnnnnnnnnnnnnnnnnnnnnnnnnnnnnnnnnnnnnnnnnnnnnnnnnnnnnnnnnnnnnnnnnnnnnnnnnnnnnnnnnnnnnnnnnnnnnnnnnnnnnnnnnnnnnnnnnnnnnnnnnnnnnnnnnnnnnnnnnnnnnnnnnnnnnnnnnnnnnnnnnnnnnnnnnnnnnnnnnnnnnnnnnnnnnnnnnnnnnnnnnnnnnnnnnnnnnnnnnnnnnnnnnnnnnnnnnnnnnnnnnnnnnnnnnnnnnnnnnnnnnnnnnnnnnnnnnnnnnnnnnnnnnnnnnnnnnnnnnnnnnnnnnnnnnnnnnnnnnnnnnnnnnnnnnnnnnnnnnnnnnnnnnnnnnnnnnnnnnnnnnnnnnnnnnnnnnnnnnnnnnnnnnnnnnnnnnnnnnnnnnnnnnnnnnnnnnnnnnnnnnnnnnnnnnnnnnnnnnnnnnnnnnnnnnnnnnnnnnnnnnnnnnnnnnnnnnnnnnnnnnnnnnnnnnnnnnnnnnnnnnnnnnnnnnnnnnnnnnnnnnnnnnnnnnnnnnnnnnnnnnnnnnnnnnnnnnnnnnnnnnnnnnnnnnnnnnnnnnnnnnnnnnnnnnnnnnnnnnnnnnnnnnnnnnnnnnnnnnnnnnnnnnnnnnnnnnnnnnnnnnnnnnnnnnnnnnnnnnnnnnnnnnnnnnnnnnnnnnnnnnnnnnnnnnnnnnnnnnnnnnnnnnnnnnnnnnnnnnnnnnnnnnnnnnnnnnnnnnnnnnnnnnnnnnnnnnnnnnnnnnnnnnnnnnnnnnnnnnnnnnnnnnnnnnnnnnnnnnnnnnnnnnnnnnnnnnnnnnnnnnnnnnnnnnnnnnnnnnnnnnnnnnnnnnnnnnnnnnnnnnnnnnnnnnnnnnnnnnnnnnnnnnnnnnnnnnnnnnnnnnnnnnnnnnnnnnnnnnnnnnnnnnnnnnnnnnnnnnnnnnnnnnnnnnnnnnnnnnnnnnnnnnnnnnnnnnnnnnnnnnnnnnnnnnnnnnnnnnnnnnnnnnnnnnnnnnnnnnnnnnnnnnnnnnnnnnnnnnnnnnnnnnnnnnnnnnnnnnnnnnnnnnnnnnnnnnnnnnnnnnnnnnnnnnnnnnnnnnnnnnnnnnnnnnnnnnnnnnnnnnnnnnnnnnnnnnnnnnnnnnnnnnnnnnnnnnnnnnnnnnnnnnnnnnnnnnnnnnnnnnnnnnnnnnnnnnnnnnnnnnnnnnnnnnnnnnnnnnnnnnnnnnnnnnnnnnnnnnnnnnnnnnnnnnnnnnnnnnnnnnnnnnnnnnnnnnnnnnnnnnnnnnnnnnnnnnnnnnnnnnnnnnnnnnnnnnnnnnnnnnnnnnnnnnnnnnnnnnnnnnnnnnnnnnnnnnnnnnnnnnnnnnnnnnnnnnnnnnnnnnnnnnnnnnnnnnnnnnnnnnnnnnnnnnnnnnnnnnnnnnnnnnnnnnnnnnnnnnnnnnnnnnnnnnnnnnnnnnnnnnnnnnnnnnnnnnnnnnnnnnnnnnnnnnnnnnnnnnnnnnnnnnnnnnnnnnnnnnnnnnnnnnnnnnnnnnnnnnnnnnnnnnnnnnnnnnnnnnnnnnnnnnnnnnnnnnnnnnnnnnnnnnnnnnnnnnnnnnnnnnnnnnnnnnnnnnnnnnnnnnnnnnnnnnnnnnnnnnnnnnnnnnnnnnnnnnnnnnnnnnnnnnnnnnnnnnnnnnnnnnnnnnnnnnnnnnnnnnnnnnnnnnnnnnnnnnnnnnnnnnnnnnnnnnnnnnnnnnnnnnnnnnnnnnnnnnnnnnnnnnnnnnnnnnnnnnnnnnnnnnnnnnnnnnnnnnnnnnnnnnnnnnnnnnnnnnnnnnnnnnnnnnnnnnnnnnnnnnnnnnnnnnnnnnnnnnnnnnnnnnnnnnnnnnnnnnnnnnnnnnnnnnnnnnnnnnnnnnnnnnnnnnnnnnnnnnnnnnnnnnnnnnnnnnnnnnnnnnnnnnnnnnnnnnnnnnnnnnnnnnnnnnnnnnnnnnnnnnnnnnnnnnnnnnnnnnnnnnnnnnnnnnnnnnnnnnnnnnnnnnnnnnnnnnnnnnnnnnnnnnnnnnnnnnnnnnnnnnnnnnnnnnnnnnnnnnnnnnnnnnnnnnnnnnnnnnnnnnnnnnnnnnnnnnnnnnnnnnnnnnnnnnnnnnnnnnnnnnnnnnnnnnnnnnnnnnnnnnnnnnnnnnnnnnnnnnnnnnnnnnnnnnnnnnnnnnnnnnnnnnnnnnnnnnnnnnnnnnnnnnnnnnnnnnnnnnnnnnnnnnnnnnnnnnnnnnnnnnnnnnnnnnnnnnnnnnnnnnnnnnnnnnnnnnnnnnnnnnnnnnnnnnnnnnnnnnnnnnnnnnnnnnnnnnnnnnnnnnnnnnnnnnnnnnnnnnnnnnnnnnnnnnnnnnnnnnnnnnnnnnnnnnnnnnnnnnnnnnnnnnnnnnnnnnnnnnnnnnnnnnnnnnnnnnnnnnnnnnnnnnnnnnnnnnnnnnnnnnnnnnnnnnnnnnnnnnnnnnnnnnnnnnnnnnnnnnnnnnnnnnnnnnnnnnnnnnnnnnnnnnnnnnnnnnnnnnnnnnnnnnnnnnnnnnnnnnnnnnnnnnnnnnnnnnnnnnnnnnnnnnnnnnnnnnnnnnnnnnnnnnnnnnnnnnnnnnnnnnnnnnnnnnnnnnnnnnnnnnnnnnnnnnnnnnnnnnnnnnnnnnnnnnnnnnnnnnnnnnnnnnnnnnnnnnnnnnnnnnnnnnnnnnnnnnnnnnnnnnnnnnnnnnnnnnnnnnnnnnnnnnnnnnnnnnnnnnnnnnnnnnnnnnnnnnnnnnnnnnnnnnnnnnnnnnnnnnnnnnnnnnnnnnnnnnnnnnnnnnnnnnnnnnnnnnnnnnnnnnnnnnnnnnnnnnnnnnnnnnnnnnnnnnnnnnnnnnnnnnnnnnnnnnnnnnnnnnnnnnnnnnnnnnnnnnnnnnnnnnnnnnnnnnnnnnnnnnnnnnnnnnnnnnnnnnnnnnnnnnnnnnnnnnnnnnnnnnnnnnnnnnnnnnnnnnnnnnnnnnnnnnnnnnnnnnnnnnnnnnnnnnnnnnnnnnnnnnnnnnnnnnnnnnnnnnnnnnnnnnnnnnnnnnnnnnnnnnnnnnnnnnnnnnnnnnnnnnnnnnnnnnnnnnnnnnnnnnnnnnnnnnnnnnnnnnnnnnnnnnnnnnnnnnnnnnnnnnnnnnnnnnnnnnnnnnnnnnnnnnnnnnnnnnnnnnnnnnnnnnnnnnnnnnnnnnnnnnnnnnnnnnnnnnnnnnnnnnnnnnnnnnnnnnnnnnnnnnnnnnnnnnnnnnnnnnnnnnnnnnnnnnnnnnnnnnnnnnnnnnnnnnnnnnnnnnnnnnnnnnnnnnnnnnnnnnnnnnnnnnnnnnnnnnnnnnnnnnnnnnnnnnnnnnnnnnnnnnnnnnnnnnnnnnnnnnnnnnnnnnnnnnnnnnnnnnnnnnnnnnnnnnnnnnnnnnnnnnnnnnnnnnnnnnnnnnnnnnnnnnnnnnnnnnnnnnnnnnnnnnnnnnnnnnnnnnnnnnnnnnnnnnnnnnnnnnnnnnnnnnnnnnnnnnnnnnnnnnnnnnnnnnnnnnnnnnnnnnnnnnnnnnnnnnnnnnnnnnnnnnnnnnnnnnnnnnnnnnnnnnnnnnnnnnnnnnnnnnnnnnnnnnnnnnnnnnnnnnnnnnnnnnnnnnnnnnnnnnnnnnnnnnnnnnnnnnnnnnnnnnnnnnnnnnnnnnnnnnnnnnnnnnnnnnnnnnnnnnnnnnnnnnnnnnnnnnnnnnnnnnnnnnnnnnnnnnnnnnnnnnnnnnnnnnnnnnnnnnnnnnnnnnnnnnnnnnnnnnnnnnnnnnnnnnnnnnnnnnnnnnnnnnnnnnnnnnnnnnnnnnnnnnnnnnnnnnnnnnnnnnnnnnnnnnnnnnnnnnnnnnnnnnnnnnnnnnnnnnnnnnnnnnnnnnnnnnnnnnnnnnnnnnnnnnnnnnnnnnnnnnnnnnnnnnnnnnnnnnnnnnnnnnnnnnnnnnnnnnnnnnnnnnnnnnnnnnnnnnnnnnnnnnnnnnnnnnnnnnnnnnnnnnnnnnnnnnnnnnnnnnnnnnnnnnnnnnnnnnnnnnnnnnnnnnnnnnnnnnnnnnnnnnnnnnnnnnnnnnnnnnnnnnnnnnnnnnnnnnnnnnnnnnnnnnnnnnnnnnnnnnnnnnnnnnnnnnnnnnnnnnnnnnnnnnnnnnnnnnnnnnnnnnnnnnnnnnnnnnnnnnnnnnnnnnnnnnnnnnnnnnnnnnnnnnnnnnnnnnnnnnnnnnnnnnnnnnnnnnnnnnnnnnnnnnnnnnnnnnnnnnnnnnnnnnnnnnnnnnnnnnnnnnnnnnnnnnnnnnnnnnnnnnnnnnnnnnnnnnnnnnnnnnnnnnnnnnnnnnnnnnnnnnnnnnnnnnnnnnnnnnnnnnnnnnnnnnnnnnnnnnnnnnnnnnnnnnnnnnnnnnnnnnnnnnnnnnnnnnnnnnnnnnnnnnnnnnnnnnnnnnnnnnnnnnnnnnnnnnnnnnnnnnnnnnnnnnnnnnnnnnnnnnnnnnnnnnnnnnnnnnnnnnnnnnnnnnnnnnnnnnnnnnnnnnnnnnnnnnnnnnnnnnnnnnnnnnnnnnnnnnnnnnnnnnnnnnnnnnnnnnnnnnnnnnnnnnnnnnnnnnnnnnnnnnnnnnnnnnnnnnnnnnnnnnnnnnnnnnnnnnnnnnnnnnnnnnnnnnnnnnnnnnnnnnnnnnnnnnnnnnnnnnnnnnnnnnnnnnnnnnnnnnnnnnnnnnnnnnnnnnnnnnnnnnnnnnnnnnnnnnnnnnnnnnnnnnnnnnnnnnnnnnnnnnnnnnnnnnnnnnnnnnnnnnnnnnnnnnnnnnnnnnnnnnnnnnnnnnnnnnnnnnnnnnnnnnnnnnnnnnnnnnnnnnnnnnnnnnnnnnnnnnnnnnnnnnnnnnnnnnnnnnnnnnnnnnnnnnnnnnnnnnnnnnnnnnnnnnnnnnnnnnnnnnnnnnnnnnnnnnnnnnnnnnnnnnnnnnnnnnnnnnnnnnnnnnnnnnnnnnnnnnnnnnnnnnnnnnnnnnnnnnnnnnnnnnnnnnnnnnnnnnnnnnnnnnnnnnnnnnnnnnnnnnnnnnnnnnnnnnnnnnnnnnnnnnnnnnnnnnnnnnnnnnnnnnnnnnnnnnnnnnnnnnnnnnnnnnnnnnnnnnnnnnnnnnnnnnnnnnnnnnnnnnnnnnnnnnnnnnnnnnnnnnnnnnnnnnnnnnnnnnnnnnnnnnnnnnnnnnnnnnnnnnnnnnnnnnnnnnnnnnnnnnnnnnnnnnnnnnnnnnnnnnnnnnnnnnnnnnnnnnnnnnnnnnnnnnnnnnnnnnnnnnnnnnnnnnnnnnnnnnnnnnnnnnnnnnnnnnnnnnnnnnnnnnnnnnnnnnnnnnnnnnnnnnnnnnnnnnnnnnnnnnnnnnnnnnnnnnnnnnnnnnnnnnnnnnnnnnnnnnnnnnnnnnnnnnnnnnnnnnnnnnnnnnnnnnnnnnnnnnnnnnnnnnnnnnnnnnnnnnnnnnnnnnnnnnnnnnnnnnnnnnnnnnnnnnnnnnnnnnnnnnnnnnnnnnnnnnnnnnnnnnnnnnnnnnnnnnnnnnnnnnnnnnnnnnnnnnnnnnnnnnnnnnnnnnnnnnnnnnnnnnnnnnnnnnnnnnnnnnnnnnnnnnnnnnnnnnnnnnnnnnnnnnnnnnnnnnnnnnnnnnnnnnnnnnnnnnnnnnnnnnnnnnnnnnnnnnnnnnnnnnnnnnnnnnnnnnnnnnnnnnnnnnnnnnnnnnnnnnnnnnnnnnnnnnnnnnnnnnnnnnnnnnnnnnnnnnnnnnnnnnnnnnnnnnnnnnnnnnnnnnnnnnnnnnnnnnnnnnnnnnnnnnnnnnnnnnnnnnnnnnnnnnnnnnnnnnnnnnnnnnnnnnnnnnnnnnnnnnnnnnnnnnnnnnnnnnnnnnnnnnnnnnnnnnnnnnnnnnnnnnnnnnnnnnnnnnnnnnnnnnnnnnnnnnnnnnnnnnnnnnnnnnnnnnnnnnnnnnnnnnnnnnnnnnnnnnnnnnnnnnnnnnnnnnnnnnnnnnnnnnnnnnnnnnnnnnnnnnnnnnnnnnnnnnnnnnnnnnnnnnnnnnnnnnnnnnnnnnnnnnnnnnnnnnnnnnnnnnnnnnnnnnnnnnnnnnnnnnnnnnnnnnnnnnnnnnnnnnnnnnnnnnnnnnnnnnnnnnnnnnnnnnnnnnnnnnnnnnnnnnnnnnnnnnnnnnnnnnnnnnnnnnnnnnnnnnnnnnnnnnnnnnnnnnnnnnnnnnnnnnnnnnnnnnnnnnnnnnnnnnnnnnnnnnnnnnnnnnnnnnnnnnnnnnnnnnnnnnnnnnnnnnnnnnnnnnnnnnnnnnnnnnnnnnnnnnnnnnnnnnnnnnnnnnnnnnnnnnnnnnnnnnnnnnnnnnnnnnnnnnnnnnnnnnnnnnnnnnnnnnnnnnnnnnnnnnnnnnnnnnnnnnnnnnnnnnnnnnnnnnnnnnnnnnnnnnnnnnnnnnnnnnnnnnnnnnnnnnnnnnnnnnnnnnnnnnnnnnnnnnnnnnnnnnnnnnnnnnnnnnnnnnnnnnnnnnnnnnnnnnnnnnnnnnnnnnnnnnnnnnnnnnnnnnnnnnnnnnnnnnnnnnnnnnnnnnnnnnnnnnnnnnnnnnnnnnnnnnnnnnnnnnnnnnnnnnnnnnnnnnnnnnnnnnnnnnnnnnnnnnnnnnnnnnnnnnnnnnnnnnnnnnnnnnnnnnnnnnnnnnnnnnnnnnnnnnnnnnnnnnnnnnnnnnnnnnnnnnnnnnnnnnnnnnnnnnnnnnnnnnnnnnnnnnnnnnnnnnnnnnnnnnnnnnnnnnnnnnnnnnnnnnnnnnnnnnnnnnnnnnnnnnnnnnnnnnnnnnnnnnnnnnnnnnnnnnnnnnnnnnnnnnnnnnnnnnnnnnnnnnnnnnnnnnnnnnnnnnnnnnnnnnnnnnnnnnnnnnnnnnnnnnnnnnnnnnnnnnnnnnnnnnnnnnnnnnnnnnnnnnnnnnnnnnnnnnnnnnnnnnnnnnnnnnnnnnnnnnnnnnnnnnnnnnnnnnnnnnnnnnnnnnnnnnnnnnnnnnnnnnnnnnnnnnnnnnnnnnnnnnnnnnnnnnnnnnnnnnnnnnnnnnnnnnnnnnnnnnnnnnnnnnnnnnnnnnnnnnnnnnnnnnnnnnnnnnnnnnnnnnnnnnnnnnnnnnnnnnnnnnnnnnnnnnnnnnnnnnnnnnnnnnnnnnnnnnnnnnnnnnnnnnnnnnnnnnnnnnnnnnnnnnnnnnnnnnnnnnnnnnnnnnnnnnnnnnnnnnnnnnnnnnnnnnnnnnnnnnnnnnnnnnnnnnnnnnnnnnnnnnnnnnnnnnnnnnnnnnnnnnnnnnnnnnnnnnnnnnnnnnnnnnnnnnnnnnnnnnnnnnnnnnnnnnnnnnnnnnnnnnnnnnnnnnnnnnnnnnnnnnnnnnnnnnnnnnnnnnnnnnnnnnnnnnnnnnnnnnnnnnnnnnnnnnnnnnnnnnnnnnnnnnnnnnnnnnnnnnnnnnnnnnnnnnnnnnnnnnnnnnnnnnnnnnnnnnnnnnnnnnnnnnnnnnnnnnnnnnnnnnnnnnnnnnnnnnnnnnnnnnnnnnnnnnnnnnnnnnnnnnnnnnnnnnnnnnnnnnnnnnnnnnnnnnnnnnnnnnnnnnnnnnnnnnnnnnnnnnnnnnnnnnnnnnnnnnnnnnnnnnnnnnnnnnnnnnnnnnnnnnnnnnnnnnnnnnnnnnnnnnnnnnnnnnnnnnnnnnnnnnnnnnnnnnnnnnnnnnnnnnnnnnnnnnnnnnnnnnnnnnnnnnnnnnnnnnnnnnnnnnnnnnnnnnnnnnnnnnnnnnnnnnnnnnnnnnnnnnnnnnnnnnnnnnnnnnnnnnnnnnnnnnnnnnnnnnnnnnnnnnnnnnnnnnnnnnnnnnnnnnnnnnnnnnnnnnnnnnnnnnnnnnnnnnnnnnnnnnnnnnnnnnnnnnnnnnnnnnnnnnnnnnnnnnnnnnnnnnnnnnnnnnnnnnnnnnnnnnnnnnnnnnnnnnnnnnnnnnnnnnnnnnnnnnnnnnnnnnnnnnnnnnnnnnnnnnnnnnnnnnnnnnnnnnnnnnnnnnnnnnnnnnnnnnnnnnnnnnnnnnnnnnnnnnnnnnnnnnnnnnnnnnnnnnnnnnnnnnnnnnnnnnnnnnnnnnnnnnnnnnnnnnnnnnnnnnnnnnnnnnnnnnnnnnnnnnnnnnnnnnnnnnnnnnnnnnnnnnnnnnnnnnnnnnnnnnnnnnnnnnnnnnnnnnnnnnnnnnnnnnnnnnnnnnnnnnnnnnnnnnnnnnnnnnnnnnnnnnnnnnnnnnnnnnnnnnnnnnnnnnnnnnnnnnnnnnnnnnnnnnnnnnnnnnnnnnnnnnnnnnnnnnnnnnnnnnnnnnnnnnnnnnnnnnnnnnnnnnnnnnnnnnnnnnnnnnnnnnnnnnnnnnnnnnnnnnnnnnnnnnnnnnnnnnnnnnnnnnnnnnnnnnnnnnnnnnnnnnnnnnnnnnnnnnnnnnnnnnnnnnnnnnnnnnnnnnnnnnnnnnnnnnnnnnnnnnnnnnnnnnnnnnnnnnnnnnnnnnnnnnnnnnnnnnnnnnnnnnnnnnnnnnnnnnnnnnnnnnnnnnnnnnnnnnnnnnnnnnnnnnnnnnnnnnnnnnnnnnnnnnnnnnnnnnnnnnnnnnnnnnnnnnnnnnnnnnnnnnnnnnnnnnnnnnnnnnnnnnnnnnnnnnnnnnnnnnnnnnnnnnnnnnnnnnnnnnnnnnnnnnnnnnnnnnnnnnnnnnnnnnnnnnnnnnnnnnnnnnnnnnnnnnnnnnnnnnnnnnnnnnnnnnnnnnnnnnnnnnnnnnnnnnnnnnnnnnnnnnnnnnnnnnnnnnnnnnnnnnnnnnnnnnnnnnnnnnnnnnnnnnnnnnnnnnnnnnnnnnnnnnnnnnnnnnnnnnnnnnnnnnnnnnnnnnnnnnnnnnnnnnnnnnnnnnnnnnnnnnnnnnnnnnnnnnnnnnnnnnnnnnnnnnnnnnnnnnnnnnnnnnnnnnnnnnnnnnnnnnnnnnnnnnnnnnnnnnnnnnnnnnnnnnnnnnnnnnnnnnnnnnnnnnnnnnnnnnnnnnnnnnnnnnnnnnnnnnnnnnnnnnnnnnnnnnnnnnnnnnnnnnnnnnnnnnnnnnnnnnnnnnnnnnnnnnnnnnnnnnnnnnnnnnnnnnnnnnnnnnnnnnnnnnnnnnnnnnnnnnnnnnnnnnnnnnnnnnnnnnnnnnnnnnnnnnnnnnnnnnnnnnnnnnnnnnnnnnnnnnnnnnnnnnnnnnnnnnnnnnnnnnnnnnnnnnnnnnnnnnnnnnnnnnnnnnnnnnnnnnnnnnnnnnnnnnnnnnnnnnnnnnnnnnnnnnnnnnnnnnnnnnnnnnnnnnnnnnnnnnnnnnnnnnnnnnnnnnnnnnnnnnnnnnnnnnnnnnnnnnnnnnnnnnnnnnnnnnnnnnnnnnnnnnnnnnnnnnnnnnnnnnnnnnnnnnnnnnnnnnnnnnnnnnnnnnnnnnnnnnnnnnnnnnnnnnnnnnnnnnnnnnnnnnnnnnnnnnnnnnnnnnnnnnnnnnnnnnnnnnnnnnnnnnnnnnnnnnnnnnnnnnnnnnnnnnnnnnnnnnnnnnnnnnnnnnnnnnnnnnnnnnnnnnnnnnnnnnnnnnnnnnnnnnnnnnnnnnnnnnnnnnnnnnnnnnnnnnnnnnnnnnnnnnnnnnnnnnnnnnnnnnnnnnnnnnnnnnnnnnnnnnnnnnnnnnnnnnnnnnnnnnnnnnnnnnnnnnnnnnnnnnnnnnnnnnnnnnnnnnnnnnnnnnnnnnnnnnnnnnnnnnnnnnnnnnnnnnnnnnnnnnnnnnnnnnnnnnnnnnnnnnnnnnnnnnnnnnnnnnnnnnnnnnnnnnnnnnnnnnnnnnnnnnnnnnnnnnnnnnnnnnnnnnnnnnnnnnnnnnnnnnnnnnnnnnnnnnnnnnnnnnnnnnnnnnnnnnnnnnnnnnnnnnnnnnnnnnnnnnnnnnnnnnnnnnnnnnnnnnnnnnnnnnnnnnnnnnnnnnnnnnnnnnnnnnnnnnnnnnnnnnnnnnnnnnnnnnnnnnnnnnnnnnnnnnnnnnnnnnnnnnnnnnnnnnnnnnnnnnnnnnnnnnnnnnnnnnnnnnnnnnnnnnnnnnnnnnnnnnnnnnnnnnnnnnnnnnnnnnnnnnnnnnnnnnnnnnnnnnnnnnnnnnnnnnnnnnnnnnnnnnnnnnnnnnnnnnnnnnnnnnnnnnnnnnnnnnnnnnnnnnnnnnnnnnnnnnnnnnnnnnnnnnnnnnnnnnnnnnnnnnnnnnnnnnnnnnnnnnnnnnnnnnnnnnnnnnnnnnnnnnnnnnnnnnnnnnnnnnnnnnnnnnnnnnnnnnnnnnnnnnnnnnnnnnnnnnnnnnnnnnnnnnnnnnnnnnnnnnnnnnnnnnnnnnnnnnnnnnnnnnnnnnnnnnnnnnnnnnnnnnnnnnnnnnnnnnnnnnnnnnnnnnnnnnnnnnnnnnnnnnnnnnnnnnnnnnnnnnnnnnnnnnnnnnnnnnnnnnnnnnnnnnnnnnnnnnnnnnnnnnnnnnnnnnnnnnnnnnnnnnnnnnnnnnnnnnnnnnnnnnnnnnnnnnnnnnnnnnnnnnnnnnnnnnnnnnnnnnnnnnnnnnnnnnnnnnnnnnnnnnnnnnnnnnnnnnnnnnnnnnnnnnnnnnnnnnnnnnnnnnnnnnnnnnnnnnnnnnnnnnnnnnnnnnnnnnnnnnnnnnnnnnnnnnnnnnnnnnnnnnnnnnnnnnnnnnnnnnnnnnnnnnnnnnnnnnnnnnnnnnnnnnnnnnnnnnnnnnnnnnnnnnnnnnnnnnnnnnnnnnnnnnnnnnnnnnnnnnnnnnnnnnnnnnnnnnnnnnnnnnnnnnnnnnnnnnnnnnnnnnnnnnnnnnnnnnnnnnnnnnnnnnnnnnnnnnnnnnnnnnnnnnnnnnnnnnnnnnnnnnnnnnnnnnnnnnnnnnnnnnnnnnnnnnnnnnnnnnnnnnnnnnnnnnnnnnnnnnnnnnnnnnnnnnnnnnnnnnnnnnnnnnnnnnnnnnnnnnnnnnnnnnnnnnnnnnnnnnnnnnnnnnnnnnnnnnnnnnnnnnnnnnnnnnnnnnnnnnnnnnnnnnnnnnnnnnnnnnnnnnnnnnnnnnnnnnnnnnnnnnnnnnnnnnnnnnnnnnnnnnnnnnnnnnnnnnnnnnnnnnnnnnnnnnnnnnnnnnnnnnnnnnnnnnnnnnnnnnnnnnnnnnnnnnnnnnnnnnnnnnnnnnnnnnnnnnnnnnnnnnnnnnnnnnnnnnnnnnnnnnnnnnnnnnnnnnnnnnnnnnnnnnnnnnnnnnnnnnnnnnnnnnnnnnnnnnnnnnnnnnnnnnnnnnnnnnnnnnnnnnnnnnnnnnnnnnnnnnnnnnnnnnnnnnnnnnnnnnnnnnnnnnnnnnnnnnnnnnnnnnnnnnnnnnnnnnnnnnnnnnnnnnnnnnnnnnnnnnnnnnnnnnnnnnnnnnnnnnnnnnnnnnnnnnnnnnnnnnnnnnnnnnnnnnnnnnnnnnnnnnnnnnnnnnnnnnnnnnnnnnnnnnnnnnnnnnnnnnnnnnnnnnnnnnnnnnnnnnnnnnnnnnnnnnnnnnnnnnnnnnnnnnnnnnnnnnnnnnnnnnnnnnnnnnnnnnnnnnnnnnnnnnnnnnnnnnnnnnnnnnnnnnnnnnnnnnnnnnnnnnnnnnnnnnnnnnnnnnnnnnnnnnnnnnnnnnnnnnnnnnnnnnnnnnnnnnnnnnnnnnnnnnnnnnnnnnnnnnnnnnnnnnnnnnnnnnnnnnnnnnnnnnnnnnnnnnnnnnnnnnnnnnnnnnnnnnnnnnnnnnnnnnnnnnnnnnnnnnnnnnnnnnnnnnnnnnnnnnnnnnnnnnnnnnnnnnnnnnnnnnnnnnnnnnnnnnnnnnnnnnnnnnnnnnnnnnnnnnnnnnnnnnnnnnnnnnnnnnnnnnnnnnnnnnnnnnnnnnnnnnnnnnnnnnnnnnnnnnnnnnnnnnnnnnnnnnnnnnnnnnnnnnnnnnnnnnnnnnnnnnnnnnnnnnnnnnnnnnnnnnnnnnnnnnnnnnnnnnnnnnnnnnnnnnnnnnnnnnnnnnnnnnnnnnnnnnnnnnnnnnnnnnnnnnnnnnnnnnnnnnnnnnnnnnnnnnnnnnnnnnnnnnnnnnnnnnnnnnnnnnnnnnnnnnnnnnnnnnnnnnnnnnnnnnnnnnnnnnnnnnnnnnnnnnnnnnnnnnnnnnnnnnnnnnnnnnnnnnnnnnnnnnnnnnnnnnnnnnnnnnnnnnnnnnnnnnnnnnnnnnnnnnnnnnnnnnnnnnnnnnnnnnnnnnnnnnnnnnnnnnnnnnnnnnnnnnnnnnnnnnnnnnnnnnnnnnnnnnnnnnnnnnnnnnnnnnnnnnnnnnnnnnnnnnnnnnnnnnnnnnnnnnnnnnnnnnnnnnnnnnnnnnnnnnnnnnnnnnnnnnnnnnnnnnnnnnnnnnnnnnnnnnnnnnnnnnnnnnnnnnnnnnnnnnnnnnnnnnnnnnnnnnnnnnnnnnnnnnnnnnnnnnnnnnnnnnnnnnnnnnnnnnnnnnnnnnnnnnnnnnnnnnnnnnnnnnnnnnnnnnnnnnnnnnnnnnnnnnnnnnnnnnnnnnnnnnnnnnnnnnnnnnnnnnnnnnnnnnnnnnnnnnnnnnnnnnnnnnnnnnnnnnnnnnnnnnnnnnnnnnnnnnnnnnnnnnnnnnnnnnnnnnnnnnnnnnnnnnnnnnnnnnnnnnnnnnnnnnnnnnnnnnnnnnnnnnnnnnnnnnnnnnnnnnnnnnnnnnnnnnnnnnnnnnnnnnnnnnnnnnnnnnnnnnnnnnnnnnnnnnnnnnnnnnnnnnnnnnnnnnnnnnnnnnnnnnnnnnnnnnnnnnnnnnnnnnnnnnnnnnnnnnnnnnnnnnnnnnnnnnnnnnnnnnnnnnnnnnnnnnnnnnnnnnnnnnnnnnnnnnnnnnnnnnnnnnnnnnnnnnnnnnnnnnnnnnnnnnnnnnnnnnnnnnnnnnnnnnnnnnnnnnnnnnnnnnnnnnnnnnnnnnnnnnnnnnnnnnnnnnnnnnnnnnnnnnnnnnnnnnnnnnnnnnnnnnnnnnnnnnnnnnnnnnnnnnnnnnnnnnnnnnnnnnnnnnnnnnnnnnnnnnnnnnnnnnnnnnnnnnnnnnnnnnnnnnnnnnnnnnnnnnnnnnnnnnnnnnnnnnnnnnnnnnnnnnnnnnnnnnnnnnnnnnnnnnnnnnnnnnnnnnnnnnnnnnnnnnnnnnnnnnnnnnnnnnnnnnnnnnnnnnnnnnnnnnnnnnnnnnnnnnnnnnnnnnnnnnnnnnnnnnnnnnnnnnnnnnnnnnnnnnnnnnnnnnnnnnnnnnnnnnnnnnnnnnnnnnnnnnnnnnnnnnnnnnnnnnnnnnnnnnnnnnnnnnnnnnnnnnnnnnnnnnnnnnnnnnnnnnnnnnnnnnnnnnnnnnnnnnnnnnnnnnnnnnnnnnnnnnnnnnnnnnnnnnnnnnnnnnnnnnnnnnnnnnnnnnnnnnnnnnnnnnnnnnnnnnnnnnnnnnnnnnnnnnnnnnnnnnnnnnnnnnnnnnnnnnnnnnnnnnnnnnnnnnnnnnnnnnnnnnnnnnnnnnnnnnnnnnnnnnnnnnnnnnnnnnnnnnnnnnnnnnnnnnnnnnnnnnnnnnnnnnnnnnnnnnnnnnnnnnnnnnnnnnnnnnnnnnnnnnnnnnnnnnnnnnnnnnnnnnnnnnnnnnnnnnnnnnnnnnnnnnnnnnnnnnnnnnnnnnnnnnnnnnnnnnnnnnnnnnnnnnnnnnnnnnnnnnnnnnnnnnnnnnnnnnnnnnnnnnnnnnnnnnnnnnnnnnnnnnnnnnnnnnnnnnnnnnnnnnnnnnnnnnnnnnnnnnnnnnnnnnnnnnnnnnnnnnnnnnnnnnnnnnnnnnnnnnnnnnnnnnnnnnnnnnnnnnnnnnnnnnnnnnnnnnnnnnnnnnnnnnnnnnnnnnnnnnnnnnnnnnnnnnnnnnnnnnnnnnnnnnnnnnnnnnnnnnnnnnnnnnnnnnnnnnnnnnnnnnnnnnnnnnnnnnnnnnnnnnnnnnnnnnnnnnnnnnnnnnnnnnnnnnnnnnnnnnnnnnnnnnnnnnnnnnnnnnnnnnnnnnnnnnnnnnnnnnnnnnnnnnnnnnnnnnnnnnnnnnnnnnnnnnnnnnnnnnnnnnnnnnnnnnnnnnnnnnnnnnnnnnnnnnnnnnnnnnnnnnnnnnnnnnnnnnnnnnnnnnnnnnnnnnnnnnnnnnnnnnnnnnnnnnnnnnnnnnnnnnnnnnnnnnnnnnnnnnnnnnnnnnnnnnnnnnnnnnnnnnnnnnnnnnnnnnnnnnnnnnnnnnnnnnnnnnnnnnnnnnnnnnnnnnnnnnnnnnnnnnnnnnnnnnnnnnnnnnnnnnnnnnnnnnnnnnnnnnnnnnnnnnnnnnnnnnnnnnnnnnnnnnnnnnnnnnnnnnnnnnnnnnnnnnnnnnnnnnnnnnnnnnnnnnnnnnnnnnnnnnnnnnnnnnnnnnnnnnnnnnnnnnnnnnnnnnnnnnnnnnnnnnnnnnnnnnnnnnnnnnnnnnnnnnnnnnnnnnnnnnnnnnnnnnnnnnnnnnnnnnnnnnnnnnnnnnnnnnnnnnnnnnnnnnnnnnnnnnnnnnnnnnnnnnnnnnnnnnnnnnnnnnnnnnnnnnnnnnnnnnnnnnnnnnnnnnnnnnnnnnnnnnnnnnnnnnnnnnnnnnnnnnnnnnnnnnnnnnnnnnnnnnnnnnnnnnnnnnnnnnnnnnnnnnnnnnnnnnnnnnnnnnnnnnnnnnnnnnnnnnnnnnnnnnnnnnnnnnnnnnnnnnnnnnnnnnnnnnnnnnnnnnnnnnnnnnnnnnnnnnnnnnnnnnnnnnnnnnnnnnnnnnnnnnnnnnnnnnnnnnnnnnnnnnnnnnnnnnnnnnnnnnnnnnnnnnnnnnnnnnnnnnnnnnnnnnnnnnnnnnnnnnnnnnnnnnnnnnnnnnnnnnnnnnnnnnnnnnnnnnnnnnnnnnnnnnnnnnnnnnnnnnnnnnnnnnnnnnnnnnnnnnnnnnnnnnnnnnnnnnnnnnnnnnnnnnnnnnnnnnnnnnnnnnnnnnnnnnnnnnnnnnnnnnnnnnnnnnnnnnnnnnnnnnnnnnnnnnnnnnnnnnnnnnnnnnnnnnnnnnnnnnnnnnnnnnnnnnnnnnnnnnnnnnnnnnnnnnnnnnnnnnnnnnnnnnnnnnnnnnnnnnnnnnnnnnnnnnnnnnnnnnnnnnnnnnnnnnnnnnnnnnnnnnnnnnnnnnnnnnnnnnnnnnnnnnnnnnnnnnnnnnnnnnnnnnnnnnnnnnnnnnnnnnnnnnnnnnnnnnnnnnnnnnnnnnnnnnnnnnnnnnnnnnnnnnnnnnnnnnnnnnnnnnnnnnnnnnnnnnnnnnnnnnnnnnnnnnnnnnnnnnnnnnnnnnnnnnnnnnnnnnnnnnnnnnnnnnnnnnnnnnnnnnnnnnnnnnnnnnnnnnnnnnnnnnnnnnnnnnnnnnnnnnnnnnnnnnnnnnnnnnnnnnnnnnnnnnnnnnnnnnnnnnnnnnnnnnnnnnnnnnnnnnnnnnnnnnnnnnnnnnnnnnnnnnnnnnnnnnnnnnnnnnnnnnnnnnnnnnnnnnnnnnnnnnnnnnnnnnnnnnnnnnnnnnnnnnnnnnnnnnnnnnnnnnnnnnnnnnnnnnnnnnnnnnnnnnnnnnnnnnnnnnnnnnnnnnnnnnnnnnnnnnnnnnnnnnnnnnnnnnnnnnnnnnnnnnnnnnnnnnnnnnnnnnnnnnnnnnnnnnnnnnnnnnnnnnnnnnnnnnnnnnnnnnnnnnnnnnnnnnnnnnnnnnnnnnnnnnnnnnnnnnnnnnnnnnnnnnnnnnnnnnnnnnnnnnnnnnnnnnnnnnnnnnnnnnnnnnnnnnnnnnnnnnnnnnnnnnnnnnnnnnnnnnnnnnnnnnnnnnnnnnnnnnnnnnnnnnnnnnnnnnnnnnnnnnnnnnnnnnnnnnnnnnnnnnnnnnnnnnnnnnnnnnnnnnnnnnnnnnnnnnnnnnnnnnnnnnnnnnnnnnnnnnnnnnnnnnnnnnnnnnnnnnnnnnnnnnnnnnnnnnnnnnnnnnnnnnnnnnnnnnnnnnnnnnnnnnnnnnnnnnnnnnnnnnnnnnnnnnnnnnnnnnnnnnnnnnnnnnnnnnnnnnnnnnnnnnnnnnnnnnnnnnnnnnnnnnnnnnnnnnnnnnnnnnnnnnnnnnnnnnnnnnnnnnnnnnnnnnnnnnnnnnnnnnnnnnnnnnnnnnnnnnnnnnnnnnnnnnnnnnnnnnnnnnnnnnnnnnnnnnnnnnnnnnnnnnnnnnnnnnnnnnnnnnnnnnnnnnnnnnnnnnnnnnnnnnnnnnnnnnnnnnnnnnnnnnnnnnnnnnnnnnnnnnnnnnnnnnnnnnnnnnnnnnnnnnnnnnnnnnnnnnnnnnnnnnnnnnnnnnnnnnnnnnnnnnnnnnnnnnnnnnnnnnnnnnnnnnnnnnnnnnnnnnnnnnnnnnnnnnnnnnnnnnnnnnnnnnnnnnnnnnnnnnnnnnnnnnnnnnnnnnnnnnnnnnnnnnnnnnnnnnnnnnnnnnnnnnnnnnnnnnnnnnnnnnnnnnnnnnnnnnnnnnnnnnnnnnnnnnnnnnnnnnnnnnnnnnnnnnnnnnnnnnnnnnnnnnnnnnnnnnnnnnnnnnnnnnnnnnnnnnnnnnnnnnnnnnnnnnnnnnnnnnnnnnnnnnnnnnnnnnnnnnnnnnnnnnnnnnnnnnnnnnnnnnnnnnnnnnnnnnnnnnnnnnnnnnnnnnnnnnnnnnnnnnnnnnnnnnnnnnnnnnnnnnnnnnnnnnnnnnnnnnnnnnnnnnnnnnnnnnnnnnnnnnnnnnnnnnnnnnnnnnnnnnnnnnnnnnnnnnnnnnnnnnnnnnnnnnnnnnnnnnnnnnnnnnnnnnnnnnnnnnnnnnnnnnnnnnnnnnnnnnnnnnnnnnnnnnnnnnnnnnnnnnnnnnnnnnnnnnnnnnnnnnnnnnnnnnnnnnnnnnnnnnnnnnnnnnnnnnnnnnnnnnnnnnnnnnnnnnnnnnnnnnnnnnnnnnnnnnnnnnnnnnnnnnnnnnnnnnnnnnnnnnnnnnnnnnnnnnnnnnnnnnnnnnnnnnnnnnnnnnnnnnnnnnnnnnnnnnnnnnnnnnnnnnnnnnnnnnnnnnnnnnnnnnnnnnnnnnnnnnnnnnnnnnnnnnnnnnnnnnnnnnnnnnnnnnnnnnnnnnnnnnnnnnnnnnnnnnnnnnnnnnnnnnnnnnnnnnnnnnnnnnnnnnnnnnnnnnnnnnnnnnnnnnnnnnnnnnnnnnnnnnnnnnnnnnnnnnnnnnnnnnnnnnnnnnnnnnnnnnnnnnnnnnnnnnnnnnnnnnnnnnnnnnnnnnnnnnnnnnnnnnnnnnnnnnnnnnnnnnnnnnnnnnnnnnnnnnnnnnnnnnnnnnnnnnnnnnnnnnnnnnnnnnnnnnnnnnnnnnnnnnnnnnnnnnnnnnnnnnnnnnnnnnnnnnnnnnnnnnnnnnnnnnnnnnnnnnnnnnnnnnnnnnnnnnnnnnnnnnnnnnnnnnnnnnnnnnnnnnnnnnnnnnnnnnnnnnnnnnnnnnnnnnnnnnnnnnnnnnnnnnnnnnnnnnnnnnnnnnnnnnnnnnnnnnnnnnnnnnnnnnnnnnnnnnnnnnnnnnnnnnnnnnnnnnnnnnnnnnnnnnnnnnnnnnnnnnnnnnnnnnnnnnnnnnnnnnnnnnnnnnnnnnnnnnnnnnnnnnnnnnnnnnnnnnnnnnnnnnnnnnnnnnnnnnnnnnnnnnnnnnnnnnnnnnnnnnnnnnnnnnnnnnnnnnnnnnnnnnnnnnnnnnnnnnnnnnnnnnnnnnnnnnnnnnnnnnnnnnnnnnnnnnnnnnnnnnnnnnnnnnnnnnnnnnnnnnnnnnnnnnnnnnnnnnnnnnnnnnnnnnnnnnnnnnnnnnnnnnnnnnnnnnnnnnnnnnnnnnnnnnnnnnnnnnnnnnnnnnnnnnnnnnnnnnnnnnnnnnnnnnnnnnnnnnnnnnnnnnnnnnnnnnnnnnnnnnnnnnnnnnnnnnnnnnnnnnnnnnnnnnnnnnnnnnnnnnnnnnnnnnnnnnnnnnnnnnnnnnnnnnnnnnnnnnnnnnnnnnnnnnnnnnnnnnnnnnnnnnnnnnnnnnnnnnnnnnnnnnnnnnnnnnnnnnnnnnnnnnnnnnnnnnnnnnnnnnnnnnnnnnnnnnnnnnnnnnnnnnnnnnnnnnnnnnnnnnnnnnnnnnnnnnnnnnnnnnnnnnnnnnnnnnnnnnnnnnnnnnnnnnnnnnnnnnnnnnnnnnnnnnnnnnnnnnnnnnnnnnnnnnnnnnnnnnnnnnnnnnnnnnnnnnnnnnnnnnnnnnnnnnnnnnnnnnnnnnnnnnnnnnnnnnnnnnnnnnnnnnnnnnnnnnnnnnnnnnnnnnnnnnnnnnnnnnnnnnnnnnnnnnnnnnnnnnnnnnnnnnnnnnnnnnnnnnnnnnnnnnnnnnnnnnnnnnnnnnnnnnnnnnnnnnnnnnnnnnnnnnnnnnnnnnnnnnnnnnnnnnnnnnnnnnnnnnnnnnnnnnnnnnnnnnnnnnnnnnnnnnnnnnnnnnnnnnnnnnnnnnnnnnnnnnnnnnnnnnnnnnnnnnnnnnnnnnnnnnnnnnnnnnnnnnnnnnnnnnnnnnnnnnnnnnnnnnnnnnnnnnnnnnnnnnnnnnnnnnnnnnnnnnnnnnnnnnnnnnnnnnnnnnnnnnnnnnnnnnnnnnnnnnnnnnnnnnnnnnnnnnnnnnnnnnnnnnnnnnnnnnnnnnnnnnnnnnnnnnnnnnnnnnnnnnnnnnnnnnnnnnnnnnnnnnnnnnnnnnnnnnnnnnnnnnnnnnnnnnnnnnnnnnnnnnnnnnnnnnnnnnnnnnnnnnnnnnnnnnnnnnnnnnnnnnnnnnnnnnnnnnnnnnnnnnnnnnnnnnnnnnnnnnnnnnnnnnnnnnnnnnnnnnnnnnnnnnnnnnnnnnnnnnnnnnnnnnnnnnnnnnnnnnnnnnnnnnnnnnnnnnnnnnnnnnnnnnnnnnnnnnnnnnnnnnnnnnnnnnnnnnnnnnnnnnnnnnnnnnnnnnnnnnnnnnnnnnnnnnnnnnnnnnnnnnnnnnnnnnnnnnnnnnnnnnnnnnnnnnnnnnnnnnnnnnnnnnnnnnnnnnnnnnnnnnnnnnnnnnnnnnnnnnnnnnnnnnnnnnnnnnnnnnnnnnnnnnnnnnnnnnnnnnnnnnnnnnnnnnnnnnnnnnnnnnnnnnnnnnnnnnnnnnnnnnnnnnnnnnnnnnnnnnnnnnnnnnnnnnnnnnnnnnnnnnnnnnnnnnnnnnnnnnnnnnnnnnnnnnnnnnnnnnnnnnnnnnnnnnnnnnnnnnnnnnnnnnnnnnnnnnnnnnnnnnnnnnnnnnnnnnnnnnnnnnnnnnnnnnnnnnnnnnnnnnnnnnnnnnnnnnnnnnnnnnnnnnnnnnnnnnnnnnnnnnnnnnnnnnnnnnnnnnnnnnnnnnnnnnnnnnnnnnnnnnnnnnnnnnnnnnnnnnnnnnnnnnnnnnnnnnnnnnnnnnnnnnnnnnnnnnnnnnnnnnnnnnnnnnnnnnnnnnnnnnnnnnnnnnnnnnnnnnnnnnnnnnnnnnnnnnnnnnnnnnnnnnnnnnnnnnnnnnnnnnnnnnnnnnnnnnnnnnnnnnnnnnnnnnnnnnnnnnnnnnnnnnnnnnnnnnnnnnnnnnnnnnnnnnnnnnnnnnnnnnnnnnnnnnnnnnnnnnnnnnnnnnnnnnnnnnnnnnnnnnnnnnnnnnnnnnnnnnnnnnnnnnnnnnnnnnnnnnnnnnnnnnnnnnnnnnnnnnnnnnnnnnnnnnnnnnnnnnnnnnnnnnnnnnnnnnnnnnnnnnnnnnnnnnnnnnnnnnnnnnnnnnnnnnnnnnnnnnnnnnnnnnnnnnnnnnnnnnnnnnnnnnnnnnnnnnnnnnnnnnnnnnnnnnnnnnnnnnnnnnnnnnnnnnnnnnnnnnnnnnnnnnnnnnnnnnnnnnnnnnnnnnnnnnnnnnnnnnnnnnnnnnnnnnnnnnnnnnnnnnnnnnnnnnnnnnnnnnnnnnnnnnnnnnnnnnnnnnnnnnnnnnnnnnnnnnnnnnnnnnnnnnnnnnnnnnnnnnnnnnnnnnnnnnnnnnnnnnnnnnnnnnnnnnnnnnnnnnnnnnnnnnnnnnnnnnnnnnnnnnnnnnnnnnnnnnnnnnnnnnnnnnnnnnnnnnnnnnnnnnnnnnnnnnnnnnnnnnnnnnnnnnnnnnnnnnnnnnnnnnnnnnnnnnnnnnnnnnnnnnnnnnnnnnnnnnnnnnnnnnnnnnnnnnnnnnnnnnnnnnnnnnnnnnnnnnnnnnnnnnnnnnnnnnnnnnnnnnnnnnnnnnnnnnnnnnnnnnnnnnnnnnnnnnnnnnnnnnnnnnnnnnnnnnnnnnnnnnnnnnnnnnnnnnnnnnnnnnnnnnnnnnnnnnnnnnnnnnnnnnnnnnnnnnnnnnnnnnnnnnnnnnnnnnnnnnnnnnnnnnnnnnnnnnnnnnnnnnnnnnnnnnnnnnnnnnnnnnnnnnnnnnnnnnnnnnnnnnnnnnnnnnnnnnnnnnnnnnnnnnnnnnnnnnnnnnnnnnnnnnnnnnnnnnnnnnnnnnnnnnnnnnnnnnnnnnnnnnnnnnnnnnnnnnnnnnnnnnnnnnnnnnnnnnnnnnnnnnnnnnnnnnnnnnnnnnnnnnnnnnnnnnnnnnnnnnnnnnnnnnnnnnnnnnnnnnnnnnnnnnnnnnnnnnnnnnnnnnnnnnnnnnnnnnnnnnnnnnnnnnnnnnnnnnnnnnnnnnnnnnnnnnnnnnnnnnnnnnnnnnnnnnnnnnnnnnnnnnnnnnnnnnnnnnnnnnnnnnnnnnnnnnnnnnnnnnnnnnnnnnnnnnnnnnnnnnnnnnnnnnnnnnnnnnnnnnnnnnnnnnnnnnnnnnnnnnnnnnnnnnnnnnnnnnnnnnnnnnnnnnnnnnnnnnnnnnnnnnnnnnnnnnnnnnnnnnnnnnnnnnnnnnnnnnnnnnnnnnnnnnnnnnnnnnnnnnnnnnnnnnnnnnnnnnnnnnnnnnnnnnnnnnnnnnnnnnnnnnnnnnnnnnnnnnnnnnnnnnnnnnnnnnnnnnnnnnnnnnnnnnnnnnnnnnnnnnnnnnnnnnnnnnnnnnnnnnnnnnnnnnnnnnnnnnnnnnnnnnnnnnnnnnnnnnnnnnnnnnnnnnnnnnnnnnnnnnnnnnnnnnnnnnnnnnnnnnnnnnnnnnnnnnnnnnnnnnnnnnnnnnnnnnnnnnnnnnnnnnnnnnnnnnnnnnnnnnnnnnnnnnnnnnnnnnnnnnnnnnnnnnnnnnnnnnnnnnnnnnnnnnnnnnnnnnnnnnnnnnnnnnnnnnnnnnnnnnnnnnnnnnnnnnnnnnnnnnnnnnnnnnnnnnnnnnnnnnnnnnnnnnnnnnnnnnnnnnnnnnnnnnnnnnnnnnnnnnnnnnnnnnnnnnnnnnnnnnnnnnnnnnnnnnnnnnnnnnnnnnnnnnnnnnnnnnnnnnnnnnnnnnnnnnnnnnnnnnnnnnnnnnnnnnnnnnnnnnnnnnnnnnnnnnnnnnnnnnnnnnnnnnnnnnnnnnnnnnnnnnnnnnnnnnnnnnnnnnnnnnnnnnnnnnnnnnnnnnnnnnnnnnnnnnnnnnnnnnnnnnnnnnnnnnnnnnnnnnnnnnnnnnnnnnnnnnnnnnnnnnnnnnnnnnnnnnnnnnnnnnnnnnnnnnnnnnnnnnnnnnnnnnnnnnnnnnnnnnnnnnnnnnnnnnnnnnnnnnnnnnnnnnnnnnnnnnnnnnnnnnnnnnnnnnnnnnnnnnnnnnnnnnnnnnnnnnnnnnnnnnnnnnnnnnnnnnnnnnnnnnnnnnnnnnnnnnnnnnnnnnnnnnnnnnnnnnnnnnnnnnnnnnnnnnnnnnnnnnnnnnnnnnnnnnnnnnnnnnnnnnnnnnnnnnnnnnnnnnnnnnnnnnnnnnnnnnnnnnnnnnnnnnnnnnnnnnnnnnnnnnnnnnnnnnnnnnnnnnnnnnnnnnnnnnnnnnnnnnnnnnnnnnnnnnnnnnnnnnnnnnnnnnnnnnnnnnnnnnnnnnnnnnnnnnnnnnnnnnnnnnnnnnnnnnnnnnnnnnnnnnnnnnnnnnnnnnnnnnnnnnnnnnnnnnnnnnnnnnnnnnnnnnnnnnnnnnnnnnnnnnnnnnnnnnnnnnnnnnnnnnnnnnnnnnnnnnnnnnnnnnnnnnnnnnnnnnnnnnnnnnnnnnnnnnnnnnnnnnnnnnnnnnnnnnnnnnnnnnnnnnnnnnnnnnnnnnnnnnnnnnnnnnnnnnnnnnnnnnnnnnnnnnnnnnnnnnnnnnnnnnnnnnnnnnnnnnnnnnnnnnnnnnnnnnnnnnnnnnnnnnnnnnnnnnnnnnnnnnnnnnnnnnnnnnnnnnnnnnnnnnnnnnnnnnnnnnnnnnnnnnnnnnnnnnnnnnnnnnnnnnnnnnnnnnnnnnnnnnnnnnnnnnnnnnnnnnnnnnnnnnnnnnnnnnnnnnnnnnnnnnnnnnnnnnnnnnnnnnnnnnnnnnnnnnnnnnnnnnnnnnnnnnnnnnnnnnnnnnnnnnnnnnnnnnnnnnnnnnnnnnnnnnnnnnnnnnnnnnnnnnnnnnnnnnnnnnnnnnnnnnnnnnnnnnnnnnnnnnnnnnnnnnnnnnnnnnnnnnnnnnnnnnnnnnnnnnnnnnnnnnnnnnnnnnnnnnnnnnnnnnnnnnnnnnnnnnnnnnnnnnnnnnnnnnnnnnnnnnnnnnnnnnnnnnnnnnnnnnnnnnnnnnnnnnnnnnnnnnnnnnnnnnnnnnnnnnnnnnnnnnnnnnnnnnnnnnnnnnnnnnnnnnnnnnnnnnnnnnnnnnnnnnnnnnnnnnnnnnnnnnnnnnnnnnnnnnnnnnnnnnnnnnnnnnnnnnnnnnnnnnnnnnnnnnnnnnnnnnnnnnnnnnnnnnnnnnnnnnnnnnnnnnnnnnnnnnnnnnnnnnnnnnnnnnnnnnnnnnnnnnnnnnnnnnnnnnnnnnnnnnnnnnnnnnnnnnnnnnnnnnnnnnnnnnnnnnnnnnnnnnnnnnnnnnnnnnnnnnnnnnnnnnnnnnnnnnnnnnnnnnnnnnnnnnnnnnnnnnnnnnnnnnnnnnnnnnnnnnnnnnnnnnnnnnnnnnnnnnnnnnnnnnnnnnnnnnnnnnnnnnnnnnnnnnnnnnnnnnnnnnnnnnnnnnnnnnnnnnnnnnnnnnnnnnnnnnnnnnnnnnnnnnnnnnnnnnnnnnnnnnnnnnnnnnnnnnnnnnnnnnnnnnnnnnnnnnnnnnnnnnnnnnnnnnnnnnnnnnnnnnnnnnnnnnnnnnnnnnnnnnnnnnnnnnnnnnnnnnnnnnnnnnnnnnnnnnnnnnnnnnnnnnnnnnnnnnnnnnnnnnnnnnnnnnnnnnnnnnnnnnnnnnnnnnnnnnnnnnnnnnnnnnnnnnnnnnnnnnnnnnnnnnnnnnnnnnnnnnnnnnnnnnnnnnnnnnnnnnnnnnnnnnnnnnnnnnnnnnnnnnnnnnnnnnnnnnnnnnnnnnnnnnnnnnnnnnnnnnnnnnnnnnnnnnnnnnnnnnnnnnnnnnnnnnnnnnnnnnnnnnnnnnnnnnnnnnnnnnnnnnnnnnnnnnnnnnnnnnnnnnnnnnnnnnnnnnnnnnnnnnnnnnnnnnnnnnnnnnnnnnnnnnnnnnnnnnnnnnnnnnnnnnnnnnnnnnnnnnnnnnnnnnnnnnnnnnnnnnnnnnnnnnnnnnnnnnnnnnnnnnnnnnnnnnnnnnnnnnnnnnnnnnnnnnnnnnnnnnnnnnnnnnnnnnnnnnnnnnnnnnnnnnnnnnnnnnnnnnnnnnnnnnnnnnnnnnnnnnnnnnnnnnnnnnnnnnnnnnnnnnnnnnnnnnnnnnnnnnnnnnnnnnnnnnnnnnnnnnnnnnnnnnnnnnnnnnnnnnnnnnnnnnnnnnnnnnnnnnnnnnnnnnnnnnnnnnnnnnnnnnnnnnnnnnnnnnnnnnnnnnnnnnnnnnnnnnnnnnnnnnnnnnnnnnnnnnnnnnnnnnnnnnnnnnnnnnnnnnnnnnnnnnnnnnnnnnnnnnnnnnnnnnnnnnnnnnnnnnnnnnnnnnnnnnnnnnnnnnnnnnnnnnnnnnnnnnnnnnnnnnnnnnnnnnnnnnnnnnnnnnnnnnnnnnnnnnnnnnnnnnnnnnnnnnnnnnnnnnnnnnnnnnnnnnnnnnnnnnnnnnnnnnnnnnnnnnnnnnnnnnnnnnnnnnnnnnnnnnnnnnnnnnnnnnnnnnnnnnnnnnnnnnnnnnnnnnnnnnnnnnnnnnnnnnnnnnnnnnnnnnnnnnnnnnnnnnnnnnnnnnnnnnnnnnnnnnnnnnnnnnnnnnnnnnnnnnnnnnnnnnnnnnnnnnnnnnnnnnnnnnnnnnnnnnnnnnnnnnnnnnnnnnnnnnnnnnnnnnnnnnnnnnnnnnnnnnnnnnnnnnnnnnnnnnnnnnnnnnnnnnnnnnnnnnnnnnnnnnnnnnnnnnnnnnnnnnnnnnnnnnnnnnnnnnnnnnnnnnnnnnnnnnnnnnnnnnnnnnnnnnnnnnnnnnnnnnnnnnnnnnnnnnnnnnnnnnnnnnnnnnnnnnnnnnnnnnnnnnnnnnnnnnnnnnnnnnnnnnnnnnnnnnnnnnnnnnnnnnnnnnnnnnnnnnnnnnnnnnnnnnnnnnnnnnnnnnnnnnnnnnnnnnnnnnnnnnnnnnnnnnnnnnnnnnnnnnnnnnnnnnnnnnnnnnnnnnnnnnnnnnnnnnnnnnnnnnnnnnnnnnnnnnnnnnnnnnnnnnnnnnnnnnnnnnnnnnnnnnnnnnnnnnnnnnnnnnnnnnnnnnnnnnnnnnnnnnnnnnnnnnnnnnnnnnnnnnnnnnnnnnnnnnnnnnnnnnnnnnnnnnnnnnnnnnnnnnnnnnnnnnnnnnnnnnnnnnnnnnnnnnnnnnnnnnnnnnnnnnnnnnnnnnnnnnnnnnnnnnnnnnnnnnnnnnnnnnnnnnnnnnnnnnnnnnnnnnnnnnnnnnnnnnnnnnnnnnnnnnnnnnnnnnnnnnnnnnnnnnnnnnnnnnnnnnnnnnnnnnnnnnnnnnnnnnnnnnnnnnnnnnnnnnnnnnnnnnnnnnnnnnnnnnnnnnnnnnnnnnnnnnnnnnnnnnnnnnnnnnnnnnnnnnnnnnnnnnnnnnnnnnnnnnnnnnnnnnnnnnnnnnnnnnnnnnnnnnnnnnnnnnnnnnnnnnnnnnnnnnnnnnnnnnnnnnnnnnnnnnnnnnnnnnnnnnnnnnnnnnnnnnnnnnnnnnnnnnnnnnnnnnnnnnnnnnnnnnnnnnnnnnnnnnnnnnnnnnnnnnnnnnnnnnnnnnnnnnnnnnnnnnnnnnnnnnnnnnnnnnnnnnnnnnnnnnnnnnnnnnnnnnnnnnnnnnnnnnnnnnnnnnnnnnnnnnnnnnnnnnnnnnnnnnnnnnnnnnnnnnnnnnnnnnnnnnnnnnnnnnnnnnnnnnnnnnnnnnnnnnnnnnnnnnnnnnnnnnnnnnnnnnnnnnnnnnnnnnnnnnnnnnnnnnnnnnnnnnnnnnnnnnnnnnnnnnnnnnnnnnnnnnnnnnnnnnnnnnnnnnnnnnnnnnnnnnnnnnnnnnnnnnnnnnnnnnnnnnnnnnnnnnnnnnnnnnnnnnnnnnnnnnnnnnnnnnnnnnnnnnnnnnnnnnnnnnnnnnnnnnnnnnnnnnnnnnnnnnnnnnnnnnnnnnnnnnnnnnnnnnnnnnnnnnnnnnnnnnnnnnnnnnnnnnnnnnnnnnnnnnnnnnnnnnnnnnnnnnnnnnnnnnnnnnnnnnnnnnnnnnnnnnnnnnnnnnnnnnnnnnnnnnnnnnnnnnnnnnnnnnnnnnnnnnnnnnnnnnnnnnnnnnnnnnnnnnnnnnnnnnnnnnnnnnnnnnnnnnnnnnnnnnnnnnnnnnnnnnnnnnnnnnnnnnnnnnnnnnnnnnnnnnnnnnnnnnnnnnnnnnnnnnnnnnnnnnnnnnnnnnnnnnnnnnnnnnnnnnnnnnnnnnnnnnnnnnnnnnnnnnnnnnnnnnnnnnnnnnnnnnnnnnnnnnnnnnnnnnnnnnnnnnnnnnnnnnnnnnnnnnnnnnnnnnnnnnnnnnnnnnnnnnnnnnnnnnnnnnnnnnnnnnnnnnnnnnnnnnnnnnnnnnnnnnnnnnnnnnnnnnnnnnnnnnnnnnnnnnnnnnnnnnnnnnnnnnnnnnnnnnnnnnnnnnnnnnnnnnnnnnnnnnnnnnnnnnnnnnnnnnnnnnnnnnnnnnnnnnnnnnnnnnnnnnnnnnnnnnnnnnnnnnnnnnnnnnnnnnnnnnnnnnnnnnnnnnnnnnnnnnnnnnnnnnnnnnnnnnnnnnnnnnnnnnnnnnnnnnnnnnnnnnnnnnnnnnnnnnnnnnnnnnnnnnnnnnnnnnnnnnnnnnnnnnnnnnnnnnnnnnnnnnnnnnnnnnnnnnnnnnnnnnnnnnnnnnnnnnnnnnnnnnnnnnnnnnnnnnnnnnnnnnnnnnnnnnnnnnnnnnnnnnnnnnnnnnnnnnnnnnnnnnnnnnnnnnnnnnnnnnnnnnnnnnnnnnnnnnnnnnnnnnnnnnnnnnnnnnnnnnnnnnnnnnnnnnnnnnnnnnnnnnnnnnnnnnnnnnnnnnnnnnnnnnnnnnnnnnnnnnnnnnnnnnnnnnnnnnnnnnnnnnnnnnnnnnnnnnnnnnnnnnnnnnnnnnnnnnnnnnnnnnnnnnnnnnnnnnnnnnnnnnnnnnnnnnnnnnnnnnnnnnnnnnnnnnnnnnnnnnnnnnnnnnnnnnnnnnnnnnnnnnnnnnnnnnnnnnnnnnnnnnnnnnnnnnnnnnnnnnnnnnnnnnnnnnnnnnnnnnnnnnnnnnnnnnnnnnnnnnnnnnnnnnnnnnnnnnnnnnnnnnnnnnnnnnnnnnnnnnnnnnnnnnnnnnnnnnnnnnnnnnnnnnnnnnnnnnnnnnnnnnnnnnnnnnnnnnnnnnnnnnnnnnnnnnnnnnnnnnnnnnnnnnnnnnnnnnnnnnnnnnnnnnnnnnnnnnnnnnnnnnnnnnnnnnnnnnnnnnnnnnnnnnnnnnnnnnnnnnnnnnnnnnnnnnnnnnnnnnnnnnnnnnnnnnnnnnnnnnnnnnnnnnnnnnnnnnnnnnnnnnnnnnnnnnnnnnnnnnnnnnnnnnnnnnnnnnnnnnnnnnnnnnnnnnnnnnnnnnnnnnnnnnnnnnnnnnnnnnnnnnnnnnnnnnnnnnnnnnnnnnnnnnnnnnnnnnnnnnnnnnnnnnnnnnnnnnnnnnnnnnnnnnnnnnnnnnnnnnnnnnnnnnnnnnnnnnnnnnnnnnnnnnnnnnnnnnnnnnnnnnnnnnnnnnnnnnnnnnnnnnnnnnnnnnnnnnnnnnnnnnnnnnnnnnnnnnnnnnnnnnnnnnnnnnnnnnnnnnnnnnnnnnnnnnnnnnnnnnnnnnnnnnnnnnnnnnnnnnnnnnnnnnnnnnnnnnnnnnnnnnnnnnnnnnnnnnnnnnnnnnnnnnnnnnnnnnnnnnnnnnnnnnnnnnnnnnnnnnnnnnnnnnnnnnnnnnnnnnnnnnnnnnnnnnnnnnnnnnnnnnnnnnnnnnnnnnnnnnnnnnnnnnnnnnnnnnnnnnnnnnnnnnnnnnnnnnnnnnnnnnnnnnnnnnnnnnnnnnnnnnnnnnnnnnnnnnnnnnnnnnnnnnnnnnnnnnnnnnnnnnnnnnnnnnnnnnnnnnnnnnnnnnnnnnnnnnnnnnnnnnnnnnnnnnnnnnnnnnnnnnnnnnnnnnnnnnnnnnnnnnnnnnnnnnnnnnnnnnnnnnnnnnnnnnnnnnnnnnnnnnnnnnnnnnnnnnnnnnnnnnnnnnnnnnnnnnnnnnnnnnnnnnnnnnnnnnnnnnnnnnnnnnnnnnnnnnnnnnnnnnnnnnnnnnnnnnnnnnnnnnnnnnnnnnnnnnnnnnnnnnnnnnnnnnnnnnnnnnnnnnnnnnnnnnnnnnnnnnnnnnnnnnnnnnnnnnnnnnnnnnnnnnnnnnnnnnnnnnnnnnnnnnnnnnnnnnnnnnnnnnnnnnnnnnnnnnnnnnnnnnnnnnnnnnnnnnnnnnnnnnnnnnnnnnnnnnnnnnnnnnnnnnnnnnnnnnnnnnnnnnnnnnnnnnnnnnnnnnnnnnnnnnnnnnnnnnnnnnnnnnnnnnnnnnnnnnnnnnnnnnnnnnnnnnnnnnnnnnnnnnnnnnnnnnnnnnnnnnnnnnnnnnnnnnnnnnnnnnnnnnnnnnnnnnnnnnnnnnnnnnnnnnnnnnnnnnnnnnnnnnnnnnnnnnnnnnnnnnnnnnnnnnnnnnnnnnnnnnnnnnnnnnnnnnnnnnnnnnnnnnnnnnnnnnnnnnnnnnnnnnnnnnnnnnnnnnnnnnnnnnnnnnnnnnnnnnnnnnnnnnnnnnnnnnnnnnnnnnnnnnnnnnnnnnnnnnnnnnnnnnnnnnnnnnnnnnnnnnnnnnnnnnnnnnnnnnnnnnnnnnnnnnnnnnnnnnnnnnnnnnnnnnnnnnnnnnnnnnnnnnnnnnnnnnnnnnnnnnnnnnnnnnnnnnnnnnnnnnnnnnnnnnnnnnnnnnnnnnnnnnnnnnnnnnnnnnnnnnnnnnnnnnnnnnnnnnnnnnnnnnnnnnnnnnnnnnnnnnnnnnnnnnnnnnnnnnnnnnnnnnnnnnnnnnnnnnnnnnnnnnnnnnnnnnnnnnnnnnnnnnnnnnnnnnnnnnnnnnnnnnnnnnnnnnnnnnnnnnnnnnnnnnnnnnnnnnnnnnnnnnnnnnnnnnnnnnnnnnnnnnnnnnnnnnnnnnnnnnnnnnnnnnnnnnnnnnnnnnnnnnnnnnnnnnnnnnnnnnnnnnnnnnnnnnnnnnnnnnnnnnnnnnnnnnnnnnnnnnnnnnnnnnnnnnnnnnnnnnnnnnnnnnnnnnnnnnnnnnnnnnnnnnnnnnnnnnnnnnnnnnnnnnnnnnnnnnnnnnnnnnnnnnnnnnnnnnnnnnnnnnnnnnnnnnnnnnnnnnnnnnnnnnnnnnnnnnnnnnnnnnnnnnnnnnnnnnnnnnnnnnnnnnnnnnnnnnnnnnnnnnnnnnnnnnnnnnnnnnnnnnnnnnnnnnnnnnnnnnnnnnnnnnnnnnnnnnnnnnnnnnnnnnnnnnnnnnnnnnnnnnnnnnnnnnnnnnnnnnnnnnnnnnnnnnnnnnnnnnnnnnnnnnnnnnnnnnnnnnnnnnnnnnnnnnnnnnnnnnnnnnnnnnnnnnnnnnnnnnnnnnnnnnnnnnnnnnnnnnnnnnnnnnnnnnnnnnnnnnnnnnnnnnnnnnnnnnnnnnnnnnnnnnnnnnnnnnnnnnnnnnnnnnnnnnnnnnnnnnnnnnnnnnnnnnnnnnnnnnnnnnnnnnnnnnnnnnnnnnnnnnnnnnnnnnnnnnnnnnnnnnnnnnnnnnnnnnnnnnnnnnnnnnnnnnnnnnnnnnnnnnnnnnnnnnnnnnnnnnnnnnnnnnnnnnnnnnnnnnnnnnnnnnnnnnnnnnnnnnnnnnnnnnnnnnnnnnnnnnnnnnnnnnnnnnnnnnnnnnnnnnnnnnnnnnnnnnnnnnnnnnnnnnnnnnnnnnnnnnnnnnnnnnnnnnnnnnnnnnnnnnnnnnnnnnnnnnnnnnnnnnnnnnnnnnnnnnnnnnnnnnnnnnnnnnnnnnnnnnnnnnnnnnnnnnnnnnnnnnnnnnnnnnnnnnnnnnnnnnnnnnnnnnnnnnnnnnnnnnnnnnnnnnnnnnnnnnnnnnnnnnnnnnnnnnnnnnnnnnnnnnnnnnnnnnnnnnnnnnnnnnnnnnnnnnnnnnnnnnnnnnnnnnnnnnnnnnnnnnnnnnnnnnnnnnnnnnnnnnnnnnnnnnnnnnnnnnnnnnnnnnnnnnnnnnnnnnnnnnnnnnnnnnnnnnnnnnnnnnnnnnnnnnnnnnnnnnnnnnnnnnnnnnnnnnnnnnnnnnnnnnnnnnnnnnnnnnnnnnnnnnnnnnnnnnnnnnnnnnnnnnnnnnnnnnnnnnnnnnnnnnnnnnnnnnnnnnnnnnnnnnnnnnnnnnnnnnnnnnnnnnnnnnnnnnnnnnnnnnnnnnnnnnnnnnnnnnnnnnnnnnnnnnnnnnnnnnnnnnnnnnnnnnnnnnnnnnnnnnnnnnnnnnnnnnnnnnnnnnnnnnnnnnnnnnnnnnnnnnnnnnnnnnnnnnnnnnnnnnnnnnnnnnnnnnnnnnnnnnnnnnnnnnnnnnnnnnnnnnnnnnnnnnnnnnnnnnnnnnnnnnnnnnnnnnnnnnnnnnnnnnnnnnnnnnnnnnnnnnnnnnnnnnnnnnnnnnnnnnnnnnnnnnnnnnnnnnnnnnnnnnnnnnnnnnnnnnnnnnnnnnnnnnnnnnnnnnnnnnnnnnnnnnnnnnnnnnnnnnnnnnnnnnnnnnnnnnnnnnnnnnnnnnnnnnnnnnnnnnnnnnnnnnnnnnnnnnnnnnnnnnnnnnnnnnnnnnnnnnnnnnnnnnnnnnnnnnnnnnnnnnnnnnnnnnnnnnnnnnnnnnnnnnnnnnnnnnnnnnnnnnnnnnnnnnnnnnnnnnnnnnnnnnnnnnnnnnnnnnnnnnnnnnnnnnnnnnnnnnnnnnnnnnnnnnnnnnnnnnnnnnnnnnnnnnnnnnnnnnnnnnnnnnnnnnnnnnnnnnnnnnnnnnnnnnnnnnnnnnnnnnnnnnnnnnnnnnnnnnnnnnnnnnnnnnnnnnnnnnnnnnnnnnnnnnnnnnnnnnnnnnnnnnnnnnnnnnnnnnnnnnnnnnnnnnnnnnnnnnnnnnnnnnnnnnnnnnnnnnnnnnnnnnnnnnnnnnnnnnnnnnnnnnnnnnnnnnnnnnnnnnnnnnnnnnnnnnnnnnnnnnnnnnnnnnnnnnnnnnnnnnnnnnnnnnnnnnnnnnnnnnnnnnnnnnnnnnnnnnnnnnnnnnnnnnnnnnnnnnnnnnnnnnnnnnnnnnnnnnnnnnnnnnnnnnnnnnnnnnnnnnnnnnnnnnnnnnnnnnnnnnnnnnnnnnnnnnnnnnnnnnnnnnnnnnnnnnnnnnnnnnnnnnnnnnnnnnnnnnnnnnnnnnnnnnnnnnnnnnnnnnnnnnnnnnnnnnnnnnnnnnnnnnnnnnnnnnnnnnnnnnnnnnnnnnnnnnnnnnnnnnnnnnnnnnnnnnnnnnnnnnnnnnnnnnnnnnnnnnnnnnnnnnnnnnnnnnnnnnnnnnnnnnnnnnnnnnnnnnnnnnnnnnnnnnnnnnnnnnnnnnnnnnnnnnnnnnnnnnnnnnnnnnnnnnnnnnnnnnnnnnnnnnnnnnnnnnnnnnnnnnnnnnnnnnnnnnnnnnnnnnnnnnnnnnnnnnnnnnnnnnnnnnnnnnnnnnnnnnnnnnnnnnnnnnnnnnnnnnnnnnnnnnnnnnnnnnnnnnnnnnnnnnnnnnnnnnnnnnnnnnnnnnnnnnnnnnnnnnnnnnnnnnnnnnnnnnnnnnnnnnnnnnnnnnnnnnnnnnnnnnnnnnnnnnnnnnnnnnnnnnnnnnnnnnnnnnnnnnnnnnnnnnnnnnnnnnnnnnnnnnnnnnnnnnnnnnnnnnnnnnnnnnnnnnnnnnnnnnnnnnnnnnnnnnnnnnnnnnnnnnnnnnnnnnnnnnnnnnnnnnnnnnnnnnnnnnnnnnnnnnnnnnnnnnnnnnnnnnnnnnnnnnnnnnnnnnnnnnnnnnnnnnnnnnnnnnnnnnnnnnnnnnnnnnnnnnnnnnnnnnnnnnnnnnnnnnnnnnnnnnncatcaaggcactcatgccatcattttcaccgctggcatcacaaaagatccccgtcgtttatgtccttttcgtcccttatgtcccttcgttacgtgcggatttgggaaaagaagcggcgaggccgccgcttctacggcaacccggaatctataagtcctacaggtcctataagtcctattggctcgtaaagagaagaggcgcaaggagttgtgactcttgcgcctctggctcggtttctcagggttttctgattgccttgaccgtgtcccggacctcgtctaccaacgactgccggaccagatacacgccgggccgctgcgccgacgtggcgtatcggtactgcgaatcttcgggggtgggcccacctacagctaccggccccagtttcgccggctcctcgccttcagcactcgcactcacggagatctccacgacgggcgcatccagccctgtgccagcgacctggccgacgtcgtccgccagcttcttgtcggcgcgcaactggctgagcgcttccatcagcgggtccatgtctcgtgaactgccgaatacatggccttccggcttggtaatcacccacttgccccggaatttctcgaaggcatactcggcgccatcaagtttcaactcaactgttctcgcttccagcttattaaactccatcaaagttttcttctggaaatcgaggggcgtcctcgtcaacgcattgacttccagttccgtcaagaccgtggtgacgccattatcctgccgcacatagaacttgccgacatcgggtacgggcgcgcccacaagaatatcgctgggctcttcgccgttgaactcgcagtggatggcgatccgcgggttgtcaaaaccggccaacgccggcacatccccggggaagttgccacccgaaagctgcttgagaaacgctataaagttcgagaccgccacctggtccgtgtcttccaccggcggctggacaagccgccaccctttttccgggtcgttctcgagtgtgaaatcggcatcggccgtcttgtagcggatcgaccgcagcatcgaggcgtcccgcgtgaacagccggccttcgcgcaaggcgttgggcgcctgcggcaacgcggccgccacgttcgggtccatcaggaaaaccgttggttttgaggcccatttggcgtagtagcaccctttagcggattcgtggtcactgcgggaacccatcaggaccgtctgcggctcactccccgccgccgcgtagatggtcagtcgcgccttgggcgggttcagcccataatcgtccagcgattcaggttgctcgacgaaacccacgatcaggctgtactgaacttccttgataatgctttccaccgtctcccggttggccggagcctgttccggcgaaaccatttgccaccggccatccggctgtttctccaccacaaccaccgccgactcctccggcgctggctgctgggtcgggtcgcccgaaagattttttgccgcgcggaatcgcgaaaactcgagccggctgatgccttcctcgccgaccttgaacaggcggcggtctcgcagcagatcgagcgaccggtccatttcgtggaattgctcgacgctgaccagaaacacaagctggccgtcgagccgcgcataccgatatgcctgcgtcggatccatcgcgccgaattcaaaccgcaggggcgcaccctccgcccgcgtcgccgcaaacgtcagcaccggtttgtccagcccgtacgcggccagatcgccgccggtctcgatagtccgtgcgttgtcgagtgtcgcaacggttttcgcggcacgatcccacacgatctggttgggatcgatggacgggtccggtttggtaatggcccactggccggatggagtccgttcagccgccacggccggttcgcccaaccgcgcgatttcgatgcatcgaacgtcttcgggctgaaagtcgaacagttttttgctttggatttgctggacctcgcggtgtttttccaattgcaccataccccagtaggccgcacacagccccaccagcactcccagcagaatcagcgtccctttcttgctcattggtacttcctccgcaacccgtacgctaccagccccgccgcaaccaccgcctgaaccgtgcccagcaccgccaggtacaccaccgtccgctgatccccttcgctcaagatgatcgcggggtcttccttgccggtgggccgtatggcgatcaggtcttcgttttccgtcagccaggcaatgacgttcagcatgaaattgaggttgcccggcaggcggatctgtccgtttgaagcaaacgccgaattaccgaccaccaccacccgggcatcacgcgtctggccggagtcgttgagggcaacgtccgtctttgccgttgcggccaccgccagcggaagcggccccccgggctcgtccggcgtttttaccgccttgcccgccgtgaacagcatttcaatgtccgactcggcgtagaaattgggcgtggtccggatcaactcggttactaccacactctcggggacctttttggccgcgcccaccgtgcgcgcgacgctgaacaccagcttctgatcggaattctttgtaatgcggtggccggcgttatagcagcccaggaattcgctctcattgggccgttcgccaaacgccgagccgtccgcgttcatttcgatattccagcggctctcgggagaaacagccatgtcggcgcccacgacaatacccagccggcgctcgagccacggcacgagttgttccgtggctgccgcggaagccactttgcgccacgggtcgagcagcaccagcagacggccgccgcgacccaggtattcatccagcgcgcggatttcctcggggtgcaggtccgattgggcgccgccgatccccaggccgttaatcacaatggcgtcgtattcgggcgggatttcagggttgctgatcctgatcgccatccgctcgggctggtacgactccgcatcgagcaactgtttgagcatgctcccgccgtttttggtgtccccgtcgtcgatgcttcgctcgccatgccccgtcaggaacccgatcttgggcctggacttgcgcaccacgttgataagcgcgttggtgaaatcacgttcttcgagccgcgggctggcgcccgacagcatgatgactttctggttgacgccgcaggtgagaatgaccgtgccttgcgtggaagcatgtgtgactcccatcgcattgagccgggccggtgcgagttgcggatcaagaaactcgaccttgagacgggacgtatacctgccgcactggtcgaggaaccgccgcgtcttgtcgcgggcgatgttcaccaactcgtcctcgacctggatgaaagaggccgtaaccgcgacgtcctggtcgagcgtctgcagaacttggactgtctggggggaaaggttgcgccggccttctttggtcaggtcccacgatttgtgcgcgtgctgggcaaacgcgtagatgaccacacagatgcccaaaaacaatattgaagacaccacggcgcccagaccgtaaaggctcttgccttcccgggatgactctttgctgatcgtcgttagcgtcagcacaatccagcccatgcccgccagcaggcccacagccagaggcacaagcaccaacgcgctgaacgggtttgatttcaccacgcccaggttcacgctggccaccagcgccaccagcgccaccaggcccgtcgcagtccttgccgtcctaatccgcttcattgatcaggccctccatttccggctctcgagtgagcgaaacgtgaggaacaggaagaaagccgcaaacaggacataataggcgatatcctccggctgtacgatccccttggccatttctttggcgtggaaatcgatgggcagttggtgcaagaaacccctgaagatgtcgtacacaaagcccacgccgttcctgaatgtctcgccccaagcttcgggcgcggggttggcttcgggaagatcctcggcaaacgacccgacaatatacaggatgaaccacagcccgaacgtcaacgtgcccgcggtgacctggttgctcgttacggacgagacgaacagccccaggctgaaaaacgccgcgctcatcataaagaccgtcgccagaccgaacaccagcaccgccccctcgacctgcacgtaccacgaaacgatcagcaggtgaaccgctaccaccgccatcatcaccaccagcatccccagcgccgccagatattttccaaaaatgatctcgcggtcgcgcaatggttgcgtcaggagcaattccatcgtgccccggttgcgctcttcggccagaagccgcatcgtcaccagcggcccgatgaacacgatcagcgtgccgcaaaacgtcaggaacgggctgagcagcgtctcctcgaaatccggcacgctcgaataggcgtacatggcgggattcacgctgactttggcgtagaacaggaacgaggcactgaacgcgagccccgaaatcgccgcgaatatgcccaccacaacgtagccgatcggcgtcgtgaaatagctcgcaaactcccgcttgcagactgcccacgagttcctcataacgaacctccacccgcggcggccgcgacaggcgccgccccctcgtcttccgcggcatcctgtgcaacggcggcgataaacacctcttccagcgtgcgagcggttcctcgggccagattggccatcgtgtcctgggcgacgatccggccgcggttgattatcagcacacgctcgcacaccatcgtcacttccggcaggatgtgcgtgctgagaaggaccgtgtggtcctggccaagctctttgatgacctgccggatctcgatgatctggcgcgggtccaagccgaccgtcggctcgtcgaggatgagcaccggcgggtcgccaatcaatgcctgggcaaggcccacccgctgacgatagcctttggacaggttgcggcaaacgcgccggctcacctccaaaaggccgcagcgttccatcaccctccccacctccgccatccgccgcccgcggcccacccccttcacctccgccacgtaccgcagaaactttgaaaccaccatctccccgtacaacggcacgctctccggcaggtaacccacgcgtcgcttcacctctatcgggtccgacttgatatcgtaaccggctacgaccgccgtaccccgcgatggcggcgaaaaacccgtcaggatccgcatcgtcgttgtcttgcccgccgcgttcggacccagaaacccgagaacctcgcctttgtcgacgaaaaacgacacgtcctcgatggccgccagttgaccatagtacttcgtcagacccttaacctcgatcatcttagagtctccgtcaggccccgcgtcgaggccgttaacccatgaatcatcatactactaatggtggccgtatttcacatgtccactaaaaaatccacatattgcccttgacttttgccggagcacagtatattgtgggtcttgcggagatcccgcgaccggtattatgttgacagtttaaggcggctcctacacctagagcgggttgctcggttttgtcaggtgttattgaccattttgtgccggactgacaattttttgaaggcagaaaatgccggcctgacggccaaacagccgcctctgtcaccgcccggcgcatgaccaacacccgcgtattatattgattttgaacgagttaaatcaagctgctccgagtgctgaagtagttggcacgctcgatgctcggttgagaaacgggatttggagtacgaagttccgagaaagcgaggcagtgtatgatgacagttcaatgttgctcctgcaagaaaatccgtaaaggcagccgttgggtgatgacgacggtgccggaatcccagatgcgcatcagccacgggtattgcccaacgtgcgcggccaaagtctatgccgagatacgtgtggcttcccgcaaccatcgcctggcggccgtcagcaacgcctgacgcctcgaacccgggccgccgcccccggcccgggtctcctccaacctggcccggcctttcacgtggccccactccggccatgcccgtttcgccgtagccgaaggcggctgagaagccgcattcagaatctttgttcgcgaccttgatccaacatctacgcgccgtgagcagatgtcgcgaacaaaaattctaagttgcgcgtgatcccccttttatggtatctttcgatgctttctaattcacaggaacccctcgagtgaagtggcttgggtgttccggggcgctccggcgccttgggagttcggccgttccgccagttgcgcggccgccgaacaagccgcggggttccgaggacgtaacccgaaaggagtttcactaccatgcctatcgtaacgatgcggcaactgctggaggccggcatacatttcggccaccagacccgccgctggaaccccaagatggcccgatacatcttcggccagcgcaacggcatctacatcatcgacctgcaaaaaaccctccaacaaatccggcaggcgttcgtatgcatccgcgacatcaccgcggccggcggcaacatcctgttcgtgggcaccaaaaaacaggcccaggaagccgtcgcccacgaagcccagcggtgcgggatgtactatgtcaacaaccggtggctgggcggcacgctcaccaactgggaaaccatccgccagagcatccgcaacctgcagcggctcgaggaacttaacaccagcggcaaactcgatgagcagttcacaaaaaaagaagccatccagttccgcaagcagatcgagaagctcgacgccaacctccgcggcatcaaaaacatgcccggcctgcccaacgccctgttcgtaattgacgccaagaaagaggcgattgccgtgcgcgaagcggcccgcctcggcatcccgtgcgtcggcattgtcgacaccaactgcgaccccgacaccgtccccattccgatcccgggcaacgacgacgccatccgcgccgtccagttgttctgctcgatcatggccgacgccgtcatggaaggccggatgaacatcgataaagtcagggccgacgaagcccgcccgccggctgcggccgcggttgcacccgaaacggctgcccccgccggtcagaatgccgccggggccgaagagttgggcactcaatttgaccaattggaggagtaagcataatggcatttgccgctaaagacgtttcgaacctgcgcgaacagaccggcgcgggtatgatggattgcaaacgggcactgaccgaaaccaacggcgatttcgacgccgccgtcaagtggctgcgcgagcgcggaatggcccaggcttccaaacggtcggcgcgcgtcgccgcagaaggcaaagtggcctcgtacatccacatgggcgggaaaatcggcgtgctcgtcgaagtgaactgcgaaaccgacttcgccgcgcactccaaaccgttccaggagttctgccacgacgtgtgcctgcaagtctgcagcgccgttccccggtgggtgaggcgcgaagacgtgccccaggacgccctcgacgccgaaaaggaaatttacacggtgcgcgcccgggaaacgggcaagcccgagaaagtcctgcccaagatcgttgaggggatgctcaacaagtggtacaaagaagtgtgcctgctcgagcaaccgttcgtgaaagaccccgacacgactatcgaagacctcatgaatgagctcagcggccggatcggcgagaagatcgagatccgccggttcgcccggttccagttgggcgaagggatcgagaagccgaaatcgaacctggcccaggaagtggcgcaggccgtcaacgcggcccagcgcgcggaatccgaaaacaggtaaaacgcgatgtcgcaaggcgccccgaaatacaagcgggtgttgctgaagttgagcggcgaggccctccagggccccgctgctagcggcatcgatttccccaccctcggccacattgccgatgaagtcgtggaagcccacgggatgggcgtccagattggcctcgtgatcggcggcggaaacatctaccggggcacgaaatcttctgaaacgggcctcgaccggcccaccggcgattacatgggcatgctcgccacggttatcaatgccctcgcgatccaggcggccctcgaaaaacgtggcgtgcccacccgcgtcctgacggcaatcgagatgcggcccgtggccgagccttacatccgccgcagggccgtgcgccatcttgaaaaaggcagggtggttattttcggggccggcaccggcaacccgttcttcaccaccgacacggccgccgcgctcagggccaacgaaatcggggccgacatcctgttcaaagccaccaaggtcgacggcatctacgacgaagaccccgtacacaaccacaaggccaagaagttcgagcgcctgtcttacgcggaggtcctgcaaaagaacctgcgcgtaatggacgccgcggccgtgtcgctgtgccgcgaaaacaaaatacctatcctggttttcaacctgaccacgcccggaagcgttattcgcgcgttgcggggggacaaaataggcaccatcgtcctcgaacagtaggccggcctgcgaagccgccgcagggaggcacgcccggcatgggccgggccggcgggcgccgctgttcaccgcaatctgcccggcccgcgcctgggcgcggctcgaaaaaggagagtgacccatgtccaatgcgctggccaagcaagcacgcgaaaaaatgcagaaaagcctcgacaacttccgccaggagttgacgcacatccgcacgggcagggcgtcggtgggcctgctggacgcgatcgaggtcgaggtttacggcacgaaaatgaagatcaaccagctcggcaacgtcaccacacccgaaccgcgcatgctcgtgatcgcgccgtgggatcgcacgcagatcggcgctgtcgaaaaggccattctcgcctcgccgctcaacctgacaccgtccaacgacgggcatctgatccgtatcccgtttccgccactcaccgaagagcgccgcaaggacctcgtgaagctggtgggaaaaatggctgaggaagcgagggtggctgttcgcaacgtcagacggcacgaggtcgataccacaaaaaaaatgcagaaagacggcgacctacccgaagacgaggcccataaactcaccgacgaagtccagaaaatcaccgacgatttcatcaacaagatcgacgaagcgttcaaggccaaagaagccgagattatggaagtgtaagcgcccccggaggggcgaggcagtgaaaggattttaatgtcgcagagggaaatggacccaaagtcaatgccgcgccacgtagccattatcatggacggcaacgggcgttgggcggaaaaacggggggtggacgtcacgcacggccacgaagcgggcacacgcagcgtgcgcgtcgccatcaaagcggcccgcgatttcgggatcaaagtcctgacactttacgcgttctccacggaaaactggcgccggccccagtccgaggtcaaagccctgttcgccatgatgagcaagtacatctacctcgaactggacagaatgaacagccaggacatccggatcgtcatcatgggccggaccgacggcctctatgaagaaaccatcaaagacctcgcctattgccaggaaggcaccaagaacaacaaatccatgctgctcaacgtcgcggtcaattatggctcgcgcactgaaattgccgacgccgcaagagccatcgccgccgacgtcaagcgcaacaagctggccctcgaccaaatcgacgagaaaaagttcgccgaatacctctacatgccttacctgcccgatctcgacctcctgatccgcaccagcggcgaaatgcgcgtcagcaacttcatgctgtggcaattgtcctacgccgagtttgttccgatgccggtgctctggccggatttccgccgcaggcacctgcgccaggcgatccttacctaccagtcgcgccaccgccggttcggcgcccgcaaatgatgttcaagcgctccttcatcctgcgcgtccttacgacgctggtcctggtgccgctcacgcttctgctgatctgggcgccgccgcttggcgcgttctatgtgctctttataactacactcgcctgcatcggcaccattgaatacttcaacctcctgcgcgcaaagcaaatccccgccgagacggtcgcgggtatcgccgcgggaacgacggtgaccatcagcggcatgttcggggcgcccggcttgaccgccttgctcgtatatggtggcatcctgttggtatcggcggtgcacgtggcccgcgtgcgcctctcgctggaaggcttggcgggctccgcgttcggcgtcatctacgtgggttggtttgcggcacacatgatcctgctgcatgaactgcccgtggccggccccggtctcgtgacgattctgctggtggcggtggccgtgacggacgcttttgcctacctcggcggttcggccttcggccggcacaaactcgccccgcgcgtcagccccgccaaaacatgggaaggcgccgccgccggttttctgctgacgctgtgcgccatggcggtcgtctacgccatcagccggcgcaccggcggctggccggattggacactggcgcgctacgtctgggtgggcgccctgctctcggttgtcgcgcagataggcgacctcgccgagtcgtccatgaaacggtccgcgggcgtcaaagactcgggcgccttgtttcccggccatggcggcgtgctcgatcggtgcgacggcttccttttcgccgcgccggcactctattacgtcgcggccaatctgttctgaagccggtttagtcaggtatacttatctgaagtcgctgtttcgggtcactgagtacacggatccataaatatggcaacgtataatacacaaagcaaaaaacggggactgacccgcttccggctgtttggaagcgcattttcggcagtttgaaaatcgtgtctgtccccgctttttgcggcatgaatacgttagcgaatttatgaagtggccccccaagcccagctcacttgctcggtcccgccccctgtggcatactcgcggcaaggagggtcggctggcatgatgattctcgtcaccggcggcgccgggtatatcggcgcggttaccgtgcgcaccctgctcgacaaagggttcgccgtccgcgtgctcgacaaactcctcttcggcgacagccccctcgacgaggtccgcaaccaggtcgacctcgtccagggcgacatctgcacgctcgacgactccgtcctcgaggacatcagcgccgtggtacatctggccggtctcagcaacgaccccaccgccgagttcaatcccgaagccaacaggcgcatgaacagcctcgccactcaatccctggccgaagcctgcaaacgaaaaggcatccggcggttcattttcgcctcgagctgctcgatctacgaccacggcctcatggccgaagacgtgatccaggacgaaaactcgcccgtacagcccatggccgcatacgcactcagcaagttcgccgccgaacaggccctcctcgaactgaccgacgaccagttccagcccaccatcctgcgccaggggaccgtctacggctggagcccgcggatgcgttacgaccttgtcgtcaacacgttcgtcaagtccgcatacgaaaccggccggctgaccgtccattgcggcggggagatgtggcgcccgctcgtcgacgtcaccgacgtcgccaactgttacctggcctgcctcgaagccgacctcaaactggtcggcggccagatcttcaatgtatcccacaaaaactacagaatcctcgagctggcccattgggtgaaaaaggcgctccatggcctgcgcgacgtcgagatcgacgtccaatacggcagccagcaagcacgcagctaccgcgtcaacacccgtaaaatcgaaaccgtgctcgggttccgccccgtcgttaccgtcgaagaatccgcacgcagcatggcccagaaaatcaacgccggcatcagcgccgatttcaacaacccccgctattacaacatccgctggctcgaattgctcgtcgaaatacaggagcacctccgccgaataggcagtatattctgatgcgggtcgtcgtcatcggcgcgcgcgggcagttgggcaccgaactctgcgccgtttacggcaatacggatcttatcccggtcgacatcgacacgctcgacgtccgcgacgcccacgccgtctccaacctcattcaatccgcgcggcccaacctcgtcgtcaacaccgccgccgcgcacaatgtcgccgaatgcgaaaccgatcccgacaccgcgttcgccgtcaacgccgccggcgccagaaacgtcgcggccgcatgtgccggcgtgtccgcccgcctcgtctacatcagcaccgactacatcttctccggcgaccggccaggcgtcccactcgtcgaggacgacctgcccggtccgcgcagcgtctacgccgccagcaagctcgccggcgaacatctcgtcgccgcccaatgcccagaccacctcatcatcaggtccgccgccatgtacggccccgccccatgcatcgccaaaggcggccgcaacttcgtgagcctcatgacgcacctcgccgccacccagcccgaggtccgagtcgtcaacgaccagatcaccacaccaacctacgccaggtcgctcgccgcccagatcaaactcgctgccgaaaaagccccacccggtatctaccacgccacatgcaacggcgaatgttcctggtacgagttcgcccgcgaaatcttcgacgtcctcaaaatcaagacgcccctcctgcccgtctccaccgaagatatcccctcaaccgtccagcgcccccgatactccgtcctccaaaacaagcgcctccaggacctccgcctcgacatcatgccccactggaaacacgccctccacgaatacctcaatacggcaaaaaaagccgactgacgcaaattgtggtgcgggcgttctcagtgcgaagtgcgaagttaaactgtcaatcgcactgtcaacttcgcactgtcaacttcgcactgtcaacttcgcactgtcaatcgcactgtcaacttcgcactgtcaacttcgcactgtcaaccttcccgcttgcggtgaatcacccgctggactttcgccccctccggccgcgacaatttcccgggtgcgaacacttccaccttaaacgacaaaccgaaccggtcgcggagatggttggccactttcgccttgttcttctcgtgttccatctcgacgttgacggtgatctccttcaggccgtcggcgtcttcgatcacgatctgatagttcgatcccacccccggcgtctccagcagcacctcttcaatctctctcgggaaaaacgtcacgcccttgatggccagccgctcgtccgcccggcccgcgatcggcgctatccggacgtgcatctcggatggaaccaagcccgccttcccaaaccgctcccgctgaaccggattccggtcgtaaacgtaccgcaccaccgcccgaagccgctccgactggatccgccgcaaaaaattggggacagactacgaatttccatgtaaaaatcagggacagaggggctggtgaaaaagtatcaaccatcccaaaaaccggcttcgtaatcttctatacgcaaagcgaaaaacagggactgactacgcttccggcagtttggaagcgcatttccggcagtttggaaatcgtgtttgtccctgcttttcgcggccctgaaacaacggcttggctttttcaccagctccacagactacgaatttccatggaaacaacacattaagggacgcggcattcttgggaaatcagggacacgcctggaggtcggattccttcttccggttttttactccttttggacgtccgcgcttcctctggcggagaagccggttgagcagcgattcgaggtgctcgacgaaatctgccgacccgcaagggcgtccggagtgggtctgtttgcggattcgctcgatgtcttcatccctgtcgtcgaccagccactcaggccagtttggaatgaccccggacggcgggtaatccgttgacaacaaagcgtcgtgccggaatccgcaatgcgcggcagcgcttgaccagccatactgctctgcccgctcaacgatgccggctcggaccgggttgcgctcaacgtaacgtactgccgcccacaggtgaggctcatccaatgggcaggagtagaagcggccttgccagacgtggccgctcatttcggtcttggtgttgaagtgcatcgcgtaaaccgtatgtgcatcgtgcaatgccagagccaacgagtctggccgttgcggaaccgcaacaaagtgcacgtggtttggcatcaggcagtacgcccacaccatcaggccgtgccgatccgcgtacttattcaccagtcgaaggtagacttcccgatccgtatcatcctcgaagacattcgcccggatgcggatatcccggtactacgactcgtgctaccctgctcatgtgtattaggataggattaaatatcctgccggatcaacaaaaaatattcgtagtctgtccctaattcttatcccagcggcaggttcgggttgggcgtagcccgcagatccccaatcaggccgtgtttgagccgcgagtcgccggccgcggcgatcatggccccgttatccacgcacagcgacaacggcggcatgtggaccgacacgtggagctcggcgttgagccggtcgcgcagcagccggttcgccgcaacaccccccgccagcaccagccggcccgcgcccgtctgttccagcgccaaccgcgtctttgccaccagcacgtccacggccgcctcctgaaaactcgccgcgacatcggcaaccggcgccgtcgtcttcctcatctcgtacagcaccgccgtcttcaggccgctgtagctgaaatccaagccggcgtccgcgccggccgtcatcgcccgcggaaaccggatcgccttggggttgccctgctcggcggccttctggatagacggcccgcccgggtacggcaggtccaacagccgcgcaactttgtcaaacgactccccgaccgcgtcgtcgcgcgtcgccccgatgatgtggtactggtgcggccgcgggcagtcgatcaggctggtgtggcccccgctgaccaccagcgccaggaacggaaactttggcgggttgtcggtcaggaacggcgagaagatatggccttcaagatggtgcaccggcacaaacggcagcccccacgcataggccagcgccttggcgaaattcacacccaccagcagcgagcccatcagacccggcccgattgtcgccgctaccccatccaatcccggcggcggcacgcccgcatccgagaacgccttctgcgccagttgcgagatgcacctgatgtgctggcgcgacgcgatctccggcaccacaccgccgaacgccgcgtgaatcggcacctgcgacgccacttccgacgacaggatccgccgcccgtcttcaacgatggcgacgcctgtctcgtcgcaggaagtttctatgcccaatatgcgtgtcattgtactacctgggaagcatgcacaagacttataccatgtttctccagttccggcagcagtctcccgagcgcgtcaaccgtgcccggcctgaagtggccaatgccgatggctgtcccgttttccagggcaaactgcaccagccgatcaaactgctcccggatctccccgtcatccccgtcgttgtccaggaaaactttccgctcgcccactccgacacccgcctgccgcgccgcctgcggaatcttcgtctcgtgggtggtcctgctgtcgatgaaaaagagcttccgtgttttcaccacatcgaaaaaccgcgccagggcttgttcgtcggtgcagaagatcgatcccatgtgattgttgatgcccactgccccgggcacccggtcgagcgcctcgaccaacagccgcgccatctcttccggcggagtggaggtcgagatccagccgggatcctccgggctttccatcgggaggtgcagcatcacctcgaaatgcgcttcccctgccctgcgtgcggtctcggcggcgtccggcgcgcccggcagaatcgacaacgtgagccgcggatccagcttcaacacggcgtccgtgacaggcccgccgtaacccccgtcgtccagaatgatcgccacacgcggcggctgccccagtgccggcgactccgtctcgcaaagtcccgccagcgccatcaggttgatcaacaccgagtcgtcgtctgcaatcggcggcggcggcggcggtggcaagtgaagccgaacctccgcaaacttgcagccgcccaacgacaaatcgagttgtctcaccgtgccggaagcttcgcccgccgccacactaacctgcccacgcaccatctcgcgatccagcaccgtcaccagcccttccggcgccgcgccttccgcctcaacgtcaaacgacgtgaaataccacaatgccttctccgtctccaccagttgcggctccgcccgccggatctgttcaggcttaatcaggttgctgcgaaacacttcctcgatctgaccggcccgctcgagcgtttcatcgcgcaggttgaccggccgcgtcttgaggtgctgattgacaacgatcgccagcaggacccccgccgctgcgcaaaccgccagccccgcaaccacaataacccacgaattcggcagcggctgtttggccggccgagtcgctccgttggaagtctctttaaccatcagcaatccacccattcgacgtgctcgatatcgcagcccaaaaaacgttttcccacccgcgcgaaactctcgggcgcgtcgctcaccagaaattggtatgacggcgcgttatgaccacccgccccggccgcacccagcatgtcacgggcaacgcccgccgtggattcggcactgtcaaccagcgttacgccgtttcccatcgtttccgcgatcacccctttgagcaacgggtagtgcgtgcatcccaagacgagcgtgtcaatcgattgctccgcaagctgccccaggtactcccgcgcaacccgacgcggcacgtcgccctccgtccaaccctcctcagccaagggcacaaacaatgggcatgatttcgagaaaacctgcacatccggcgcaagccggtgtatcgcccgctcgtattggccgctcgatatcgtgccggcggttcctatcacgccgacgcgcttgttgcgcgtgctcgttacggccgacgccgcacccggctcaattacacccagcaccgggacatccagatcctcgcgcaacgcatccagcgcgtacgccgacgccgtgttacacgcaaccaccagcattttcacgccccgctcgatcagcaggttcgcgcacgcccgcgcataccggactaccgtccccgccgatttggtcccatacggcacccgcgccgtatcacccaaataaatgaccgattcccacggaagatattccaccagccggcgaaacaccgtcaggccgcccacgcccgaatcgaatatgccaatcgccccttcctgcgaacccatggttacaccggcccctgggacgcccatcccggttcgggcgtgaacggctcgctggtgtccgcgtgaacggggaacgcttcccgcgccgaaccttccatcaacaatcggactttggtgacggccggttcgcgcgaaccttttatggctccctgggtaactgtgttgacaatcccgtaaatcatgagcgattcaaacgaggcgctcgccgtcttcttgaaatcgagcgccaagtcaagcgtaaaatcgatcaccagttcaccgtccggcatcaggtaaaggccccggatacgcgtctccggcgagatgaccgggtcgagatcgccttgcggcccgcggatcaacgcttcaatcgcccgccggcagttttccgtggtgaattcggtgaattcgatcgccgccttttccgctaccagccggaggttccgcttgtcggcgaagtaaagatctacttcttttgtcgaagtcgcctcaaaccgagcttcatcctgggcaggcgccgcggcgggcccctgcgccttgggcatgaccggcgcgtgctcctgccgaagcagcacaaacaccagcaacgccgctacaaacaccagaaccaccgtcgccaggccccatgccgcaaaaaaaatccgccgatatatctccgcacgccgagcccgtcccatcatggctgaatggtctccatatacttcttgatacccgcggcgattccgcccgccagcttcgcctggtaatcttccgatgccagcagccgttcttcctcgggattcgtcaacatcccgacctcgatcatcagacccggcatcgccgcttcctgcaccacgtggcaccctagctggtaaatacccccggaacgctgcccggttgccgcctcgatgcccgacgctactgccgccgcaacttcccggctccgtcccgcgtaccgcgcgcccgcaaatccgccggccgagccgcacacaaatacccggcaaccctgctgccccgcgctcaatgccgctcccgtatgaaggctgatcaaaaggtcgcctttttccccattggccagaaaaacccgctccgcccgcggcacggaccacgccttgtcccgcgtcagcaccgttttcagcggcgaaccctgttcaagcgcctgctgcagtttctccgccacaacaaacacgaccgcatcttcggtaacgcccgtcaggccttggcatccaacatcattgccgccatgcccagggtcgattatgaccaccgctaccggcctgtccaccggccgatccggggccgctggcgcctcccgcttcggcgccttccccatcagacccgcgccgggttcactatcagccggctcagccgcgctcggcgcaccatccggcggtgcagtcacctcagtgccagccgccgttgcaccatcagccggcgccggcaacgtctccaccgccacctgtttcaccagcggctcaaggctttcgaccggcgcctcatcgggttgctcggccgtggccagcggttcaagcgcctgtggctcaggttcaaccggctgcaccggcctcacgggcggcggcgccgaggtcgtagccgtagccgcgccctgctgttttgccgccagccggaacgctttctcaaaaaacaccgctacatcgctggccgctatcaaaacgtcattgcctgactgaaccaccggtgcgccaagaacaaatatcccaagcgacgcgctgacttgcgtgtgattcggtcgaagccacgcgctcttctccgccagatcgatctgcgcccggtccggcgtcatcttgtacccgccacccacctggcttaccagcccaccaagcggaacgtacagcactccattccgatccaccggctcgacacgggccgtcttgacaccctcacgcatgctcaccgaaaaactgatcggccccgcttgaccccacgcacccgctcccacagccgcaaacaccgacaacaaaaaaaaccggcaaacggatcctgaaactgaacgcatgggactcacaacaccgcgactggcggttccttttcagtaggtaaaggtcatttctttaagttgattattcgctgcttgacaaaaacgctctcggagaaatcatgcgccggtctccaagagccccagagggtccaaaccagcgcccccatcagaaacgcaagaagtgctgccagtattgccagcccaatcctgtctcgtcgggccatagcgtttgctcctgggacctctccacgggaccaaggcccctgtgttcaacgtcgcttgtcttcggaaccctttcgcgacttcaaataatcgccaatctgtatctgctttttctctttaagcttgatctgactctgggccaccgccacctcgatgttcagcttgtccaggcacgccttgcaaagtctcttgctaagactgatggcgggggccccgcaacgcccgcacttcacctccgccatgttcacgttcgctatcagcccttcggccagcatccgcatcacgcacgctaccgtcacctccgcttccgccgccgcggcctccgcgttcagttgaggcgaccgatcaaggaccgcacggatcttctcataatccgcatcctcggccggctggcattttgggcaaacaagggctacccctttatcgaacagtttcttacatctcggacaacttaccagcgccatggcctgtctccttgctgggttcactccagtgcgtctgtatcgaatcaacgtctatgtccagatttccaaccacgttcgccttcagcacaaggccctcttccgaaacattgattccagccaccagcgaccgtatcgggagcccgtcctggtcgcgcaacgccgccggccgggccgggtaggttatccgaacccatgtccggtctttggccggcctctccaagtcatcccggccgccgtccatccccaccgcctccacgaccgcccccgccgcaaacacgtattggtcttccaccccttcttcccgcagttggttgccttcctcagattgctcccgcgacctcgcctcaagcgcttccacggcctcggcgagctcctccgggccagccgaattcgagcgcagccggccaagccggtcctgcatccagcacgttagccgaacaatatcatccaaccggccctgctggtacgccgccacatattccatcgccaccgggtcagccagcggcgccgccgccagcggcgcagccgtagctacccctcccgtatcccccacacctgccgacgctgaacccccctcaatcgattccgcgccgccccccgattctcccgccgccagcaccacctccccttccggtcgcggctgcacaagagggccggccagccagtaataacacgctcccgcaagcagcgccacaatcgccggcgccagccagttcggcctcttcttgacgtctgtctcacccacaccgcaatcctatcagaacccgccatatccgtcaaagcataagcgaaaaacagggactgaggagatggtgaaaaacccgctgcagccaccgagtagtttcttaactagaaagaagagttgagcgaaaaacagggactgactacgcctccggcagtttggaggcgcattttcggccgtttgaaaatcgtgtctgtccctgctttgcgcgggcctgcaacctaccacccagctttttcaccaactccacagactcgcttttttcggcagtttgaaaaaatcgtgtctgtcccgaatggcactgatttaagatatcccgcacttgcgcacctcgttttagcctgctttaccaggctcccctttgcacccgtctttagacggggtggtcatggcttaaccctttgtccacagcgcgctttagcgtgacttcaaaactgctttagcagcacgttctaactttgaggagaatgctgttaagttgcttaagtcagtgccattcgtgactgtccctgctttgcgcgcccaccgtcgcgacgcccccccggcagttgtggggggtgtcccgcttcttattgctactacaggctcaattcacattcaccgcgattttccgcggcttcgccttctccgcctttggcagcaggatcgtcaggacgccatacttcatttcggccttgatcttgtcctggtccacatgttcgctgagttggaactgccggaaatagttcaccaggtcgaactcccggtaaatcaggtttccgggtgtgttgtgccggcctttcccggcgatcgtcagcacgtcgttctcgacccgcacctcgacgtcgtctttttgcacgccgggcaggtcaaccaccaccgccagcccgtcctccacgtcgaatatgtccaccggcgggacgagcgtccgcgcctcttcgcgtgtctgcggaaccgtttcttcccgtttctgtggcaccgttgactctttcatctctataacctcctacgcgcgcacacgcgcgcggcttggcctggttttttcttacgcaactttcacggcaatctgcttgggttttgcggcctcggctttcgccagtttgatgaccagcaacccgttcgcgtaatccgccgtcaccttgtccccgtcgacctcgaccggcagtgtgatcgtccggatgaacttgcccgcctgacgctcgttccggtgatacgcctcgggtttcacatccattttgatcgcctgtttctcgccggcgatccgcaccgtgtcccgcacaataccgatctcgagcgatttcgggtccacgcccggcgcaagcgcctcgatatacacgtggtccttgtcctcgctgaggttgatgtacgggtacgaacgcgcaaactgttccgccaacaccgggccacacagcagcgggctcacacgacctccgccgaaactgtcaaacgcacgctccacctcgcggcgaagcgcttccatctctctccacggattccacgtcaggaatgtcatcgatctttcctcctttagcaccgtaatacgccggttagaaccggttagccggtggatccttttttctaccgccagtgaatttgcaaagcccatgccaatccgcccaaacctcgacataccctcgttacgcgccgttcttggcctttccacccgcccttaacgccctccggcccggttgctcccgccccgctccgtttcagtcccgaacaaccggtgtttcaaaacaaagctggggaatgaccgccaagcccgcgtcctttactccaataggcgcgcagttcctcggcgtttgttcgcccttttgtaagttggcccaggttggcatgttagttgctcctcccctccatgaggaatacaagttcaaattgaaccgcgcctccggcgcgccacctgccgcgcccaccgcgcgtcgcgcttcttagcgcgcttaaggagagtctcaaatggcacgctctatcggaatcgacctcggcacaaccaactcgtgcgttgccgttatggaaggcggccagcctaccgttatccccaactccgaaggcagccgcatcacgccttccgtggtggcattcaccaaagacggggagaggcttgtgggcgcaccggccaagcgacaggcaatcaccaaccctaccaacaccgtcagctccatcaaacgcttcatgggaaggcgctacgacgaggtcgctcacgaaatccagctcgtgccgtatcgcgtcacccgcgcacctaacggagactcacaggtcgaggtccagggaaaggcgcaccggcctcccgaaatctccgccatgatcctacgcaaaatgaaggaaaccgccgaatcgtatctcggcgaaaccatcacccgggccgtcatcaccgtacccgcctatttcaacgactcccagcggcaagccacaaaggacgccggaaaaatcgccgggctcgaagtccagcgtatcatcaacgaacccaccgccgccgcgcttgcctacgggcttgacaaaaaggtcaacgagaaagtggccgtgttcgacctcggcggcgggacgttcgacatctcgatcctcgccattggccacgacacgttcgaagtcctcagcaccaatggcgacacccacctcggcggcgacgatttcgaccagcgcgtcatcgactggctcgccgaggagttcaaaaaggatcagggtgtcgacctgcgcaaggaccccatggcactacagcggcttaaagaggccgccgagaaagccaaaatcgaactgtcctccgccatgcagaccgacgtcaacctgcccttcatcaccgccgacgcgtccgggcccaaacacctgaactaccgcctcacccgcgcaaaactcgagcagctttgcgaagacctgctcgaacgaaccaaggaaccctgccgccaggctctcaaagacgccaacctctccgccaacgacatcaacgaggtcatcctggtcggcggcatgacgcgcatgcccatcgtcggcgagatcgtcaaaaacctgttcgggaaagagccgcaccgcggcgtcaaccccgacgaggtcgtcgccgtcggcgccgccatacaggccggcgtcctcaccggcgaagtcaaggacgtcctgcttctggacatcacgccgctctcgctgggcatcgaaacgctcggcggcatattcaccaagctgatcgagcgcaacaccaccatccccgtcagcaaacgccagattttctcgaccgccaccgacagccagaccgccgtcaccatccacgtccttcagggcgagcgcgagttcgcaaaggacaaccgaagcctcggccagttcaacctcgaaggccttatgccggccccgcgcggcattccccaaatcgaggttgcgttcgatatcgacgccaacggcatcgtccacgtctccgcgaaagacctcgccaccaaccgcgaacaaaaaatccgtatcgaggcctcgagcgggttgaacgagtccgaaatcgaccgcatggtcaaagacgctcaggcccactcccaggaagacgagcagcgaaaacgggccgtcgaaatgcacaacaacgccgacgcgctcctctacaccaccgaacgcaccctgcgcgagcacggcgataagatcagcccccaggaccgcgcttccgtcgaggccgcgctcgaccggttgcgcgatgcgctcaaaggcgacgacaccgccgccatcgaaaccgccatgagccaggtcaccgccgaaacccataaactcgccgaggccatgtacgccgccgccggagcccacgcgggcgccgcgggccgcgaagaacctcagggcggacccggccccggcggaaccgtcgacgccgattttaccgtcgaagacgaaaacaagtagctctccgggaatggtgagcgcgcatgccggctgccgtcaaaaacttctaccagatcctcggggtgtcgcagaaagcgacccccgaagagatgcgctccgcatacctcaagctcgcccacaagtaccaccccgataaaaccggcggcgacaaggccgccgaggaaaaactcaaggccatcaacgaggcctacgataccctcaaaaaccccgagaagcgcaagcaatacgaccaggagcttcaagggccgcgccaattccggttcgaacgcgggtttgaaggggccggcgggtttcaaacgggcgccggcgggttccgccccgaagatctggcaggcgccggttttggcggcttcgagggcctgtttggctcgatatttggtggcctcggcggccgcacccgccgcgccggacctcaacccggaaatgatgtggaggtcgggctgaccgtttcgttgcgggaagccgcgctcggcggttcaaaacgcatccgcgtaccacggcgcgacaactgcaaaacatgcgcaggcgccggcgcagctcccggaacccgaccgcagacctgcccaacgtgccgcggcagcgggatggtgcagcggtcgcaaggcgccgcgttcagcattggccagccttgtccccagtgcggcggcaccggctcgatcatctccaacccatgcccaacctgccgcggtacaggctctgttcaaaccgaccgcgacctgaccgtcaccatccccgccggcatcgagtcgggcgcccggctccgtctcgccggcgagggggaacccggcgagcaaggcgggccccgcggcgacctctacgtccaaatcaacgtcgcatccgacgagttcttcacccgcgacggcagcgacatcaaatgcgaagcaaccgtccccttttccatcgccgtcctcggcggcgccgtcaccgtccccacactcaccgccaccgcccagctcaaaatcccccccggcactcaaaccggcgcaatcctccgcatgcgcggcctcggcgccgcccgcatgcacggcaaaggccggggaaaccaactcgtccaagtcaaggtcgaagtccccacccgcctgtccgaagccgaccgcgaagtggtgaagcggatgagctacgaaaccaaccccgcgcactacccccaataccagcaatacctccaacgcctccgccgccggtaacgtatgcctgggacaaattgaaagaattaggggcagaccacgaatatcttggtcctaatctgtccctgaatttccttgaacttcctgactgtccaaatcgcgcaggagtttctgtgttttcggccgcaggggcgggatctcttcttttacgaccgtccacacaatagccaagtctactccaaaatactggtgtatgagcttgtcccgcataccagccatccgcttccagggaacgtcaggtgcaaggcgccggacgctctccggcacttgtttggcggcctctccaagctcttccaggcatcgtacaatggcttttgaagtctttcggtcttgcaggaacctctccagcgacatatgcttggtaaactcagaagcctcgtctatggaagtcagaacatcctgcaagtagtcgcgggaatcgcgggtcataacatagcgacctctttgaggatgtgttggccgatgcggggtttcagggcggctttggtgacgaggtcgacgggagcgccaagccagtgggcgagtttttcttcgagttcgaggaatctaaaaaagcctatcggtttgtcgaattcaacgaggatgtcgattcgctaccgggggtggcttctccgcgaacgtaagagccgaaaatgccgatggcggcgacaccgtagtcgcaggccatttcgttgcggtgttctcggaggatgtctttaagctgttcgagtgttggctgcacggtttttcacctcgggctgtatctgctcaagtttagcacaggaggcgatggggacggcaattcgggcggggacggaacaggggagaaaaagtgaacattgtggacgtagtggacgctcgtctcgcgggatagagaaagaagggacgcgttcctgcctgctcacgctgttttggcttcagggtcctggaacgcgggcacccctcgtttttgaaagtactttcttgaaaataacgtcataataagggcgatcaggagaggcactcccacaatcacggcaaaatgccagccgaccaggcttgtcctttggagcttttcagcttcgtattgtggaatgttcatgctgttgaggagatcggaatacgctaggcgcgggaaagtgagaatcgcggacgacaggagacccgcagtggaggccagggcgccgcgccatgcccatgctttctgatgaaacaggccccaccccagcccgagcaagcaaaccataagcgtgttgagaacgacctcaccggccaggcccgacaacaagatcccgaacaaagggaagacaccgttgagcaggatcggaaacacgcaggcgattcccgacacggcgaaaaggaaactaagggctataacgggcacgggaatccggtccgtccagtacgtagcggcgtctcttgactggaatatcagcgcaacagtctgactctgatagaaccgaatgagcacgagcggcgccacaggccacgccagcaggcagaatgccgccacgaaaacgtgctcgggatgcaacagcggcaacccgtcgaaaaacacggcaaagatcggcggaagcgcgaaaaagcagccccagaccagccagacgtgcaacagggcgagggaaaccggacgtgcccacgaccgggttttcaaatgtccccagccgagagggatgaggacacccgcggccaggtacaatccgatgatcagacaggttatggcggcaaaccggaacgagccaaacagtcttgcgggttcactctcaggcccgagccacaacaggtattgcagcaagagggggccgccgtagagagcaactacgccagccgccagcaatacgaccccgataatcaagacaatagcggcggtacttgttttgttcattctattttttccagcctgatgacgatgggaatgtcgttgtcgtcgtcgtcgtacttgtatgagttggcgtcgtccaggtggagcagccacttgtcgggggcgatctgttcgagaattgacccgtcgtccaatcccagctttccatcggcgtcctggaatgcgactcttgcggcttcgctgtcctcacgggtcgatacccagaaatcctcgccaaaagtcgtcttcatgcagaacgggatgacgtcgccctttttgaattcgccgactttgatttcctcggacggctccgggctgttcggcaggttgcggaatataatcttgcactgttctctagacgttccgatccccaattcggtcatgccgccggcttcgccttgcacgggagtcagatagacggccgcatcgtatggcatggtaaacccgcgcggggaccagcagccccggatccggtcggcttcggccacggggacgcgctgcacctcgccgggcgtgcttggcggctgtggcacggtccgctcgaccaggccgggaagggtatcaggcgtttgccaatcgagcagttcgatctcgtagggttcgcggtggcgcaggacgcgcagaattgtgccgtccgtcagcagccacacatccgtgacaagtcccgcccgttttttgaaccaggtgtcggcgctggtgagttgctcgaggatcacgtgggtcgctttgaatcgcccacagggcactgtcacctcttcaaacccggcattggtgattttcatcttgtagaacccgaacgcgtcgccggtattgtcccagtcataggcgtcgaactcctgtgaggtcccgccggcgaccgtgatcatccgttcgagtatctgcatcgcgacgtacgggtcggggcggctgttgggatcaaacatcgcccccagcggcgcctcgaactctttcctgtcccagtcttccctcacaccgcgccgcgtcacaaaaaccttgcccggctcaaattccatcaccaactgatagcccgggccgccgccctcagcctctgcatgtacctcgtatctcgtgaatccctgctgaggcccgcccgccgctaggtactggtgcttcatgaatggcaacacgcaaacagccgtcaccgtgctgccgtcttccaccgtcttcacccatcggtgctcgggaatgtcgatggtttggccacggctcttgtgcctgtacagcgcgttcagcctcacctcccccggcgcctcttcaaaaaccggcggcgcaggtaccgccagcacctgcttcaactcttcggccgtcgggccgcttacttgcgggggcgcaacgggtgttgccggcaccggcgacggcgggccaagccgctcgggaagttccggcgggacggttatgccagccaactggagctcgtacggctcgcggtggcgcaggatccggacgatcgcgttgtcgctgagcatccagaaatccgtcacatgcccttcccgcttcttaaaccacgtgttggcgctcgacaactgccgcaccacgatgtgcgccgcctcaaacttgcccgccggcacgtcaacgctttccagacccgcgttcgtcacgctgatcctgtaaaacccgaacgcgttgcccgtgttgtcccagtcgtaaacgttaaactcctgcgtctgaccctgcgctatcggcggcaaaatcctggcgtacacctgcgccgcacaataactatccggcctcgcgttcggatcgaagaacgcgtcctccggcacggcgaactccttccgtacccagtcttcccggaccccgttgcgcgtcacgaacaccttgcccggctcaaactccatgatgatctcgtacccgcccccgtcaatctcgtaatagctgagccccctgtcccgcgcgcccgctacaatctccttgctccgcgtaaaccccagttccgctaccgccacgatcgaaccgtcttcccgacgtttcacaacctggtggtcctcaccgcgctcgccgtgacggtacctcccgtcgaacatcaccgtgcccgccgtgtccgtccccgtgctgccgccggctccaggcgtttctacagccgcttgttgcacttcggccgccgcctggtccgccgcgcccggagcatacagcgccgctatttcgtcaaccgaaagcgcacgcccgtaaatgcgcacctcgtcgatgtccccggcgaaatactgccgcggcgtctcgcccgcgccgatgttcagttggatgtccgccgcacggatctcgcccgcgcacggtttctcctggacaagccccccgttcacgtaaagcctcagccgctccgcctcggcatcatagacgcccgccagcgaactccactcgttcaccgccaccgccgtccccatcaggctttccgccaacgtcgacaggccgaatacggccttcccctccgcaatccccagcgtgtactggtcgtcttcctgcatcgcagggccccacttccaaaccaccgcgctcgtcttgcccgattcctcccgccgcacccacgccccaacgctcaggctcgtcttgccgtgaatgttcaacgtggccgaattgggaactacaatgctctggttcttcccattgaaatgataggcggcgttcggcttcccgtttcgatccgccgtcagcgtcgcaccaagcaccgtcccttcgttcccgttcccactgcgatctttcgcatccccgttaaacggataccacgccgccaaaccctcacccagtgtcgacaccgcaggtggccccgacaccgcaagtggcgccgccaccatccggatccccggcgcaacgcaaagcgccagcaacaccaagcccgtcaccgacgcagccgacaggcccggacgccgtttgatcgacaagtccatgatgcgccgcaagcggcgtccaagcgggtgaaactgatccgcaaaaccaagcgccgcgcgtgccaggcccggacggcgcaccgtcgccgccgcgcgaagaaggctctcgcaatacgattcgtcgtcggaaatccccgattccagaagccgatcatcgcagcagtcctcccgggtgctccgcaacgacctcagcaccagccagaacaccgggtgaaaccaccacagtaccagcaggatgttctcggccatgatgaaccacgtgtccttccgccggtgatgagcgagttcgtgcgccagaatcgaatcgatctgaccgccgttcagactctcgagcagcgcttcaggcatcaacacgcgcctgcgcaaaatccccagcgccaccgggcttgcgtcccccggcgttaccagcaattccacggccccgcgaatcccgagccgcgtcctcaactgatcaaaacgcccccgcaacgggcccgcttccaccaacctgcaactgcgcgttacccgccagagccggaagaaactgtacaccaacaaacacagcaccaccgccgcgcccacaccatgcgccagcaacaaccacgaccgccacgacagtgacggcagttcacccgaattgcccgaaggcggagacaccgccgcaaccgccgccgttgaacccaccgctcgaagctgggacgtttcaagttgcgccccggccaccgggagatcggtttgaggtggtgatgtctcctgcagttggcgctgcggtacgctctgttccggcgcagagattctcgttagcgggactgccgccggcgccgacgcggtttgtgtctcccccagcggtgtcaccggcgccacggtctcccacgccgccgtctcctgcaccggcgctaagaccacacccgtgcgctcggccgcgatccaacccggaacgctgaccgaaacccctatcacgggcggcaccgcaaatttcaccagcgccaccaccagcaaaccatatcgcaacggcgacggcatccgccgcagcccccacaccacacccaccaccaccagccccaccaacgccgactgccagctcgaatgaaacacccacgaccaccagctcgcgcttaccgcgttcaagatgctcatggcttgtcctttcggctcccgcgcggcggcccgcatggcgaccgcttggatcgcagctcgttcagaagcccctcgagcgccgccaactcctcgtccgtcggcgccgacgtctcaaacaggctcgccaccatcgccacgcccgaccccccaaacacccgctgtcgcaaatcacgcatgatcttccggaacatcggttccggaccccgcgtcggccggtaaataaacgcttttcccacctcccccttccgtttcgccacaagacctttcgcctcgagccgtttcagcagcgtcgccatcgccccatgcgtcatcggccggtatttgttcatcgcctcgcgaacctcccgcgcagacgcctcctccttctgccaaagacacgccaatacctccaactccgcatccggaagttcccgtcctcgactgtccttttcctttcccacggcccatcctcctgaaaagtatcaaaccaggctccccagtatatacgcccgtatcttttctgtcaagaaaaaaatacaatcgtatttcttgttccctcggggccgccgtatgctaaaatttctccggacgcacgatctgtgaaacattgtgcgccgaagggaatacgcatgacacaggatcagattacggaagcagccgtacgcgcgctgctcgacgccgccccgaagggttcccgtgtcatcttgtttggctcccgcgcccgaggcacggcccggccggacagcgacttggacttcctcgtcatcgaacccgaagtggaagaccggtttggtgagattttccggctccggcaagccgtcgaggaggttcttggagataccgtgcaaccggtggatcttgtcgtgacggaccaagagcgattcgaaaagtcccgcaatacgcctaacacgctcgccttcgaggcagccacaacagggcgcatgtatggatgacgcctttgagcgcgcgaatagcctgttgaccaaggcgcgacaggatcttactgctgcacaatgtctggccagagagccggctgtgtctcaatggaccatcgggtttcacgcgcagcaggctgtagaaaagtccctcaaggccgttctcatgtggcatgcggtgcgctacccattcacacacgatatcgctgcgctcttaaaactgtttcgtttggcgggcctgctattgccgccggatgctgataacctgcctatctaacgccgtttgccgccttgttgaggtatgaagacgagaactgggggttgccgccgtcagcagatgtgtccttacttctctcgtcggcagaagagacagttgcctgggcgtcatcagcaataaagggataacttttccctgattggtttacatcctgttaatcccgttatcctgtccaaacctaatccccaaacgcacgtccgttccgccgcgcctcgtacgccttgctcgtgcataaaacctgcaccgtcctcggcatcatccgcgtcacaacttccccgcccgaaaccgtgacggccttctccccgtacaactcatgcaacgtccggccttccagtccccccagccccacaaccaccacccccatgtgcgcctcatcgtcttcattcaccaaaatgatcacccactcttccccattcttccgcgcagcgcacgccacgcgtttcccgccgccgtcctccggcatctcaaccagtcccacacccacgcccggcacatcccccgccctcaaaaacggctgtagcgccgccaactccgccgtcagcgcgtacaggctctgccggaactcgaccgatttggcaaacctcccgccccaatacaaaataccacgcgcaccgtgcgcgatcgcgtcgtacgccatcagccgcgactcaccaaacgtcggatacgccgtctccttcgccccgtaatactcgcccaactcgtcccacgaaaacgcctgtagcaccatccacaccggtttcccgcgcccggcttccttccaccgctcgacgctcgacccgatccgcgccgggttgctcttttctgccttcacgggataaatgtcgcaccccgtaatatccacaaactccaggtactgccgcacataccccacgtcgcttttctccgcctcgttgacccataccgggtgcgcaccgccgtccatctcacgcaacatcccaaccgccgcacgcatgttcggcataacctccgccgcacgctgttccgcatacgccaccgcctcccgcgtctgtttccaccacgcccccgactctttgtgcacgcccagcgtcctgtacaacccgctgaacgccgtaaaattccacaccacctcgtccggaccttcccacaccgccagcgccggatgccccgcaagtttctccacctcctcacgcaacccctccgtcgcccccttgtccagcggcagcggaaccaccccctgcatccccgccgcacccgctcgatcaagctcctcgaggctgtgacaacgcaccaggttcacgcccgcccccgccatctcgcgcaaccccgcttcgtcctgcggcacgtcataaaagcctatcggaaacagccgctccccgccacgccgcagatatccgtcaaatccttcccccgccgctaacccgcccatctgcaacagaaccaccacacataaaaaccgccccatcctgttcatcctccatccgtccgatccgtccgatcccatccgcgccaatcaagtgcccgatcgactccgccagtataggttttgcggcaaaccggctcaaccgcgaccaaccattgatcgaaaaaccgccgcgcgatatcctgtcctccctattcggcatcaaccgagaaaggatctgtcatgaaaaccttccaggcgtgcgtggccgggcttgtcttctttttttcgatggccggcatggcggggtcgcgcaccgtctggctggaccaactcgacctcgcccagatccgccagggatggggaaaacccgtggcaaatcattccgttgtcagcatgccgctgcgcctgaatgggaccacctacgagcgcggcgtcggctcacatgcgcccggcgggttccacgtcatgctcgacggcaacgccgagaggttccaggccgtcgtcggcatcgacgatgaaaccatcggcaggggaagcgccaccgtcaaaatctacaccgacaaaggcgggcttgtgtttgacagcggcgtcctgaaacccaaccaggctccgcaacaaattgatgtcgacatccggggcgtcaaccgcctcgtcgttatcgtcggctccgcggacaacgccaatgcctatgatcaccttgactgggccgatgcgcgtttcatcgtcgcgggggccgacccgcaactcgtctccgccccgcccgaagagaaggtcatccttacgcccaagccggccaggacgccgcgcatcaacgggccgcgcgtgtatggcgtgcggccgggttcgccattcctctaccgcatccccgcaaccggcgagcggccgatgcagtttgccgtcaacggcctcccggaaggactcaaactggatcccaacaccggcatcatctccggcgcgatctccgaccgcacccccaaaacatacgaaaccaccctgatggcccaaaacgcccacgggaaggctgagcgcccgttccgcatcgtcgtcggcgagaccctcgcactcacgccccccatgggctggaaccactggtacgcccattacaataatgtcaccgataaaatgatgcgccaaaccgccgacatcatgatatcgagcggcatggccgacgtcggctacgcctacgtcaacatcgacgattgctggatgaacaccccaaaacatgccgacccgctacgcgtcgggccgttccgcgaccaaaacggtgagatcctccccaacaagcatttccccgatatgaacgccctcaccgactacatccacgccaaaggactcaaagccggcctttacacttcacccgggccgaccacctgtgcagggttcgccggctcttaccaacacgaagaacaggacgcaaaaacgttcgcacgatgggggtttgatttcctgaagtacgactggtgctcgtacggccagatagccaaagacgacagcctcgacgagcttaagaaaccctacatcctgatgggcggcatcctcgagcggcttgaccgcgacatcgtgctcaacctctgccagtacggcatgggcgacgtctggaagtgggggagcgaagtcggcggccactgctggcgaaccgccggcgacctcgggttcgaactctcccagtaccacgacgtcgcatcccgcaacgccgaacattggccgtacgcacatcccggcgcatggaacgaccccgactacctcctcatcggtgccgtcggtgacgcctcaaccctctcaaaacccatcccatgcccgctcacgcccaacgagcagtacgcttacatgtccctctggtgcctcatggccgccccgctgttctacagcggcgatatgcccagcctcgacgagttcaccctcaacgtcctctgcaatcccgaagtcattgacatcgatcaagacccgctcggcaagcagggatactgcgtcgccaaaaacggtgacgccgagatctggcgcaaagaactcgaaggcggcgccgtcgccgtgggcatgttcaaccgcggcgagttcgagcagcccgttaccctcgcctggaaagacgtcggcttgaacggcaaacaacgattgcgcgacctctggcgacaatccgacctcggcgtcttcgacacccaattcaccgcacccatcccccgccacggcgtattgcttctccttgtgactcaagagtaggcgcggttttccatcccgcgccgtccagccgcaaaccctgcatcaacgtagagcatttcagtgttgagatgcgtatggccgcaggccgcaaaaaacggggactgactcgcttttcggtagtttgaaaagcgtgtctgtccccgctttttgcttatgcaagcgtgccgcatttcaagattaaagtgctctaaacgatctggaaaaatcccagtagggatttgataattgtcagcctatcgcggcatagccgcaaccaaacacctgcttccctcggactctcgcagacacggcctccccgcccccacctgtcattccgaggagcgctggccgatgaccctttttctttcaacacagccctaaacccagcgcgacgtccgaccgcgtccccgcggtcggcggaatccccccggtatctttgccagcctgcaacttcttgatctgaccaatcccacaagcacttcgtacccaagtccaaacgacgtaaccgatatcgtagaagcggcgccctcgccgcttgactacagccacgcacgttgatagcagtgaaagttacgaaagaaatccacgctgctgacaattagggacccaggataatcgccgcacatcgacacaatcccgcacatgaccgggttgtcccagtcccaatactcgcgcccccaagtgtcgttcaccgtccacgccggcagcagcgcgtcccgcgccttcacgacggccccgtcgcggcccgtatagcccagggcgatgagcgcgtccagcggtccgttcgccccggagtgccacggcgcaatcacccccgccgaatcctcgacaatggggtgggcataatatcggtcgagattcgaagcacacacaccgaacaggaataaacgaggatgcaaagacaagaaaacaaatacgtccatcttcgacccatcaagaaagacctcctgcatattctgtcaattataagcatagggagccttaatgctataatgattaaagaaactacaaggaacttggggcaatgatttttcacgtgaaaatagaacaagcggaagatgggtggtttgtggtggaatgccccgccctgccgggctgcgtctcacagggacgcgatgaaaatgatgcgttggctaatatccgtgaagccataacggcttggctgtgggcggaagatcagaaggcagccgccactttgtccgagaattccaaggaaccgccggtcgtagtggctgtttagaggtgtgggggcagccagttcattgcagttcctaaggattctcagactctaaggcacaaagcaaatagcagcaagcgattaaggtacattcgcgtttttatgcgaaatctggtaaaattgcttaaagtaggaattgcgctatatttggaacagcggctggaggtaggatggatcgagatattatggggcgcctaaataacatatcgggcaaggaagcagccaaagcctttcaaagggccggctggacagcagttggtcaggttggaagccacctggttatgagcaaggcgggtgtgcgggtaaatctctcaattcctcaacacaaagagctctccctgggaacactccgggctttgataaagcacaccgagctcaccgtagaagagttcattagctacctttagggaatacgaccgtccgcagcgacctttccacataaaacgaccgaaggagaaatacccatggaaagacccggcgatgccacgtttcaaggtcaacccctgactgtgatcggtccgcgccttaagccgggcgaccccgctcccgaatttgaattgctcgctaacgaccttacccccgtatgcctctcgcaatccgcaggcaagatccgtctcatcgccgccgtcccctcgctcgacacccccgtatgcgacctcgaggtcaggacgttcaacaaacagctcgacgcctacctcggccgcgtacaggcatacaccgtcagcgccgacctcccgttcgcgcaggcccgatggtgcggcgccgcccgcatcaagaacgtccagagcctctccgaccaccgcgacatggcgttcggcgacgcttacggcacccacatcaaagaactccggctcgaatcgcgcgccgtgttcgtactcgaccccgacggcgtcatccattacgccgaatacgtcaaggaaatcaccaactcacccgattacgacgccgcgctcaacgccgttaaatctcttctggcataacgccccgtcattcagcatttatcatcgccgtatcgccgtacagcttctgctgttccttcattgccgccatcaactccttcacccgttccgcctgtttcccatccgccgcgagatcattcgtctcatacgggtcgctgtccaggttaaacaactgcgtcttgtccaccttgggataccggatcagcttccactcccccctccgcacggcccgctgaacctcccggtacgccagaaaaatcgtgtcccgcacaccgtcccgctcgccccggatcacccgcgccaagcttttcccctcgacttccaccggcgccggcgcccccacaagatcgcacaaagtcggaaaaacatcaaacaggtaggcaaacgcgtcgacccgcttcccacgcgggatctgcggccccgaaaaaatcagcggcacacccatcgaatgctcgtacaggttctgcttccccatcagaccgtggctgccgatcgcaatcccctggtccgacgaaaacacaatgatcgtgttctcatattcgccgcagtctttgagcgcctggaagatccgcccaaactgaccgtccatgtacgtgatcaccgcgtagtagtcgcgcaaatgcccgcggatctcccgctctgtgcgcggccaccccgccaactgctcgtcacggatctgcaactccccgttgtcgaacgggtggcgcggcaaaaagttcggcggcagagggatcttgtccacgtcgtacaggtccaggtactccttcggcgcgacacgcgggtcgtgcggttcaggccccgccaaatacatgaaaaacggccgggtcttgtcgcgcctgcccagaaaatcgaccgccgcgtccgccacgtgctcacccggcaatccttcccgccgcacaagctcgtcgcaattctccggcaacgggcccgttggccgttttggcttcacataaaggctctcctcgaacagcgcctgcacctcgacgtccgtgttgcccatcttccccacatgaaacgtctggtatcccgccgcacccatactcgacggcaggttggcaaaccccgccggcaggtcacgcaccgaaaaccacgaccggccccgcagcagcatcatccggctcggcaaacataccgcaccgctgaatccccccatgcaatacgcattcgtaaacaccaccccgccccgcgccaactcatccaaatgcggcgtgtggatgtgcggattcccaagcgcacctatcgtatcttcccgctggtcatcggtaagaataaacagcacgttcggccgcttcgtctcagtgcgcgcggtcctgcaacgccccgtggccaacgccgccgcggcagcgcctaactccgccagaaagctccgccgggtgcccatcattgcgcctccgcgccgttcccgccctgtcaatccgtactactatccgttaacttccagcatttttcaaagaaattccctgggccgattgggacaattgagacctttgggacacttgaaactgatcacccttgggggaaaaacgggaacaaccgccttatctcctcctcactcggctgccgtccgtactcgcagatctcgaacgcctcgacgtactcgatcttggccgcttgttcttgtccgtaccgcttgacgagcgccgcgttatccttctccggcgatcgtttcatccgcgccttgaacatctcgagcatgaactgtttcgctttgtccggctctttcggcaccatctcccgcatcttcgccatccacggcaaccactcgagaaactgcgacgggatcttgctcagcgcctcaaacttcttgtccgccacgtccccaacgtccaccatgatgtccgcctcgaacgggtaaggtttttggaacccgtcttccatgtataggtagacggggtttctgtcgagaggcggcgtgtccgggcagatgtacggcaccgccaccatgtaggccccgtcctggaccagaatgctcgtgtagcggtggtccgggtggtagtcgtttggccgcggcgctattaccacgtccgctttccactcccgcaccagccggatcagttccttccggatctccagcgtcggctccagctcaccatcatgatgatccagcacctccgtcgtgactcccaacaccttcgcggcctcatgcacctccgccgtccgccgctgcgccaacggcccccccgccatcgcgtaatggccgatatcgccgttcgtcaccgacacaaacttcacctggtggccctgcaccgcccatttcgccgccacgccgcccaccttgagttcgcaatcgtccgggtgcgcaccaaacacgatgatgcgcagcggggacgtgggcgggttgttcgcttgggcataagcccccgctatgccggccagcaatactaacaacgtaatcataatacggggcattgcgatcattgtgaatctcctcacaggtgtcgacaggttaagccaaactcccgttataggcttcccttgtggtgcatcttctccagtattagttccagcatagagttgaagtgtccggaatgcaacacacaaggcccgtacacacggacctccccgaattcgccgtattcccaacatcaattgtcgaacgccccacatctgaccgaatttcgctaagttgttacaggccagtcagttgcggcggttcagcgcggtgctgccggccccgtgacattgccgctggagctctttttcccccttgttttttttgcacgtgtatggctagaatgagtcttgtgaagacctgggagccgaatgtcagctccggtcccctctcttgaatcaacccaccttgtctttggatgcggttcgccgcgctgtactactaacgtttgatttcttgttgtggcgcgcagaatttgccgtacgtctgggacaccccccggcccgccgcggcgggtggggggtgtccctctttttgcccccaacccataccctttctttgcacttcgcactttgcacttcaactcccccaaaccccataccccaaaccccatacccgattttggttgcgcctatgccgcgctgtgctttttgtgccggaccgttccttcctgccgagcacggtagggtcgcgctcccacgcgaccgcgcgactgcacctccgctgctattcatccgcacctgtccgcctccgctggccaacttccacatcagaatcgcacttttagataaccatttagtctacttgatttgaacagaaccggcgcgtagactctcttcaaggcgtggaaaaggggctgtctatgatctcgtacaacttgctttccgaaaactggattcccgttctctatcacaatggccatttcaaacgcgtcggtatccgcaacgcattccaagacgcacaccggattcgacaaatcgccgcctccaaccccatggaccgcgtcgccatactccgattcctactcgcactcctctattggtgcaaggggaatccgccaagcgagcatgaggccacgaccggcgggccgttccccgcggagtggttttctaaactcgaagaaaatcgcgagcgctttgacctgtttggggaaacaaggcggttttatcagtacaagaaggcagtaggcgaagataaacggcttacggccaactatctcgtgcacgaggtgccgacaggcaccaatgcatggcatttccggcattcgacggacgaagtgaacggtttgtgtcccggatgttgcgcaatcggcttgttaaggcttccggcatttgcaacttcgggcggtcgtgggaaaccgcccggaatcaactcgaaacctcccttctacgccatacctctgggcagatcacttgcggcgactctccgtctttcctggcggcccgcagcggaactaggaacacccgcgtgggaaaaaccggacgttcaactgcctcgtagcggccaagtacccctcctcaccggcctgacctggctgcctcggcgggtgtggttggagcagcccgaggaaccgaaagactactgcatttcatgcgggcgcaaggagagcctgattcggcgcactgtatttgccccaattggcagcaccaagaccgaagaaggggagccggtcagggcatggtgcgacccgcatgtgatctacgggacgtccagcaagggcgaaatcagcagtctgcatgcgcgcgacgctcttggggcagcagacgccgcggcggggcaatgggccggtatcctcgcgggcctgcttcgaaaagggcaatcagccaacgcatctgcttggtggatagtgggcttttccaccgtccaaaacgacaagtatcttgaagccgtcgaatgcctgattctgtgcgatatcgagcacgccccacaagaacagcgggaacaatgcctgaaaaacttagaacaatggcgcaagggaaaagcggatttggtcaaaaagctccggccggagaacgaaaagtccgggcggcgtgagcatcccgagattacctcgatgcttgcgtcgattggaccgcacgtcgaaaaccaggtgtcggagcttaccggatcgttgatagcggacggcgaacccgcatggcaggaagcggcgaagacgtttcgcccgatgatgcgcgtggcggcacaatcactatcccctgggtttacaagccaagctgcgagaaagcgcaacaggattgccagtgccatcccggagatcacacccaaggccaagaaggcacggcgcgggaaaggaggcgataaatgactgccacggaagaattcattggcgttttgagtcggctgaagacgggagatcttgggcttttgcgcacgcatgcgcaacaggccctggatgaatccgtcgaggggtttgatctcttttccgggctgtggtggccgttgcggaaaaagaacgagcgggcgccgcggcgggaagtggcttggcttatagctaaactgtatgggtgttgtccgattccccaggcgcgcgatgccactcttgcgcgtcaactgcggcggtgccggccggcccatgaagagggtagaaatcggtttgggcggaagttcgacaacatattgatgctgccgctcgacaagatcgaggcggaacttcgttgggcgatcgggcaggttgcgtcgagagggctttcacttgattgggtaagactcacggatgaactttccgtctgggaacgcgaaagtacgcggctgcgatgggcggagcagtttcttaaaaccgaagaaaacgatgaaaggggacctttatgctgatcgagatccacgcaatacaaaaccattgtccttcgaatttgaaccgcgacgacctgggagcgcccaagacgtgctatttcgggggtgttctgcggtcgcgcatctcgagccaatgcatcaagcgaagcatccgtaccagcgaacagttcaaggcattgcggggcgggatccgtacccggcagttggcaaaactgatcgcagatcgggtccagggtaaggcggatgtaaagaagcgcgcggccaagattctcaatggatgcgggatcgcgcccaaagacgaagacaagagcgatatgctcgtgtttacaacgggtgaagcaatctgcgaaatggcggcactgctggaaaacggcgatgggaaatcggacgaacaactggcacaggagtttggcgatctgatcgtgcaaaggacggttgtgcccgacatggctttgagcggaagaatgctcgaaacgggtgtcttgaaagacaccactgtagaggcggccctgcaggttgctcatgcgatctcgactcacgaggcccggccggaagtggactattttgttgccgcggatgacattccgggcgaagatgcgggagcagggctcgtaggcgaagcgatgtatgcctcggcgtgtttttacaaatacttctcgatcaattggaagaagcttgtggaaaacctcaatggccaggaagaactcgccgcacatacggtgggtgcgttcatccgtgcggcggcgctggcgaatccttcgggtaaacagaacagctttgccgcgcacaatccgcccgatggcctgctgatccaattcgcggccaccccgacgagctatgcgaatgccttcgccgctcccgtgtcgggcaagggcaatcctgacgtcatttcacaaagtgtggcgcagttggcgcattatgttcgcgacttggacacggggtacggcaagccccagaagcgtttctggttctcgccgaatctgcgttatccgctttgcgtcatcgaagacaagaaaacgattccggttgccgaggtaaacctcaaatcgctcgatgaactgattccggccgtcatcggcggcttgggctttgattggaattcggttcagaagaaagtgacaagccaacaggtggcgccatgacggccaacacgctgtttcttcggtttgaaggaccgctgcaggcgtggggtaatcaggagtcgaagttcgttgtacggcgcacggctgaagggcccactaaatcgggcgtgatcggactgttgtgtgcggctttgggcgtgacgcgggcggaggcgcaggaatgccggttgcctcaactggccgaactgcgtatgggcgtgcgggtggatgcgcccggataccggtggtgggactatcacacggtaggcgcggggatggacatgcgcatcgccgaagccgaggggaagacaaaacccggcgcaatgctcacgcggcgggagtatctttgcgacgcgactttcctggtggtgcttcaggggaatcccgccctgatcgaagaactgcggcaggtgatcgaaaagccgcgctggacgctctatttggggaggaaatgctgtccgccgtcgcggcgggtgctcgaggaggcgacggcggcgcatccggacctgatttcggcgctcgtgtcggttccgtggcagcggcgctttgaaagcgataatcccccggaaacactcgagtatctgctggattggtttccgacgcccgaccagccggaggcgccggatgacgccgaggtgtggtacgacgtgccgttgacgttcgagccgccgtcgcatggtgcaaggtttgttgtgcgcgggcagttccgcgtgggcgccggggggcaggtctcggtggcggaatcggcgttgcagcgccgggtgccctcggcacaacgcccgcgggcagattatggcaattccgagtaccggaagatgcgcgcgcaacggctcgagaaggacacgcatctttgcgtgttctgcaggtcgcgcgctacgaccgtgcagcacgtcacgtaccgtcatgccggcggggacgagcgccttgacgaactaaagtccctctgccggttgtgccacgacgccgtcaccatgctcgagtatgggctcaacatgggcctggaccggatcgatcccgaggatccccgatggtgccagcgcatcatcgagaaacgcgacgagatcgtcaagttccggtcgctcgagacccggcggcgacggctcgaacccgaggaggtcgagtgatgtatctatcgagtctgatgatcaacaccggcgacaatccggaccggccccggccgggccggttgtggctgcgcaacgtttaccatgtccaccagcgcctgtcgatggcgtttccatcgaggtcgcaaggaagcccgtgcggttttctgttccgcatcgacaacaatatcgaagacaactcgccgcgcgcgatcattcttgttcagtctcaactggcccccgactgggatagggcgttttacaatgcgggcatgcttttggcggcggcccctgcggttcgtgaatacgccccgtcgttcgcggacggcgaggaactccggttccgtatccgggtcaacctgagcaagaagagcaaaacggccagcgacggtaccgacctgcgaaagccccacgacgccgtggaccggtgcggccgccaacgcgatcagtccaaacgggtcgcggtaacctggaagggcgacgagggcgagacgccggatggggcgatccggcaatggtttgcgtcgaaaggggaacatgccgggtttgcactcgacacggatttcaacctcattcacctgggctgggtcaccggccataagccgggaacgcccgagaacaagctgcggtttcgctccgcgctgctcgaggggaccttgagggtagcggacgggccggttttcatgcaaacggtcgagcgcgggctaggctcggccaaggggtttgggtttgggctgctgtcggtggctcacgttcgggagcaggcgggacgcccgcaccacaatcgaggcgtggcgcatgctgacgcgtgatttgcacgaactggcgaaggtgcgcgaccgaatgagctatttgtacgtcgagcacgcccggatcgatcaggaagacaaagcgatcgccattcacgacgcccaggggctcaccccggtgccgtgcgccacgctcgccctgttgatgctggggccgggcacgagcatcacgcacgcggccatcctggccctcgccgacaacgggtgcctggtggtatggtgcggcgagcagggcgtgcggttctatgcttcggggcagggaacgacgcgaaactcccagaacctcttgctccaagcgcgcctgtgcagccgccgaagcacgcggctcgccgtggttcgccgcctttacgagatgcggttccccggaaagctcgattcgagtctgacactccagcagatccgcggcatggaaggcgtacgcgtgcgcgaagcctattcgagcctgtcccgccaattcggcataccgtgggcgggccggtcgtacgatcggcagaactggcgcgaggccgatcccgtcaaccgcgcgttgtccaccgccaacgcgtgcctctacgggctgtgccacgccgccatagtcggcgcgggctattcgccggggctcgggttcatccacacgggcaaacagttgtcgttcgtgtacgatatcgccgacctctacaaggcccaaaccaccgcccccgccgcgttcgaaaccgccgcacgctctacccgaaacatcgagcgcgaggtccgcatcctgtgccgcgatgcctttgcggcacagcggctgctcgaacagattatgaaggacctcgagtacgtactcgacgtcccacccgccgacgaggatgaagccgagaccgatttcgactcggatcccggcacgcccggcggcctgtgggaccccgacgcaggcgaagtggccggcggcgtgtcttatgccgaacccgacgaacacacagaggataacacctaatggtcgtcatggtgctcgagcgcgtgcccgcttccctgcgcggtgaactcacccgatggctgctcgaacccaaaaccggcgtgtttgtcggcacggtgtccgccatggtaagagaaaaactatgggaaaaggtctgccggaaaaccggcgaaggcgggtctatcctcatttggagcgcaaataacgaacaggggttcaaaatcgatttctggggcgatccctccaggcacgtcctgagctgggatggacttcagctcattacaaagccaaaataaccaataaataccaagtgtaatccccacgcgcgtggggatgaaccgcatgcccgcctgcaagccggcgacatctgctagtaatccccacgcgcgtggggatgaaccgtgaacggtgttcactgaaggaaacatgaactagtaatccccacgcg

SEQ ID NO: 971 - DNA, 103298 bp, Artificial Sequence
  Synthetic Oligonucleotide
  misc_feature (1)..(59101): n is a, c, g, or t
nnnnnnnnnnnnnnnnnnnnnnnnnnnnnnnnnnnnnnnnnnnnnnnnnnnnnnnnnnnnnnnnnnnnnnnnnnnnnnnnnnnnnnnnnnnnnnnnnnnnnnnnnnnnnnnnnnnnnnnnnnnnnnnnnnnnnnnnnnnnnnnnnnnnnnnnnnnnnnnnnnnnnnnnnnnnnnnnnnnnnnnnnnnnnnnnnnnnnnnnnnnnnnnnnnnnnnnnnnnnnnnnnnnnnnnnnnnnnnnnnnnnnnnnnnnnnnnnnnnnnnnnnnnnnnnnnnnnnnnnnnnnnnnnnnnnnnnnnnnnnnnnnnnnnnnnnnnnnnnnnnnnnnnnnnnnnnnnnnnnnnnnnnnnnnnnnnnnnnnnnnnnnnnnnnnnnnnnnnnnnnnnnnnnnnnnnnnnnnnnnnnnnnnnnnnnnnnnnnnnnnnnnnnnnnnnnnnnnnnnnnnnnnnnnnnnnnnnnnnnnnnnnnnnnnnnnnnnnnnnnnnnnnnnnnnnnnnnnnnnnnnnnnnnnnnnnnnnnnnnnnnnnnnnnnnnnnnnnnnnnnnnnnnnnnnnnnnnnnnnnnnnnnnnnnnnnnnnnnnnnnnnnnnnnnnnnnnnnnnnnnnnnnnnnnnnnnnnnnnnnnnnnnnnnnnnnnnnnnnnnnnnnnnnnnnnnnnnnnnnnnnnnnnnnnnnnnnnnnnnnnnnnnnnnnnnnnnnnnnnnnnnnnnnnnnnnnnnnnnnnnnnnnnnnnnnnnnnnnnnnnnnnnnnnnnnnnnnnnnnnnnnnnnnnnnnnnnnnnnnnnnnnnnnnnnnnnnnnnnnnnnnnnnnnnnnnnnnnnnnnnnnnnnnnnnnnnnnnnnnnnnnnnnnnnnnnnnnnnnnnnnnnnnnnnnnnnnnnnnnnnnnnnnnnnnnnnnnnnnnnnnnnnnnnnnnnnnnnnnnnnnnnnnnnnnnnnnnnnnnnnnnnnnnnnnnnnnnnnnnnnnnnnnnnnnnnnnnnnnnnnnnnnnnnnnnnnnnnnnnnnnnnnnnnnnnnnnnnnnnnnnnnnnnnnnnnnnnnnnnnnnnnnnnnnnnnnnnnnnnnnnnnnnnnnnnnnnnnnnnnnnnnnnnnnnnnnnnnnnnnnnnnnnnnnnnnnnnnnnnnnnnnnnnnnnnnnnnnnnnnnnnnnnnnnnnnnnnnnnnnnnnnnnnnnnnnnnnnnnnnnnnnnnnnnnnnnnnnnnnnnnnnnnnnnnnnnnnnnnnnnnnnnnnnnnnnnnnnnnnnnnnnnnnnnnnnnnnnnnnnnnnnnnnnnnnnnnnnnnnnnnnnnnnnnnnnnnnnnnnnnnnnnnnnnnnnnnnnnnnnnnnnnnnnnnnnnnnnnnnnnnnnnnnnnnnnnnnnnnnnnnnnnnnnnnnnnnnnnnnnnnnnnnnnnnnnnnnnnnnnnnnnnnnnnnnnnnnnnnnnnnnnnnnnnnnnnnnnnnnnnnnnnnnnnnnnnnnnnnnnnnnnnnnnnnnnnnnnnnnnnnnnnnnnnnnnnnnnnnnnnnnnnnnnnnnnnnnnnnnnnnnnnnnnnnnnnnnnnnnnnnnnnnnnnnnnnnnnnnnnnnnnnnnnnnnnnnnnnnnnnnnnnnnnnnnnnnnnnnnnnnnnnnnnnnnnnnnnnnnnnnnnnnnnnnnnnnnnnnnnnnnnnnnnnnnnnnnnnnnnnnnnnnnnnnnnnnnnnnnnnnnnnnnnnnnnnnnnnnnnnnnnnnnnnnnnnnnnnnnnnnnnnnnnnnnnnnnnnnnnnnnnnnnnnnnnnnnnnnnnnnnnnnnnnnnnnnnnnnnnnnnnnnnnnnnnnnnnnnnnnnnnnnnnnnnnnnnnnnnnnnnnnnnnnnnnnnnnnnnnnnnnnnnnnnnnnnnnnnnnnnnnnnnnnnnnnnnnnnnnnnnnnnnnnnnnnnnnnnnnnnnnnnnnnnnnnnnnnnnnnnnnnnnnnnnnnnnnnnnnnnnnnnnnnnnnnnnnnnnnnnnnnnnnnnnnnnnnnnnnnnnnnnnnnnnnnnnnnnnnnnnnnnnnnnnnnnnnnnnnnnnnnnnnnnnnnnnnnnnnnnnnnnnnnnnnnnnnnnnnnnnnnnnnnnnnnnnnnnnnnnnnnnnnnnnnnnnnnnnnnnnnnnnnnnnnnnnnnnnnnnnnnnnnnnnnnnnnnnnnnnnnnnnnnnnnnnnnnnnnnnnnnnnnnnnnnnnnnnnnnnnnnnnnnnnnnnnnnnnnnnnnnnnnnnnnnnnnnnnnnnnnnnnnnnnnnnnnnnnnnnnnnnnnnnnnnnnnnnnnnnnnnnnnnnnnnnnnnnnnnnnnnnnnnnnnnnnnnnnnnnnnnnnnnnnnnnnnnnnnnnnnnnnnnnnnnnnnnnnnnnnnnnnnnnnnnnnnnnnnnnnnnnnnnnnnnnnnnnnnnnnnnnnnnnnnnnnnnnnnnnnnnnnnnnnnnnnnnnnnnnnnnnnnnnnnnnnnnnnnnnnnnnnnnnnnnnnnnnnnnnnnnnnnnnnnnnnnnnnnnnnnnnnnnnnnnnnnnnnnnnnnnnnnnnnnnnnnnnnnnnnnnnnnnnnnnnnnnnnnnnnnnnnnnnnnnnnnnnnnnnnnnnnnnnnnnnnnnnnnnnnnnnnnnnnnnnnnnnnnnnnnnnnnnnnnnnnnnnnnnnnnnnnnnnnnnnnnnnnnnnnnnnnnnnnnnnnnnnnnnnnnnnnnnnnnnnnnnnnnnnnnnnnnnnnnnnnnnnnnnnnnnnnnnnnnnnnnnnnnnnnnnnnnnnnnnnnnnnnnnnnnnnnnnnnnnnnnnnnnnnnnnnnnnnnnnnnnnnnnnnnnnnnnnnnnnnnnnnnnnnnnnnnnnnnnnnnnnnnnnnnnnnnnnnnnnnnnnnnnnnnnnnnnnnnnnnnnnnnnnnnnnnnnnnnnnnnnnnnnnnnnnnnnnnnnnnnnnnnnnnnnnnnnnnnnnnnnnnnnnnnnnnnnnnnnnnnnnnnnnnnnnnnnnnnnnnnnnnnnnnnnnnnnnnnnnnnnnnnnnnnnnnnnnnnnnnnnnnnnnnnnnnnnnnnnnnnnnnnnnnnnnnnnnnnnnnnnnnnnnnnnnnnnnnnnnnnnnnnnnnnnnnnnnnnnnnnnnnnnnnnnnnnnnnnnnnnnnnnnnnnnnnnnnnnnnnnnnnnnnnnnnnnnnnnnnnnnnnnnnnnnnnnnnnnnnnnnnnnnnnnnnnnnnnnnnnnnnnnnnnnnnnnnnnnnnnnnnnnnnnnnnnnnnnnnnnnnnnnnnnnnnnnnnnnnnnnnnnnnnnnnnnnnnnnnnnnnnnnnnnnnnnnnnnnnnnnnnnnnnnnnnnnnnnnnnnnnnnnnnnnnnnnnnnnnnnnnnnnnnnnnnnnnnnnnnnnnnnnnnnnnnnnnnnnnnnnnnnnnnnnnnnnnnnnnnnnnnnnnnnnnnnnnnnnnnnnnnnnnnnnnnnnnnnnnnnnnnnnnnnnnnnnnnnnnnnnnnnnnnnnnnnnnnnnnnnnnnnnnnnnnnnnnnnnnnnnnnnnnnnnnnnnnnnnnnnnnnnnnnnnnnnnnnnnnnnnnnnnnnnnnnnnnnnnnnnnnnnnnnnnnnnnnnnnnnnnnnnnnnnnnnnnnnnnnnnnnnnnnnnnnnnnnnnnnnnnnnnnnnnnnnnnnnnnnnnnnnnnnnnnnnnnnnnnnnnnnnnnnnnnnnnnnnnnnnnnnnnnnnnnnnnnnnnnnnnnnnnnnnnnnnnnnnnnnnnnnnnnnnnnnnnnnnnnnnnnnnnnnnnnnnnnnnnnnnnnnnnnnnnnnnnnnnnnnnnnnnnnnnnnnnnnnnnnnnnnnnnnnnnnnnnnnnnnnnnnnnnnnnnnnnnnnnnnnnnnnnnnnnnnnnnnnnnnnnnnnnnnnnnnnnnnnnnnnnnnnnnnnnnnnnnnnnnnnnnnnnnnnnnnnnnnnnnnnnnnnnnnnnnnnnnnnnnnnnnnnnnnnnnnnnnnnnnnnnnnnnnnnnnnnnnnnnnnnnnnnnnnnnnnnnnnnnnnnnnnnnnnnnnnnnnnnnnnnnnnnnnnnnnnnnnnnnnnnnnnnnnnnnnnnnnnnnnnnnnnnnnnnnnnnnnnnnnnnnnnnnnnnnnnnnnnnnnnnnnnnnnnnnnnnnnnnnnnnnnnnnnnnnnnnnnnnnnnnnnnnnnnnnnnnnnnnnnnnnnnnnnnnnnnnnnnnnnnnnnnnnnnnnnnnnnnnnnnnnnnnnnnnnnnnnnnnnnnnnnnnnnnnnnnnnnnnnnnnnnnnnnnnnnnnnnnnnnnnnnnnnnnnnnnnnnnnnnnnnnnnnnnnnnnnnnnnnnnnnnnnnnnnnnnnnnnnnnnnnnnnnnnnnnnnnnnnnnnnnnnnnnnnnnnnnnnnnnnnnnnnnnnnnnnnnnnnnnnnnnnnnnnnnnnnnnnnnnnnnnnnnnnnnnnnnnnnnnnnnnnnnnnnnnnnnnnnnnnnnnnnnnnnnnnnnnnnnnnnnnnnnnnnnnnnnnnnnnnnnnnnnnnnnnnnnnnnnnnnnnnnnnnnnnnnnnnnnnnnnnnnnnnnnnnnnnnnnnnnnnnnnnnnnnnnnnnnnnnnnnnnnnnnnnnnnnnnnnnnnnnnnnnnnnnnnnnnnnnnnnnnnnnnnnnnnnnnnnnnnnnnnnnnnnnnnnnnnnnnnnnnnnnnnnnnnnnnnnnnnnnnnnnnnnnnnnnnnnnnnnnnnnnnnnnnnnnnnnnnnnnnnnnnnnnnnnnnnnnnnnnnnnnnnnnnnnnnnnnnnnnnnnnnnnnnnnnnnnnnnnnnnnnnnnnnnnnnnnnnnnnnnnnnnnnnnnnnnnnnnnnnnnnnnnnnnnnnnnnnnnnnnnnnnnnnnnnnnnnnnnnnnnnnnnnnnnnnnnnnnnnnnnnnnnnnnnnnnnnnnnnnnnnnnnnnnnnnnnnnnnnnnnnnnnnnnnnnnnnnnnnnnnnnnnnnnnnnnnnnnnnnnnnnnnnnnnnnnnnnnnnnnnnnnnnnnnnnnnnnnnnnnnnnnnnnnnnnnnnnnnnnnnnnnnnnnnnnnnnnnnnnnnnnnnnnnnnnnnnnnnnnnnnnnnnnnnnnnnnnnnnnnnnnnnnnnnnnnnnnnnnnnnnnnnnnnnnnnnnnnnnnnnnnnnnnnnnnnnnnnnnnnnnnnnnnnnnnnnnnnnnnnnnnnnnnnnnnnnnnnnnnnnnnnnnnnnnnnnnnnnnnnnnnnnnnnnnnnnnnnnnnnnnnnnnnnnnnnnnnnnnnnnnnnnnnnnnnnnnnnnnnnnnnnnnnnnnnnnnnnnnnnnnnnnnnnnnnnnnnnnnnnnnnnnnnnnnnnnnnnnnnnnnnnnnnnnnnnnnnnnnnnnnnnnnnnnnnnnnnnnnnnnnnnnnnnnnnnnnnnnnnnnnnnnnnnnnnnnnnnnnnnnnnnnnnnnnnnnnnnnnnnnnnnnnnnnnnnnnnnnnnnnnnnnnnnnnnnnnnnnnnnnnnnnnnnnnnnnnnnnnnnnnnnnnnnnnnnnnnnnnnnnnnnnnnnnnnnnnnnnnnnnnnnnnnnnnnnnnnnnnnnnnnnnnnnnnnnnnnnnnnnnnnnnnnnnnnnnnnnnnnnnnnnnnnnnnnnnnnnnnnnnnnnnnnnnnnnnnnnnnnnnnnnnnnnnnnnnnnnnnnnnnnnnnnnnnnnnnnnnnnnnnnnnnnnnnnnnnnnnnnnnnnnnnnnnnnnnnnnnnnnnnnnnnnnnnnnnnnnnnnnnnnnnnnnnnnnnnnnnnnnnnnnnnnnnnnnnnnnnnnnnnnnnnnnnnnnnnnnnnnnnnnnnnnnnnnnnnnnnnnnnnnnnnnnnnnnnnnnnnnnnnnnnnnnnnnnnnnnnnnnnnnnnnnnnnnnnnnnnnnnnnnnnnnnnnnnnnnnnnnnnnnnnnnnnnnnnnnnnnnnnnnnnnnnnnnnnnnnnnnnnnnnnnnnnnnnnnnnnnnnnnnnnnnnnnnnnnnnnnnnnnnnnnnnnnnnnnnnnnnnnnnnnnnnnnnnnnnnnnnnnnnnnnnnnnnnnnnnnnnnnnnnnnnnnnnnnnnnnnnnnnnnnnnnnnnnnnnnnnnnnnnnnnnnnnnnnnnnnnnnnnnnnnnnnnnnnnnnnnnnnnnnnnnnnnnnnnnnnnnnnnnnnnnnnnnnnnnnnnnnnnnnnnnnnnnnnnnnnnnnnnnnnnnnnnnnnnnnnnnnnnnnnnnnnnnnnnnnnnnnnnnnnnnnnnnnnnnnnnnnnnnnnnnnnnnnnnnnnnnnnnnnnnnnnnnnnnnnnnnnnnnnnnnnnnnnnnnnnnnnnnnnnnnnnnnnnnnnnnnnnnnnnnnnnnnnnnnnnnnnnnnnnnnnnnnnnnnnnnnnnnnnnnnnnnnnnnnnnnnnnnnnnnnnnnnnnnnnnnnnnnnnnnnnnnnnnnnnnnnnnnnnnnnnnnnnnnnnnnnnnnnnnnnnnnnnnnnnnnnnnnnnnnnnnnnnnnnnnnnnnnnnnnnnnnnnnnnnnnnnnnnnnnnnnnnnnnnnnnnnnnnnnnnnnnnnnnnnnnnnnnnnnnnnnnnnnnnnnnnnnnnnnnnnnnnnnnnnnnnnnnnnnnnnnnnnnnnnnnnnnnnnnnnnnnnnnnnnnnnnnnnnnnnnnnnnnnnnnnnnnnnnnnnnnnnnnnnnnnnnnnnnnnnnnnnnnnnnnnnnnnnnnnnnnnnnnnnnnnnnnnnnnnnnnnnnnnnnnnnnnnnnnnnnnnnnnnnnnnnnnnnnnnnnnnnnnnnnnnnnnnnnnnnnnnnnnnnnnnnnnnnnnnnnnnnnnnnnnnnnnnnnnnnnnnnnnnnnnnnnnnnnnnnnnnnnnnnnnnnnnnnnnnnnnnnnnnnnnnnnnnnnnnnnnnnnnnnnnnnnnnnnnnnnnnnnnnnnnnnnnnnnnnnnnnnnnnnnnnnnnnnnnnnnnnnnnnnnnnnnnnnnnnnnnnnnnnnnnnnnnnnnnnnnnnnnnnnnnnnnnnnnnnnnnnnnnnnnnnnnnnnnnnnnnnnnnnnnnnnnnnnnnnnnnnnnnnnnnnnnnnnnnnnnnnnnnnnnnnnnnnnnnnnnnnnnnnnnnnnnnnnnnnnnnnnnnnnnnnnnnnnnnnnnnnnnnnnnnnnnnnnnnnnnnnnnnnnnnnnnnnnnnnnnnnnnnnnnnnnnnnnnnnnnnnnnnnnnnnnnnnnnnnnnnnnnnnnnnnnnnnnnnnnnnnnnnnnnnnnnnnnnnnnnnnnnnnnnnnnnnnnnnnnnnnnnnnnnnnnnnnnnnnnnnnnnnnnnnnnnnnnnnnnnnnnnnnnnnnnnnnnnnnnnnnnnnnnnnnnnnnnnnnnnnnnnnnnnnnnnnnnnnnnnnnnnnnnnnnnnnnnnnnnnnnnnnnnnnnnnnnnnnnnnnnnnnnnnnnnnnnnnnnnnnnnnnnnnnnnnnnnnnnnnnnnnnnnnnnnnnnnnnnnnnnnnnnnnnnnnnnnnnnnnnnnnnnnnnnnnnnnnnnnnnnnnnnnnnnnnnnnnnnnnnnnnnnnnnnnnnnnnnnnnnnnnnnnnnnnnnnnnnnnnnnnnnnnnnnnnnnnnnnnnnnnnnnnnnnnnnnnnnnnnnnnnnnnnnnnnnnnnnnnnnnnnnnnnnnnnnnnnnnnnnnnnnnnnnnnnnnnnnnnnnnnnnnnnnnnnnnnnnnnnnnnnnnnnnnnnnnnnnnnnnnnnnnnnnnnnnnnnnnnnnnnnnnnnnnnnnnnnnnnnnnnnnnnnnnnnnnnnnnnnnnnnnnnnnnnnnnnnnnnnnnnnnnnnnnnnnnnnnnnnnnnnnnnnnnnnnnnnnnnnnnnnnnnnnnnnnnnnnnnnnnnnnnnnnnnnnnnnnnnnnnnnnnnnnnnnnnnnnnnnnnnnnnnnnnnnnnnnnnnnnnnnnnnnnnnnnnnnnnnnnnnnnnnnnnnnnnnnnnnnnnnnnnnnnnnnnnnnnnnnnnnnnnnnnnnnnnnnnnnnnnnnnnnnnnnnnnnnnnnnnnnnnnnnnnnnnnnnnnnnnnnnnnnnnnnnnnnnnnnnnnnnnnnnnnnnnnnnnnnnnnnnnnnnnnnnnnnnnnnnnnnnnnnnnnnnnnnnnnnnnnnnnnnnnnnnnnnnnnnnnnnnnnnnnnnnnnnnnnnnnnnnnnnnnnnnnnnnnnnnnnnnnnnnnnnnnnnnnnnnnnnnnnnnnnnnnnnnnnnnnnnnnnnnnnnnnnnnnnnnnnnnnnnnnnnnnnnnnnnnnnnnnnnnnnnnnnnnnnnnnnnnnnnnnnnnnnnnnnnnnnnnnnnnnnnnnnnnnnnnnnnnnnnnnnnnnnnnnnnnnnnnnnnnnnnnnnnnnnnnnnnnnnnnnnnnnnnnnnnnnnnnnnnnnnnnnnnnnnnnnnnnnnnnnnnnnnnnnnnnnnnnnnnnnnnnnnnnnnnnnnnnnnnnnnnnnnnnnnnnnnnnnnnnnnnnnnnnnnnnnnnnnnnnnnnnnnnnnnnnnnnnnnnnnnnnnnnnnnnnnnnnnnnnnnnnnnnnnnnnnnnnnnnnnnnnnnnnnnnnnnnnnnnnnnnnnnnnnnnnnnnnnnnnnnnnnnnnnnnnnnnnnnnnnnnnnnnnnnnnnnnnnnnnnnnnnnnnnnnnnnnnnnnnnnnnnnnnnnnnnnnnnnnnnnnnnnnnnnnnnnnnnnnnnnnnnnnnnnnnnnnnnnnnnnnnnnnnnnnnnnnnnnnnnnnnnnnnnnnnnnnnnnnnnnnnnnnnnnnnnnnnnnnnnnnnnnnnnnnnnnnnnnnnnnnnnnnnnnnnnnnnnnnnnnnnnnnnnnnnnnnnnnnnnnnnnnnnnnnnnnnnnnnnnnnnnnnnnnnnnnnnnnnnnnnnnnnnnnnnnnnnnnnnnnnnnnnnnnnnnnnnnnnnnnnnnnnnnnnnnnnnnnnnnnnnnnnnnnnnnnnnnnnnnnnnnnnnnnnnnnnnnnnnnnnnnnnnnnnnnnnnnnnnnnnnnnnnnnnnnnnnnnnnnnnnnnnnnnnnnnnnnnnnnnnnnnnnnnnnnnnnnnnnnnnnnnnnnnnnnnnnnnnnnnnnnnnnnnnnnnnnnnnnnnnnnnnnnnnnnnnnnnnnnnnnnnnnnnnnnnnnnnnnnnnnnnnnnnnnnnnnnnnnnnnnnnnnnnnnnnnnnnnnnnnnnnnnnnnnnnnnnnnnnnnnnnnnnnnnnnnnnnnnnnnnnnnnnnnnnnnnnnnnnnnnnnnnnnnnnnnnnnnnnnnnnnnnnnnnnnnnnnnnnnnnnnnnnnnnnnnnnnnnnnnnnnnnnnnnnnnnnnnnnnnnnnnnnnnnnnnnnnnnnnnnnnnnnnnnnnnnnnnnnnnnnnnnnnnnnnnnnnnnnnnnnnnnnnnnnnnnnnnnnnnnnnnnnnnnnnnnnnnnnnnnnnnnnnnnnnnnnnnnnnnnnnnnnnnnnnnnnnnnnnnnnnnnnnnnnnnnnnnnnnnnnnnnnnnnnnnnnnnnnnnnnnnnnnnnnnnnnnnnnnnnnnnnnnnnnnnnnnnnnnnnnnnnnnnnnnnnnnnnnnnnnnnnnnnnnnnnnnnnnnnnnnnnnnnnnnnnnnnnnnnnnnnnnnnnnnnnnnnnnnnnnnnnnnnnnnnnnnnnnnnnnnnnnnnnnnnnnnnnnnnnnnnnnnnnnnnnnnnnnnnnnnnnnnnnnnnnnnnnnnnnnnnnnnnnnnnnnnnnnnnnnnnnnnnnnnnnnnnnnnnnnnnnnnnnnnnnnnnnnnnnnnnnnnnnnnnnnnnnnnnnnnnnnnnnnnnnnnnnnnnnnnnnnnnnnnnnnnnnnnnnnnnnnnnnnnnnnnnnnnnnnnnnnnnnnnnnnnnnnnnnnnnnnnnnnnnnnnnnnnnnnnnnnnnnnnnnnnnnnnnnnnnnnnnnnnnnnnnnnnnnnnnnnnnnnnnnnnnnnnnnnnnnnnnnnnnnnnnnnnnnnnnnnnnnnnnnnnnnnnnnnnnnnnnnnnnnnnnnnnnnnnnnnnnnnnnnnnnnnnnnnnnnnnnnnnnnnnnnnnnnnnnnnnnnnnnnnnnnnnnnnnnnnnnnnnnnnnnnnnnnnnnnnnnnnnnnnnnnnnnnnnnnnnnnnnnnnnnnnnnnnnnnnnnnnnnnnnnnnnnnnnnnnnnnnnnnnnnnnnnnnnnnnnnnnnnnnnnnnnnnnnnnnnnnnnnnnnnnnnnnnnnnnnnnnnnnnnnnnnnnnnnnnnnnnnnnnnnnnnnnnnnnnnnnnnnnnnnnnnnnnnnnnnnnnnnnnnnnnnnnnnnnnnnnnnnnnnnnnnnnnnnnnnnnnnnnnnnnnnnnnnnnnnnnnnnnnnnnnnnnnnnnnnnnnnnnnnnnnnnnnnnnnnnnnnnnnnnnnnnnnnnnnnnnnnnnnnnnnnnnnnnnnnnnnnnnnnnnnnnnnnnnnnnnnnnnnnnnnnnnnnnnnnnnnnnnnnnnnnnnnnnnnnnnnnnnnnnnnnnnnnnnnnnnnnnnnnnnnnnnnnnnnnnnnnnnnnnnnnnnnnnnnnnnnnnnnnnnnnnnnnnnnnnnnnnnnnnnnnnnnnnnnnnnnnnnnnnnnnnnnnnnnnnnnnnnnnnnnnnnnnnnnnnnnnnnnnnnnnnnnnnnnnnnnnnnnnnnnnnnnnnnnnnnnnnnnnnnnnnnnnnnnnnnnnnnnnnnnnnnnnnnnnnnnnnnnnnnnnnnnnnnnnnnnnnnnnnnnnnnnnnnnnnnnnnnnnnnnnnnnnnnnnnnnnnnnnnnnnnnnnnnnnnnnnnnnnnnnnnnnnnnnnnnnnnnnnnnnnnnnnnnnnnnnnnnnnnnnnnnnnnnnnnnnnnnnnnnnnnnnnnnnnnnnnnnnnnnnnnnnnnnnnnnnnnnnnnnnnnnnnnnnnnnnnnnnnnnnnnnnnnnnnnnnnnnnnnnnnnnnnnnnnnnnnnnnnnnnnnnnnnnnnnnnnnnnnnnnnnnnnnnnnnnnnnnnnnnnnnnnnnnnnnnnnnnnnnnnnnnnnnnnnnnnnnnnnnnnnnnnnnnnnnnnnnnnnnnnnnnnnnnnnnnnnnnnnnnnnnnnnnnnnnnnnnnnnnnnnnnnnnnnnnnnnnnnnnnnnnnnnnnnnnnnnnnnnnnnnnnnnnnnnnnnnnnnnnnnnnnnnnnnnnnnnnnnnnnnnnnnnnnnnnnnnnnnnnnnnnnnnnnnnnnnnnnnnnnnnnnnnnnnnnnnnnnnnnnnnnnnnnnnnnnnnnnnnnnnnnnnnnnnnnnnnnnnnnnnnnnnnnnnnnnnnnnnnnnnnnnnnnnnnnnnnnnnnnnnnnnnnnnnnnnnnnnnnnnnnnnnnnnnnnnnnnnnnnnnnnnnnnnnnnnnnnnnnnnnnnnnnnnnnnnnnnnnnnnnnnnnnnnnnnnnnnnnnnnnnnnnnnnnnnnnnnnnnnnnnnnnnnnnnnnnnnnnnnnnnnnnnnnnnnnnnnnnnnnnnnnnnnnnnnnnnnnnnnnnnnnnnnnnnnnnnnnnnnnnnnnnnnnnnnnnnnnnnnnnnnnnnnnnnnnnnnnnnnnnnnnnnnnnnnnnnnnnnnnnnnnnnnnnnnnnnnnnnnnnnnnnnnnnnnnnnnnnnnnnnnnnnnnnnnnnnnnnnnnnnnnnnnnnnnnnnnnnnnnnnnnnnnnnnnnnnnnnnnnnnnnnnnnnnnnnnnnnnnnnnnnnnnnnnnnnnnnnnnnnnnnnnnnnnnnnnnnnnnnnnnnnnnnnnnnnnnnnnnnnnnnnnnnnnnnnnnnnnnnnnnnnnnnnnnnnnnnnnnnnnnnnnnnnnnnnnnnnnnnnnnnnnnnnnnnnnnnnnnnnnnnnnnnnnnnnnnnnnnnnnnnnnnnnnnnnnnnnnnnnnnnnnnnnnnnnnnnnnnnnnnnnnnnnnnnnnnnnnnnnnnnnnnnnnnnnnnnnnnnnnnnnnnnnnnnnnnnnnnnnnnnnnnnnnnnnnnnnnnnnnnnnnnnnnnnnnnnnnnnnnnnnnnnnnnnnnnnnnnnnnnnnnnnnnnnnnnnnnnnnnnnnnnnnnnnnnnnnnnnnnnnnnnnnnnnnnnnnnnnnnnnnnnnnnnnnnnnnnnnnnnnnnnnnnnnnnnnnnnnnnnnnnnnnnnnnnnnnnnnnnnnnnnnnnnnnnnnnnnnnnnnnnnnnnnnnnnnnnnnnnnnnnnnnnnnnnnnnnnnnnnnnnnnnnnnnnnnnnnnnnnnnnnnnnnnnnnnnnnnnnnnnnnnnnnnnnnnnnnnnnnnnnnnnnnnnnnnnnnnnnnnnnnnnnnnnnnnnnnnnnnnnnnnnnnnnnnnnnnnnnnnnnnnnnnnnnnnnnnnnnnnnnnnnnnnnnnnnnnnnnnnnnnnnnnnnnnnnnnnnnnnnnnnnnnnnnnnnnnnnnnnnnnnnnnnnnnnnnnnnnnnnnnnnnnnnnnnnnnnnnnnnnnnnnnnnnnnnnnnnnnnnnnnnnnnnnnnnnnnnnnnnnnnnnnnnnnnnnnnnnnnnnnnnnnnnnnnnnnnnnnnnnnnnnnnnnnnnnnnnnnnnnnnnnnnnnnnnnnnnnnnnnnnnnnnnnnnnnnnnnnnnnnnnnnnnnnnnnnnnnnnnnnnnnnnnnnnnnnnnnnnnnnnnnnnnnnnnnnnnnnnnnnnnnnnnnnnnnnnnnnnnnnnnnnnnnnnnnnnnnnnnnnnnnnnnnnnnnnnnnnnnnnnnnnnnnnnnnnnnnnnnnnnnnnnnnnnnnnnnnnnnnnnnnnnnnnnnnnnnnnnnnnnnnnnnnnnnnnnnnnnnnnnnnnnnnnnnnnnnnnnnnnnnnnnnnnnnnnnnnnnnnnnnnnnnnnnnnnnnnnnnnnnnnnnnnnnnnnnnnnnnnnnnnnnnnnnnnnnnnnnnnnnnnnnnnnnnnnnnnnnnnnnnnnnnnnnnnnnnnnnnnnnnnnnnnnnnnnnnnnnnnnnnnnnnnnnnnnnnnnnnnnnnnnnnnnnnnnnnnnnnnnnnnnnnnnnnnnnnnnnnnnnnnnnnnnnnnnnnnnnnnnnnnnnnnnnnnnnnnnnnnnnnnnnnnnnnnnnnnnnnnnnnnnnnnnnnnnnnnnnnnnnnnnnnnnnnnnnnnnnnnnnnnnnnnnnnnnnnnnnnnnnnnnnnnnnnnnnnnnnnnnnnnnnnnnnnnnnnnnnnnnnnnnnnnnnnnnnnnnnnnnnnnnnnnnnnnnnnnnnnnnnnnnnnnnnnnnnnnnnnnnnnnnnnnnnnnnnnnnnnnnnnnnnnnnnnnnnnnnnnnnnnnnnnnnnnnnnnnnnnnnnnnnnnnnnnnnnnnnnnnnnnnnnnnnnnnnnnnnnnnnnnnnnnnnnnnnnnnnnnnnnnnnnnnnnnnnnnnnnnnnnnnnnnnnnnnnnnnnnnnnnnnnnnnnnnnnnnnnnnnnnnnnnnnnnnnnnnnnnnnnnnnnnnnnnnnnnnnnnnnnnnnnnnnnnnnnnnnnnnnnnnnnnnnnnnnnnnnnnnnnnnnnnnnnnnnnnnnnnnnnnnnnnnnnnnnnnnnnnnnnnnnnnnnnnnnnnnnnnnnnnnnnnnnnnnnnnnnnnnnnnnnnnnnnnnnnnnnnnnnnnnnnnnnnnnnnnnnnnnnnnnnnnnnnnnnnnnnnnnnnnnnnnnnnnnnnnnnnnnnnnnnnnnnnnnnnnnnnnnnnnnnnnnnnnnnnnnnnnnnnnnnnnnnnnnnnnnnnnnnnnnnnnnnnnnnnnnnnnnnnnnnnnnnnnnnnnnnnnnnnnnnnnnnnnnnnnnnnnnnnnnnnnnnnnnnnnnnnnnnnnnnnnnnnnnnnnnnnnnnnnnnnnnnnnnnnnnnnnnnnnnnnnnnnnnnnnnnnnnnnnnnnnnnnnnnnnnnnnnnnnnnnnnnnnnnnnnnnnnnnnnnnnnnnnnnnnnnnnnnnnnnnnnnnnnnnnnnnnnnnnnnnnnnnnnnnnnnnnnnnnnnnnnnnnnnnnnnnnnnnnnnnnnnnnnnnnnnnnnnnnnnnnnnnnnnnnnnnnnnnnnnnnnnnnnnnnnnnnnnnnnnnnnnnnnnnnnnnnnnnnnnnnnnnnnnnnnnnnnnnnnnnnnnnnnnnnnnnnnnnnnnnnnnnnnnnnnnnnnnnnnnnnnnnnnnnnnnnnnnnnnnnnnnnnnnnnnnnnnnnnnnnnnnnnnnnnnnnnnnnnnnnnnnnnnnnnnnnnnnnnnnnnnnnnnnnnnnnnnnnnnnnnnnnnnnnnnnnnnnnnnnnnnnnnnnnnnnnnnnnnnnnnnnnnnnnnnnnnnnnnnnnnnnnnnnnnnnnnnnnnnnnnnnnnnnnnnnnnnnnnnnnnnnnnnnnnnnnnnnnnnnnnnnnnnnnnnnnnnnnnnnnnnnnnnnnnnnnnnnnnnnnnnnnnnnnnnnnnnnnnnnnnnnnnnnnnnnnnnnnnnnnnnnnnnnnnnnnnnnnnnnnnnnnnnnnnnnnnnnnnnnnnnnnnnnnnnnnnnnnnnnnnnnnnnnnnnnnnnnnnnnnnnnnnnnnnnnnnnnnnnnnnnnnnnnnnnnnnnnnnnnnnnnnnnnnnnnnnnnnnnnnnnnnnnnnnnnnnnnnnnnnnnnnnnnnnnnnnnnnnnnnnnnnnnnnnnnnnnnnnnnnnnnnnnnnnnnnnnnnnnnnnnnnnnnnnnnnnnnnnnnnnnnnnnnnnnnnnnnnnnnnnnnnnnnnnnnnnnnnnnnnnnnnnnnnnnnnnnnnnnnnnnnnnnnnnnnnnnnnnnnnnnnnnnnnnnnnnnnnnnnnnnnnnnnnnnnnnnnnnnnnnnnnnnnnnnnnnnnnnnnnnnnnnnnnnnnnnnnnnnnnnnnnnnnnnnnnnnnnnnnnnnnnnnnnnnnnnnnnnnnnnnnnnnnnnnnnnnnnnnnnnnnnnnnnnnnnnnnnnnnnnnnnnnnnnnnnnnnnnnnnnnnnnnnnnnnnnnnnnnnnnnnnnnnnnnnnnnnnnnnnnnnnnnnnnnnnnnnnnnnnnnnnnnnnnnnnnnnnnnnnnnnnnnnnnnnnnnnnnnnnnnnnnnnnnnnnnnnnnnnnnnnnnnnnnnnnnnnnnnnnnnnnnnnnnnnnnnnnnnnnnnnnnnnnnnnnnnnnnnnnnnnnnnnnnnnnnnnnnnnnnnnnnnnnnnnnnnnnnnnnnnnnnnnnnnnnnnnnnnnnnnnnnnnnnnnnnnnnnnnnnnnnnnnnnnnnnnnnnnnnnnnnnnnnnnnnnnnnnnnnnnnnnnnnnnnnnnnnnnnnnnnnnnnnnnnnnnnnnnnnnnnnnnnnnnnnnnnnnnnnnnnnnnnnnnnnnnnnnnnnnnnnnnnnnnnnnnnnnnnnnnnnnnnnnnnnnnnnnnnnnnnnnnnnnnnnnnnnnnnnnnnnnnnnnnnnnnnnnnnnnnnnnnnnnnnnnnnnnnnnnnnnnnnnnnnnnnnnnnnnnnnnnnnnnnnnnnnnnnnnnnnnnnnnnnnnnnnnnnnnnnnnnnnnnnnnnnnnnnnnnnnnnnnnnnnnnnnnnnnnnnnnnnnnnnnnnnnnnnnnnnnnnnnnnnnnnnnnnnnnnnnnnnnnnnnnnnnnnnnnnnnnnnnnnnnnnnnnnnnnnnnnnnnnnnnnnnnnnnnnnnnnnnnnnnnnnnnnnnnnnnnnnnnnnnnnnnnnnnnnnnnnnnnnnnnnnnnnnnnnnnnnnnnnnnnnnnnnnnnnnnnnnnnnnnnnnnnnnnnnnnnnnnnnnnnnnnnnnnnnnnnnnnnnnnnnnnnnnnnnnnnnnnnnnnnnnnnnnnnnnnnnnnnnnnnnnnnnnnnnnnnnnnnnnnnnnnnnnnnnnnnnnnnnnnnnnnnnnnnnnnnnnnnnnnnnnnnnnnnnnnnnnnnnnnnnnnnnnnnnnnnnnnnnnnnnnnnnnnnnnnnnnnnnnnnnnnnnnnnnnnnnnnnnnnnnnnnnnnnnnnnnnnnnnnnnnnnnnnnnnnnnnnnnnnnnnnnnnnnnnnnnnnnnnnnnnnnnnnnnnnnnnnnnnnnnnnnnnnnnnnnnnnnnnnnnnnnnnnnnnnnnnnnnnnnnnnnnnnnnnnnnnnnnnnnnnnnnnnnnnnnnnnnnnnnnnnnnnnnnnnnnnnnnnnnnnnnnnnnnnnnnnnnnnnnnnnnnnnnnnnnnnnnnnnnnnnnnnnnnnnnnnnnnnnnnnnnnnnnnnnnnnnnnnnnnnnnnnnnnnnnnnnnnnnnnnnnnnnnnnnnnnnnnnnnnnnnnnnnnnnnnnnnnnnnnnnnnnnnnnnnnnnnnnnnnnnnnnnnnnnnnnnnnnnnnnnnnnnnnnnnnnnnnnnnnnnnnnnnnnnnnnnnnnnnnnnnnnnnnnnnnnnnnnnnnnnnnnnnnnnnnnnnnnnnnnnnnnnnnnnnnnnnnnnnnnnnnnnnnnnnnnnnnnnnnnnnnnnnnnnnnnnnnnnnnnnnnnnnnnnnnnnnnnnnnnnnnnnnnnnnnnnnnnnnnnnnnnnnnnnnnnnnnnnnnnnnnnnnnnnnnnnnnnnnnnnnnnnnnnnnnnnnnnnnnnnnnnnnnnnnnnnnnnnnnnnnnnnnnnnnnnnnnnnnnnnnnnnnnnnnnnnnnnnnnnnnnnnnnnnnnnnnnnnnnnnnnnnnnnnnnnnnnnnnnnnnnnnnnnnnnnnnnnnnnnnnnnnnnnnnnnnnnnnnnnnnnnnnnnnnnnnnnnnnnnnnnnnnnnnnnnnnnnnnnnnnnnnnnnnnnnnnnnnnnnnnnnnnnnnnnnnnnnnnnnnnnnnnnnnnnnnnnnnnnnnnnnnnnnnnnnnnnnnnnnnnnnnnnnnnnnnnnnnnnnnnnnnnnnnnnnnnnnnnnnnnnnnnnnnnnnnnnnnnnnnnnnnnnnnnnnnnnnnnnnnnnnnnnnnnnnnnnnnnnnnnnnnnnnnnnnnnnnnnnnnnnnnnnnnnnnnnnnnnnnnnnnnnnnnnnnnnnnnnnnnnnnnnnnnnnnnnnnnnnnnnnnnnnnnnnnnnnnnnnnnnnnnnnnnnnnnnnnnnnnnnnnnnnnnnnnnnnnnnnnnnnnnnnnnnnnnnnnnnnnnnnnnnnnnnnnnnnnnnnnnnnnnnnnnnnnnnnnnnnnnnnnnnnnnnnnnnnnnnnnnnnnnnnnnnnnnnnnnnnnnnnnnnnnnnnnnnnnnnnnnnnnnnnnnnnnnnnnnnnnnnnnnnnnnnnnnnnnnnnnnnnnnnnnnnnnnnnnnnnnnnnnnnnnnnnnnnnnnnnnnnnnnnnnnnnnnnnnnnnnnnnnnnnnnnnnnnnnnnnnnnnnnnnnnnnnnnnnnnnnnnnnnnnnnnnnnnnnnnnnnnnnnnnnnnnnnnnnnnnnnnnnnnnnnnnnnnnnnnnnnnnnnnnnnnnnnnnnnnnnnnnnnnnnnnnnnnnnnnnnnnnnnnnnnnnnnnnnnnnnnnnnnnnnnnnnnnnnnnnnnnnnnnnnnnnnnnnnnnnnnnnnnnnnnnnnnnnnnnnnnnnnnnnnnnnnnnnnnnnnnnnnnnnnnnnnnnnnnnnnnnnnnnnnnnnnnnnnnnnnnnnnnnnnnnnnnnnnnnnnnnnnnnnnnnnnnnnnnnnnnnnnnnnnnnnnnnnnnnnnnnnnnnnnnnnnnnnnnnnnnnnnnnnnnnnnnnnnnnnnnnnnnnnnnnnnnnnnnnnnnnnnnnnnnnnnnnnnnnnnnnnnnnnnnnnnnnnnnnnnnnnnnnnnnnnnnnnnnnnnnnnnnnnnnnnnnnnnnnnnnnnnnnnnnnnnnnnnnnnnnnnnnnnnnnnnnnnnnnnnnnnnnnnnnnnnnnnnnnnnnnnnnnnnnnnnnnnnnnnnnnnnnnnnnnnnnnnnnnnnnnnnnnnnnnnnnnnnnnnnnnnnnnnnnnnnnnnnnnnnnnnnnnnnnnnnnnnnnnnnnnnnnnnnnnnnnnnnnnnnnnnnnnnnnnnnnnnnnnnnnnnnnnnnnnnnnnnnnnnnnnnnnnnnnnnnnnnnnnnnnnnnnnnnnnnnnnnnnnnnnnnnnnnnnnnnnnnnnnnnnnnnnnnnnnnnnnnnnnnnnnnnnnnnnnnnnnnnnnnnnnnnnnnnnnnnnnnnnnnnnnnnnnnnnnnnnnnnnnnnnnnnnnnnnnnnnnnnnnnnnnnnnnnnnnnnnnnnnnnnnnnnnnnnnnnnnnnnnnnnnnnnnnnnnnnnnnnnnnnnnnnnnnnnnnnnnnnnnnnnnnnnnnnnnnnnnnnnnnnnnnnnnnnnnnnnnnnnnnnnnnnnnnnnnnnnnnnnnnnnnnnnnnnnnnnnnnnnnnnnnnnnnnnnnnnnnnnnnnnnnnnnnnnnnnnnnnnnnnnnnnnnnnnnnnnnnnnnnnnnnnnnnnnnnnnnnnnnnnnnnnnnnnnnnnnnnnnnnnnnnnnnnnnnnnnnnnnnnnnnnnnnnnnnnnnnnnnnnnnnnnnnnnnnnnnnnnnnnnnnnnnnnnnnnnnnnnnnnnnnnnnnnnnnnnnnnnnnnnnnnnnnnnnnnnnnnnnnnnnnnnnnnnnnnnnnnnnnnnnnnnnnnnnnnnnnnnnnnnnnnnnnnnnnnnnnnnnnnnnnnnnnnnnnnnnnnnnnnnnnnnnnnnnnnnnnnnnnnnnnnnnnnnnnnnnnnnnnnnnnnnnnnnnnnnnnnnnnnnnnnnnnnnnnnnnnnnnnnnnnnnnnnnnnnnnnnnnnnnnnnnnnnnnnnnnnnnnnnnnnnnnnnnnnnnnnnnnnnnnnnnnnnnnnnnnnnnnnnnnnnnnnnnnnnnnnnnnnnnnnnnnnnnnnnnnnnnnnnnnnnnnnnnnnnnnnnnnnnnnnnnnnnnnnnnnnnnnnnnnnnnnnnnnnnnnnnnnnnnnnnnnnnnnnnnnnnnnnnnnnnnnnnnnnnnnnnnnnnnnnnnnnnnnnnnnnnnnnnnnnnnnnnnnnnnnnnnnnnnnnnnnnnnnnnnnnnnnnnnnnnnnnnnnnnnnnnnnnnnnnnnnnnnnnnnnnnnnnnnnnnnnnnnnnnnnnnnnnnnnnnnnnnnnnnnnnnnnnnnnnnnnnnnnnnnnnnnnnnnnnnnnnnnnnnnnnnnnnnnnnnnnnnnnnnnnnnnnnnnnnnnnnnnnnnnnnnnnnnnnnnnnnnnnnnnnnnnnnnnnnnnnnnnnnnnnnnnnnnnnnnnnnnnnnnnnnnnnnnnnnnnnnnnnnnnnnnnnnnnnnnnnnnnnnnnnnnnnnnnnnnnnnnnnnnnnnnnnnnnnnnnnnnnnnnnnnnnnnnnnnnnnnnnnnnnnnnnnnnnnnnnnnnnnnnnnnnnnnnnnnnnnnnnnnnnnnnnnnnnnnnnnnnnnnnnnnnnnnnnnnnnnnnnnnnnnnnnnnnnnnnnnnnnnnnnnnnnnnnnnnnnnnnnnnnnnnnnnnnnnnnnnnnnnnnnnnnnnnnnnnnnnnnnnnnnnnnnnnnnnnnnnnnnnnnnnnnnnnnnnnnnnnnnnnnnnnnnnnnnnnnnnnnnnnnnnnnnnnnnnnnnnnnnnnnnnnnnnnnnnnnnnnnnnnnnnnnnnnnnnnnnnnnnnnnnnnnnnnnnnnnnnnnnnnnnnnnnnnnnnnnnnnnnnnnnnnnnnnnnnnnnnnnnnnnnnnnnnnnnnnnnnnnnnnnnnnnnnnnnnnnnnnnnnnnnnnnnnnnnnnnnnnnnnnnnnnnnnnnnnnnnnnnnnnnnnnnnnnnnnnnnnnnnnnnnnnnnnnnnnnnnnnnnnnnnnnnnnnnnnnnnnnnnnnnnnnnnnnnnnnnnnnnnnnnnnnnnnnnnnnnnnnnnnnnnnnnnnnnnnnnnnnnnnnnnnnnnnnnnnnnnnnnnnnnnnnnnnnnnnnnnnnnnnnnnnnnnnnnnnnnnnnnnnnnnnnnnnnnnnnnnnnnnnnnnnnnnnnnnnnnnnnnnnnnnnnnnnnnnnnnnnnnnnnnnnnnnnnnnnnnnnnnnnnnnnnnnnnnnnnnnnnnnnnnnnnnnnnnnnnnnnnnnnnnnnnnnnnnnnnnnnnnnnnnnnnnnnnnnnnnnnnnnnnnnnnnnnnnnnnnnnnnnnnnnnnnnnnnnnnnnnnnnnnnnnnnnnnnnnnnnnnnnnnnnnnnnnnnnnnnnnnnnnnnnnnnnnnnnnnnnnnnnnnnnnnnnnnnnnnnnnnnnnnnnnnnnnnnnnnnnnnnnnnnnnnnnnnnnnnnnnnnnnnnnnnnnnnnnnnnnnnnnnnnnnnnnnnnnnnnnnnnnnnnnnnnnnnnnnnnnnnnnnnnnnnnnnnnnnnnnnnnnnnnnnnnnnnnnnnnnnnnnnnnnnnnnnnnnnnnnnnnnnnnnnnnnnnnnnnnnnnnnnnnnnnnnnnnnnnnnnnnnnnnnnnnnnnnnnnnnnnnnnnnnnnnnnnnnnnnnnnnnnnnnnnnnnnnnnnnnnnnnnnnnnnnnnnnnnnnnnnnnnnnnnnnnnnnnnnnnnnnnnnnnnnnnnnnnnnnnnnnnnnnnnnnnnnnnnnnnnnnnnnnnnnnnnnnnnnnnnnnnnnnnnnnnnnnnnnnnnnnnnnnnnnnnnnnnnnnnnnnnnnnnnnnnnnnnnnnnnnnnnnnnnnnnnnnnnnnnnnnnnnnnnnnnnnnnnnnnnnnnnnnnnnnnnnnnnnnnnnnnnnnnnnnnnnnnnnnnnnnnnnnnnnnnnnnnnnnnnnnnnnnnnnnnnnnnnnnnnnnnnnnnnnnnnnnnnnnnnnnnnnnnnnnnnnnnnnnnnnnnnnnnnnnnnnnnnnnnnnnnnnnnnnnnnnnnnnnnnnnnnnnnnnnnnnnnnnnnnnnnnnnnnnnnnnnnnnnnnnnnnnnnnnnnnnnnnnnnnnnnnnnnnnnnnnnnnnnnnnnnnnnnnnnnnnnnnnnnnnnnnnnnnnnnnnnnnnnnnnnnnnnnnnnnnnnnnnnnnnnnnnnnnnnnnnnnnnnnnnnnnnnnnnnnnnnnnnnnnnnnnnnnnnnnnnnnnnnnnnnnnnnnnnnnnnnnnnnnnnnnnnnnnnnnnnnnnnnnnnnnnnnnnnnnnnnnnnnnnnnnnnnnnnnnnnnnnnnnnnnnnnnnnnnnnnnnnnnnnnnnnnnnnnnnnnnnnnnnnnnnnnnnnnnnnnnnnnnnnnnnnnnnnnnnnnnnnnnnnnnnnnnnnnnnnnnnnnnnnnnnnnnnnnnnnnnnnnnnnnnnnnnnnnnnnnnnnnnnnnnnnnnnnnnnnnnnnnnnnnnnnnnnnnnnnnnnnnnnnnnnnnnnnnnnnnnnnnnnnnnnnnnnnnnnnnnnnnnnnnnnnnnnnnnnnnnnnnnnnnnnnnnnnnnnnnnnnnnnnnnnnnnnnnnnnnnnnnnnnnnnnnnnnnnnnnnnnnnnnnnnnnnnnnnnnnnnnnnnnnnnnnnnnnnnnnnnnnnnnnnnnnnnnnnnnnnnnnnnnnnnnnnnnnnnnnnnnnnnnnnnnnnnnnnnnnnnnnnnnnnnnnnnnnnnnnnnnnnnnnnnnnnnnnnnnnnnnnnnnnnnnnnnnnnnnnnnnnnnnnnnnnnnnnnnnnnnnnnnnnnnnnnnnnnnnnnnnnnnnnnnnnnnnnnnnnnnnnnnnnnnnnnnnnnnnnnnnnnnnnnnnnnnnnnnnnnnnnnnnnnnnnnnnnnnnnnnnnnnnnnnnnnnnnnnnnnnnnnnnnnnnnnnnnnnnnnnnnnnnnnnnnnnnnnnnnnnnnnnnnnnnnnnnnnnnnnnnnnnnnnnnnnnnnnnnnnnnnnnnnnnnnnnnnnnnnnnnnnnnnnnnnnnnnnnnnnnnnnnnnnnnnnnnnnnnnnnnnnnnnnnnnnnnnnnnnnnnnnnnnnnnnnnnnnnnnnnnnnnnnnnnnnnnnnnnnnnnnnnnnnnnnnnnnnnnnnnnnnnnnnnnnnnnnnnnnnnnnnnnnnnnnnnnnnnnnnnnnnnnnnnnnnnnnnnnnnnnnnnnnnnnnnnnnnnnnnnnnnnnnnnnnnnnnnnnnnnnnnnnnnnnnnnnnnnnnnnnnnnnnnnnnnnnnnnnnnnnnnnnnnnnnnnnnnnnnnnnnnnnnnnnnnnnnnnnnnnnnnnnnnnnnnnnnnnnnnnnnnnnnnnnnnnnnnnnnnnnnnnnnnnnnnnnnnnnnnnnnnnnnnnnnnnnnnnnnnnnnnnnnnnnnnnnnnnnnnnnnnnnnnnnnnnnnnnnnnnnnnnnnnnnnnnnnnnnnnnnnnnnnnnnnnnnnnnnnnnnnnnnnnnnnnnnnnnnnnnnnnnnnnnnnnnnnnnnnnnnnnnnnnnnnnnnnnnnnnnnnnnnnnnnnnnnnnnnnnnnnnnnnnnnnnnnnnnnnnnnnnnnnnnnnnnnnnnnnnnnnnnnnnnnnnnnnnnnnnnnnnnnnnnnnnnnnnnnnnnnnnnnnnnnnnnnnnnnnnnnnnnnnnnnnnnnnnnnnnnnnnnnnnnnnnnnnnnnnnnnnnnnnnnnnnnnnnnnnnnnnnnnnnnnnnnnnnnnnnnnnnnnnnnnnnnnnnnnnnnnnnnnnnnnnnnnnnnnnnnnnnnnnnnnnnnnnnnnnnnnnnnnnnnnnnnnnnnnnnnnnnnnnnnnnnnnnnnnnnnnnnnnnnnnnnnnnnnnnnnnnnnnnnnnnnnnnnnnnnnnnnnnnnnnnnnnnnnnnnnnnnnnnnnnnnnnnnnnnnnnnnnnnnnnnnnnnnnnnnnnnnnnnnnnnnnnnnnnnnnnnnnnnnnnnnnnnnnnnnnnnnnnnnnnnnnnnnnnnnnnnnnnnnnnnnnnnnnnnnnnnnnnnnnnnnnnnnnnnnnnnnnnnnnnnnnnnnnnnnnnnnnnnnnnnnnnnnnnnnnnnnnnnnnnnnnnnnnnnnnnnnnnnnnnnnnnnnnnnnnnnnnnnnnnnnnnnnnnnnnnnnnnnnnnnnnnnnnnnnnnnnnnnnnnnnnnnnnnnnnnnnnnnnnnnnnnnnnnnnnnnnnnnnnnnnnnnnnnnnnnnnnnnnnnnnnnnnnnnnnnnnnnnnnnnnnnnnnnnnnnnnnnnnnnnnnnnnnnnnnnnnnnnnnnnnnnnnnnnnnnnnnnnnnnnnnnnnnnnnnnnnnnnnnnnnnnnnnnnnnnnnnnnnnnnnnnnnnnnnnnnnnnnnnnnnnnnnnnnnnnnnnnnnnnnnnnnnnnnnnnnnnnnnnnnnnnnnnnnnnnnnnnnnnnnnnnnnnnnnnnnnnnnnnnnnnnnnnnnnnnnnnnnnnnnnnnnnnnnnnnnnnnnnnnnnnnnnnnnnnnnnnnnnnnnnnnnnnnnnnnnnnnnnnnnnnnnnnnnnnnnnnnnnnnnnnnnnnnnnnnnnnnnnnnnnnnnnnnnnnnnnnnnnnnnnnnnnnnnnnnnnnnnnnnnnnnnnnnnnnnnnnnnnnnnnnnnnnnnnnnnnnnnnnnnnnnnnnnnnnnnnnnnnnnnnnnnnnnnnnnnnnnnnnnnnnnnnnnnnnnnnnnnnnnnnnnnnnnnnnnnnnnnnnnnnnnnnnnnnnnnnnnnnnnnnnnnnnnnnnnnnnnnnnnnnnnnnnnnnnnnnnnnnnnnnnnnnnnnnnnnnnnnnnnnnnnnnnnnnnnnnnnnnnnnnnnnnnnnnnnnnnnnnnnnnnnnnnnnnnnnnnnnnnnnnnnnnnnnnnnnnnnnnnnnnnnnnnnnnnnnnnnnnnnnnnnnnnnnnnnnnnnnnnnnnnnnnnnnnnnnnnnnnnnnnnnnnnnnnnnnnnnnnnnnnnnnnnnnnnnnnnnnnnnnnnnnnnnnnnnnnnnnnnnnnnnnnnnnnnnnnnnnnnnnnnnnnnnnnnnnnnnnnnnnnnnnnnnnnnnnnnnnnnnnnnnnnnnnnnnnnnnnnnnnnnnnnnnnnnnnnnnnnnnnnnnnnnnnnnnnnnnnnnnnnnnnnnnnnnnnnnnnnnnnnnnnnnnnnnnnnnnnnnnnnnnnnnnnnnnnnnnnnnnnnnnnnnnnnnnnnnnnnnnnnnnnnnnnnnnnnnnnnnnnnnnnnnnnnnnnnnnnnnnnnnnnnnnnnnnnnnnnnnnnnnnnnnnnnnnnnnnnnnnnnnnnnnnnnnnnnnnnnnnnnnnnnnnnnnnnnnnnnnnnnnnnnnnnnnnnnnnnnnnnnnnnnnnnnnnnnnnnnnnnnnnnnnnnnnnnnnnnnnnnnnnnnnnnnnnnnnnnnnnnnnnnnnnnnnnnnnnnnnnnnnnnnnnnnnnnnnnnnnnnnnnnnnnnnnnnnnnnnnnnnnnnnnnnnnnnnnnnnnnnnnnnnnnnnnnnnnnnnnnnnnnnnnnnnnnnnnnnnnnnnnnnnnnnnnnnnnnnnnnnnnnnnnnnnnnnnnnnnnnnnnnnnnnnnnnnnnnnnnnnnnnnnnnnnnnnnnnnnnnnnnnnnnnnnnnnnnnnnnnnnnnnnnnnnnnnnnnnnnnnnnnnnnnnnnnnnnnnnnnnnnnnnnnnnnnnnnnnnnnnnnnnnnnnnnnnnnnnnnnnnnnnnnnnnnnnnnnnnnnnnnnnnnnnnnnnnnnnnnnnnnnnnnnnnnnnnnnnnnnnnnnnnnnnnnnnnnnnnnnnnnnnnnnnnnnnnnnnnnnnnnnnnnnnnnnnnnnnnnnnnnnnnnnnnnnnnnnnnnnnnnnnnnnnnnnnnnnnnnnnnnnnnnnnnnnnnnnnnnnnnnnnnnnnnnnnnnnnnnnnnnnnnnnnnnnnnnnnnnnnnnnnnnnnnnnnnnnnnnnnnnnnnnnnnnnnnnnnnnnnnnnnnnnnnnnnnnnnnnnnnnnnnnnnnnnnnnnnnnnnnnnnnnnnnnnnnnnnnnnnnnnnnnnnnnnnnnnnnnnnnnnnnnnnnnnnnnnnnnnnnnnnnnnnnnnnnnnnnnnnnnnnnnnnnnnnnnnnnnnnnnnnnnnnnnnnnnnnnnnnnnnnnnnnnnnnnnnnnnnnnnnnnnnnnnnnnnnnnnnnnnnnnnnnnnnnnnnnnnnnnnnnnnnnnnnnnnnnnnnnnnnnnnnnnnnnnnnnnnnnnnnnnnnnnnnnnnnnnnnnnnnnnnnnnnnnnnnnnnnnnnnnnnnnnnnnnnnnnnnnnnnnnnnnnnnnnnnnnnnnnnnnnnnnnnnnnnnnnnnnnnnnnnnnnnnnnnnnnnnnnnnnnnnnnnnnnnnnnnnnnnnnnnnnnnnnnnnnnnnnnnnnnnnnnnnnnnnnnnnnnnnnnnnnnnnnnnnnnnnnnnnnnnnnnnnnnnnnnnnnnnnnnnnnnnnnnnnnnnnnnnnnnnnnnnnnnnnnnnnnnnnnnnnnnnnnnnnnnnnnnnnnnnnnnnnnnnnnnnnnnnnnnnnnnnnnnnnnnnnnnnnnnnnnnnnnnnnnnnnnnnnnnnnnnnnnnnnnnnnnnnnnnnnnnnnnnnnnnnnnnnnnnnnnnnnnnnnnnnnnnnnnnnnnnnnnnnnnnnnnnnnnnnnnnnnnnnnnnnnnnnnnnnnnnnnnnnnnnnnnnnnnnnnnnnnnnnnnnnnnnnnnnnnnnnnnnnnnnnnnnnnnnnnnnnnnnnnnnnnnnnnnnnnnnnnnnnnnnnnnnnnnnnnnnnnnnnnnnnnnnnnnnnnnnnnnnnnnnnnnnnnnnnnnnnnnnnnnnnnnnnnnnnnnnnnnnnnnnnnnnnnnnnnnnnnnnnnnnnnnnnnnnnnnnnnnnnnnnnnnnnnnnnnnnnnnnnnnnnnnnnnnnnnnnnnnnnnnnnnnnnnnnnnnnnnnnnnnnnnnnnnnnnnnnnnnnnnnnnnnnnnnnnnnnnnnnnnnnnnnnnnnnnnnnnnnnnnnnnnnnnnnnnnnnnnnnnnnnnnnnnnnnnnnnnnnnnnnnnnnnnnnnnnnnnnnnnnnnnnnnnnnnnnnnnnnnnnnnnnnnnnnnnnnnnnnnnnnnnnnnnnnnnnnnnnnnnnnnnnnnnnnnnnnnnnnnnnnnnnnnnnnnnnnnnnnnnnnnnnnnnnnnnnnnnnnnnnnnnnnnnnnnnnnnnnnnnnnnnnnnnnnnnnnnnnnnnnnnnnnnnnnnnnnnnnnnnnnnnnnnnnnnnnnnnnnnnnnnnnnnnnnnnnnnnnnnnnnnnnnnnnnnnnnnnnnnnnnnnnnnnnnnnnnnnnnnnnnnnnnnnnnnnnnnnnnnnnnnnnnnnnnnnnnnnnnnnnnnnnnnnnnnnnnnnnnnnnnnnnnnnnnnnnnnnnnnnnnnnnnnnnnnnnnnnnnnnnnnnnnnnnnnnnnnnnnnnnnnnnnnnnnnnnnnnnnnnnnnnnnnnnnnnnnnnnnnnnnnnnnnnnnnnnnnnnnnnnnnnnnnnnnnnnnnnnnnnnnnnnnnnnnnnnnnnnnnnnnnnnnnnnnnnnnnnnnnnnnnnnnnnnnnnnnnnnnnnnnnnnnnnnnnnnnnnnnnnnnnnnnnnnnnnnnnnnnnnnnnnnnnnnnnnnnnnnnnnnnnnnnnnnnnnnnnnnnnnnnnnnnnnnnnnnnnnnnnnnnnnnnnnnnnnnnnnnnnnnnnnnnnnnnnnnnnnnnnnnnnnnnnnnnnnnnnnnnnnnnnnnnnnnnnnnnnnnnnnnnnnnnnnnnnnnnnnnnnnnnnnnnnnnnnnnnnnnnnnnnnnnnnnnnnnnnnnnnnnnnnnnnnnnnnnnnnnnnnnnnnnnnnnnnnnnnnnnnnnnnnnnnnnnnnnnnnnnnnnnnnnnnnnnnnnnnnnnnnnnnnnnnnnnnnnnnnnnnnnnnnnnnnnnnnnnnnnnnnnnnnnnnnnnnnnnnnnnnnnnnnnnnnnnnnnnnnnnnnnnnnnnnnnnnnnnnnnnnnnnnnnnnnnnnnnnnnnnnnnnnnnnnnnnnnnnnnnnnnnnnnnnnnnnnnnnnnnnnnnnnnnnnnnnnnnnnnnnnnnnnnnnnnnnnnnnnnnnnnnnnnnnnnnnnnnnnnnnnnnnnnnnnnnnnnnnnnnnnnnnnnnnnnnnnnnnnnnnnnnnnnnnnnnnnnnnnnnnnnnnnnnnnnnnnnnnnnnnnnnnnnnnnnnnnnnnnnnnnnnnnnnnnnnnnnnnnnnnnnnnnnnnnnnnnnnnnnnnnnnnnnnnnnnnnnnnnnnnnnnnnnnnnnnnnnnnnnnnnnnnnnnnnnnnnnnnnnnnnnnnnnnnnnnnnnnnnnnnnnnnnnnnnnnnnnnnnnnnnnnnnnnnnnnnnnnnnnnnnnnnnnnnnnnnnnnnnnnnnnnnnnnnnnnnnnnnnnnnnnnnnnnnnnnnnnnnnnnnnnnnnnnnnnnnnnnnnnnnnnnnnnnnnnnnnnnnnnnnnnnnnnnnnnnnnnnnnnnnnnnnnnnnnnnnnnnnnnnnnnnnnnnnnnnnnnnnnnnnnnnnnnnnnnnnnnnnnnnnnnnnnnnnnnnnnnnnnnnnnnnnnnnnnnnnnnnnnnnnnnnnnnnnnnnnnnnnnnnnnnnnnnnnnnnnnnnnnnnnnnnnnnnnnnnnnnnnnnnnnnnnnnnnnnnnnnnnnnnnnnnnnnnnnnnnnnnnnnnnnnnnnnnnnnnnnnnnnnnnnnnnnnnnnnnnnnnnnnnnnnnnnnnnnnnnnnnnnnnnnnnnnnnnnnnnnnnnnnnnnnnnnnnnnnnnnnnnnnnnnnnnnnnnnnnnnnnnnnnnnnnnnnnnnnnnnnnnnnnnnnnnnnnnnnnnnnnnnnnnnnnnnnnnnnnnnnnnnnnnnnnnnnnnnnnnnnnnnnnnnnnnnnnnnnnnnnnnnnnnnnnnnnnnnnnnnnnnnnnnnnnnnnnnnnnnnnnnnnnnnnnnnnnnnnnnnnnnnnnnnnnnnnnnnnnnnnnnnnnnnnnnnnnnnnnnnnnnnnnnnnnnnnnnnnnnnnnnnnnnnnnnnnnnnnnnnnnnnnnnnnnnnnnnnnnnnnnnnnnnnnnnnnnnnnnnnnnnnnnnnnnnnnnnnnnnnnnnnnnnnnnnnnnnnnnnnnnnnnnnnnnnnnnnnnnnnnnnnnnnnnnnnnnnnnnnnnnnnnnnnnnnnnnnnnnnnnnnnnnnnnnnnnnnnnnnnnnnnnnnnnnnnnnnnnnnnnnnnnnnnnnnnnnnnnnnnnnnnnnnnnnnnnnnnnnnnnnnnnnnnnnnnnnnnnnnnnnnnnnnnnnnnnnnnnnnnnnnnnnnnnnnnnnnnnnnnnnnnnnnnnnnnnnnnnnnnnnnnnnnnnnnnnnnnnnnnnnnnnnnnnnnnnnnnnnnnnnnnnnnnnnnnnnnnnnnnnnnnnnnnnnnnnnnnnnnnnnnnnnnnnnnnnnnnnnnnnnnnnnnnnnnnnnnnnnnnnnnnnnnnnnnnnnnnnnnnnnnnnnnnnnnnnnnnnnnnnnnnnnnnnnnnnnnnnnnnnnnnnnnnnnnnnnnnnnnnnnnnnnnnnnnnnnnnnnnnnnnnnnnnnnnnnnnnnnnnnnnnnnnnnnnnnnnnnnnnnnnnnnnnnnnnnnnnnnnnnnnnnnnnnnnnnnnnnnnnnnnnnnnnnnnnnnnnnnnnnnnnnnnnnnnnnnnnnnnnnnnnnnnnnnnnnnnnnnnnnnnnnnnnnnnnnnnnnnnnnnnnnnnnnnnnnnnnnnnnnnnnnnnnnnnnnnnnnnnnnnnnnnnnnnnnnnnnnnnnnnnnnnnnnnnnnnnnnnnnnnnnnnnnnnnnnnnnnnnnnnnnnnnnnnnnnnnnnnnnnnnnnnnnnnnnnnnnnnnnnnnnnnnnnnnnnnnnnnnnnnnnnnnnnnnnnnnnnnnnnnnnnnnnnnnnnnnnnnnnnnnnnnnnnnnnnnnnnnnnnnnnnnnnnnnnnnnnnnnnnnnnnnnnnnnnnnnnnnnnnnnnnnnnnnnnnnnnnnnnnnnnnnnnnnnnnnnnnnnnnnnnnnnnnnnnnnnnnnnnnnnnnnnnnnnnnnnnnnnnnnnnnnnnnnnnnnnnnnnnnnnnnnnnnnnnnnnnnnnnnnnnnnnnnnnnnnnnnnnnnnnnnnnnnnnnnnnnnnnnnnnnnnnnnnnnnnnnnnnnnnnnnnnnnnnnnnnnnnnnnnnnnnnnnnnnnnnnnnnnnnnnnnnnnnnnnnnnnnnnnnnnnnnnnnnnnnnnnnnnnnnnnnnnnnnnnnnnnnnnnnnnnnnnnnnnnnnnnnnnnnnnnnnnnnnnnnnnnnnnnnnnnnnnnnnnnnnnnnnnnnnnnnnnnnnnnnnnnnnnnnnnnnnnnnnnnnnnnnnnnnnnnnnnnnnnnnnnnnnnnnnnnnnnnnnnnnnnnnnnnnnnnnnnnnnnnnnnnnnnnnnnnnnnnnnnnnnnnnnnnnnnnnnnnnnnnnnnnnnnnnnnnnnnnnnnnnnnnnnnnnnnnnnnnnnnnnnnnnnnnnnnnnnnnnnnnnnnnnnnnnnnnnnnnnnnnnnnnnnnnnnnnnnnnnnnnnnnnnnnnnnnnnnnnnnnnnnnnnnnnnnnnnnnnnnnnnnnnnnnnnnnnnnnnnnnnnnnnnnnnnnnnnnnnnnnnnnnnnnnnnnnnnnnnnnnnnnnnnnnnnnnnnnnnnnnnnnnnnnnnnnnnnnnnnnnnnnnnnnnnnnnnnnnnnnnnnnnnnnnnnnnnnnnnnnnnnnnnnnnnnnnnnnnnnnnnnnnnnnnnnnnnnnnnnnnnnnnnnnnnnnnnnnnnnnnnnnnnnnnnnnnnnnnnnnnnnnnnnnnnnnnnnnnnnnnnnnnnnnnnnnnnnnnnnnnnnnnnnnnnnnnnnnnnnnnnnnnnnnnnnnnnnnnnnnnnnnnnnnnnnnnnnnnnnnnnnnnnnnnnnnnnnnnnnnnnnnnnnnnnnnnnnnnnnnnnnnnnnnnnnnnnnnnnnnnnnnnnnnnnnnnnnnnnnnnnnnnnnnnnnnnnnnnnnnnnnnnnnnnnnnnnnnnnnnnnnnnnnnnnnnnnnnnnnnnnnnnnnnnnnnnnnnnnnnnnnnnnnnnnnnnnnnnnnnnnnnnnnnnnnnnnnnnnnnnnnnnnnnnnnnnnnnnnnnnnnnnnnnnnnnnnnnnnnnnnnnnnnnnnnnnnnnnnnnnnnnnnnnnnnnnnnnnnnnnnnnnnnnnnnnnnnnnnnnnnnnnnnnnnnnnnnnnnnnnnnnnnnnnnnnnnnnnnnnnnnnnnnnnnnnnnnnnnnnnnnnnnnnnnnnnnnnnnnnnnnnnnnnnnnnnnnnnnnnnnnnnnnnnnnnnnnnnnnnnnnnnnnnnnnnnnnnnnnnnnnnnnnnnnnnnnnnnnnnnnnnnnnnnnnnnnnnnnnnnnnnnnnnnnnnnnnnnnnnnnnnnnnnnnnnnnnnnnnnnnnnnnnnnnnnnnnnnnnnnnnnnnnnnnnnnnnnnnnnnnnnnnnnnnnnnnnnnnnnnnnnnnnnnnnnnnnnnnnnnnnnnnnnnnnnnnnnnnnnnnnnnnnnnnnnnnnnnnnnnnnnnnnnnnnnnnnnnnnnnnnnnnnnnnnnnnnnnnnnnnnnnnnnnnnnnnnnnnnnnnnnnnnnnnnnnnnnnnnnnnnnnnnnnnnnnnnnnnnnnnnnnnnnnnnnnnnnnnnnnnnnnnnnnnnnnnnnnnnnnnnnnnnnnnnnnnnnnnnnnnnnnnnnnnnnnnnnnnnnnnnnnnnnnnnnnnnnnnnnnnnnnnnnnnnnnnnnnnnnnnnnnnnnnnnnnnnnnnnnnnnnnnnnnnnnnnnnnnnnnnnnnnnnnnnnnnnnnnnnnnnnnnnnnnnnnnnnnnnnnnnnnnnnnnnnnnnnnnnnnnnnnnnnnnnnnnnnnnnnnnnnnnnnnnnnnnnnnnnnnnnnnnnnnnnnnnnnnnnnnnnnnnnnnnnnnnnnnnnnnnnnnnnnnnnnnnnnnnnnnnnnnnnnnnnnnnnnnnnnnnnnnnnnnnnnnnnnnnnnnnnnnnnnnnnnnnnnnnnnnnnnnnnnnnnnnnnnnnnnnnnnnnnnnnnnnnnnnnnnnnnnnnnnnnnnnnnnnnnnnnnnnnnnnnnnnnnnnnnnnnnnnnnnnnnnnnnnnnnnnnnnnnnnnnnnnnnnnnnnnnnnnnnnnnnnnnnnnnnnnnnnnnnnnnnnnnnnnnnnnnnnnnnnnnnnnnnnnnnnnnnnnnnnnnnnnnnnnnnnnnnnnnnnnnnnnnnnnnnnnnnnnnnnnnnnnnnnnnnnnnnnnnnnnnnnnnnnnnnnnnnnnnnnnnnnnnnnnnnnnnnnnnnnnnnnnnnnnnnnnnnnnnnnnnnnnnnnnnnnnnnnnnnnnnnnnnnnnnnnnnnnnnnnnnnnnnnnnnnnnnnnnnnnnnnnnnnnnnnnnnnnnnnnnnnnnnnnnnnnnnnnnnnnnnnnnnnnnnnnnnnnnnnnnnnnnnnnnnnnnnnnnnnnnnnnnnnnnnnnnnnnnnnnnnnnnnnnnnnnnnnnnnnnnnnnnnnnnnnnnnnnnnnnnnnnnnnnnnnnnnnnnnnnnnnnnnnnnnnnnnnnnnnnnnnnnnnnnnnnnnnnnnnnnnnnnnnnnnnnnnnnnnnnnnnnnnnnnnnnnnnnnnnnnnnnnnnnnnnnnnnnnnnnnnnnnnnnnnnnnnnnnnnnnnnnnnnnnnnnnnnnnnnnnnnnnnnnnnnnnnnnnnnnnnnnnnnnnnnnnnnnnnnnnnnnnnnnnnnnnnnnnnnnnnnnnnnnnnnnnnnnnnnnnnnnnnnnnnnnnnnnnnnnnnnnnnnnnnnnnnnnnnnnnnnnnnnnnnnnnnnnnnnnnnnnnnnnnnnnnnnnnnnnnnnnnnnnnnnnnnnnnnnnnnnnnnnnnnnnnnnnnnnnnnnnnnnnnnnnnnnnnnnnnnnnnnnnnnnnnnnnnnnnnnnnnnnnnnnnnnnnnnnnnnnnnnnnnnnnnnnnnnnnnnnnnnnnnnnnnnnnnnnnnnnnnnnnnnnnnnnnnnnnnnnnnnnnnnnnnnnnnnnnnnnnnnnnnnnnnnnnnnnnnnnnnnnnnnnnnnnnnnnnnnnnnnnnnnnnnnnnnnnnnnnnnnnnnnnnnnnnnnnnnnnnnnnnnnnnnnnnnnnnnnnnnnnnnnnnnnnnnnnnnnnnnnnnnnnnnnnnnnnnnnnnnnnnnnnnnnnnnnnnnnnnnnnnnnnnnnnnnnnnnnnnnnnnnnnnnnnnnnnnnnnnnnnnnnnnnnnnnnnnnnnnnnnnnnnnnnnnnnnnnnnnnnnnnnnnnnnnnnnnnnnnnnnnnnnnnnnnnnnnnnnnnnnnnnnnnnnnnnnnnnnnnnnnnnnnnnnnnnnnnnnnnnnnnnnnnnnnnnnnnnnnnnnnnnnnnnnnnnnnnnnnnnnnnnnnnnnnnnnnnnnnnnnnnnnnnnnnnnnnnnnnnnnnnnnnnnnnnnnnnnnnnnnnnnnnnnnnnnnnnnnnnnnnnnnnnnnnnnnnnnnnnnnnnnnnnnnnnnnnnnnnnnnnnnnnnnnnnnnnnnnnnnnnnnnnnnnnnnnnnnnnnnnnnnnnnnnnnnnnnnnnnnnnnnnnnnnnnnnnnnnnnnnnnnnnnnnnnnnnnnnnnnnnnnnnnnnnnnnnnnnnnnnnnnnnnnnnnnnnnnnnnnnnnnnnnnnnnnnnnnnnnnnnnnnnnnnnnnnnnnnnnnnnnnnnnnnnnnnnnnnnnnnnnnnnnnnnnnnnnnnnnnnnnnnnnnnnnnnnnnnnnnnnnnnnnnnnnnnnnnnnnnnnnnnnnnnnnnnnnnnnnnnnnnnnnnnnnnnnnnnnnnnnnnnnnnnnnnnnnnnnnnnnnnnnnnnnnnnnnnnnnnnnnnnnnnnnnnnnnnnnnnnnnnnnnnnnnnnnnnnnnnnnnnnnnnnnnnnnnnnnnnnnnnnnnnnnnnnnnnnnnnnnnnnnnnnnnnnnnnnnnnnnnnnnnnnnnnnnnnnnnnnnnnnnnnnnnnnnnnnnnnnnnnnnnnnnnnnnnnnnnnnnnnnnnnnnnnnnnnnnnnnnnnnnnnnnnnnnnnnnnnnnnnnnnnnnnnnnnnnnnnnnnnnnnnnnnnnnnnnnnnnnnnnnnnnnnnnnnnnnnnnnnnnnnnnnnnnnnnnnnnnnnnnnnnnnnnnnnnnnnnnnnnnnnnnnnnnnnnnnnnnnnnnnnnnnnnnnnnnnnnnnnnnnnnnnnnnnnnnnnnnnnnnnnnnnnnnnnnnnnnnnnnnnnnnnnnnnnnnnnnnnnnnnnnnnnnnnnnnnnnnnnnnnnnnnnnnnnnnnnnnnnnnnnnnnnnnnnnnnnnnnnnnnnnnnnnnnnnnnnnnnnnnnnnnnnnnnnnnnnnnnnnnnnnnnnnnnnnnnnnnnnnnnnnnnnnnnnnnnnnnnnnnnnnnnnnnnnnnnnnnnnnnnnnnnnnnnnnnnnnnnnnnnnnnnnnnnnnnnnnnnnnnnnnnnnnnnnnnnnnnnnnnnnnnnnnnnnnnnnnnnnnnnnnnnnnnnnnnnnnnnnnnnnnnnnnnnnnnnnnnnnnnnnnnnnnnnnnnnnnnnnnnnnnnnnnnnnnnnnnnnnnnnnnnnnnnnnnnnnnnnnnnnnnnnnnnnnnnnnnnnnnnnnnnnnnnnnnnnnnnnnnnnnnnnnnnnnnnnnnnnnnnnnnnnnnnnnnnnnnnnnnnnnnnnnnnnnnnnnnnnnnnnnnnnnnnnnnnnnnnnnnnnnnnnnnnnnnnnnnnnnnnnnnnnnnnnnnnnnnnnnnnnnnnnnnnnnnnnnnnnnnnnnnnnnnnnnnnnnnnnnnnnnnnnnnnnnnnnnnnnnnnnnnnnnnnnnnnnnnnnnnnnnnnnnnnnnnnnnnnnnnnnnnnnnnnnnnnnnnnnnnnnnnnnnnnnnnnnnnnnnnnnnnnnnnnnnnnnnnnnnnnnnnnnnnnnnnnnnnnnnnnnnnnnnnnnnnnnnnnnnnnnnnnnnnnnnnnnnnnnnnnnnnnnnnnnnnnnnnnnnnnnnnnnnnnnnnnnnnnnnnnnnnnnnnnnnnnnnnnnnnnnnnnnnnnnnnnnnnnnnnnnnnnnnnnnnnnnnnnnnnnnnnnnnnnnnnnnnnnnnnnnnnnnnnnnnnnnnnnnnnnnnnnnnnnnnnnnnnnnnnnnnnnnnnnnnnnnnnnnnnnnnnnnnnnnnnnnnnnnnnnnnnnnnnnnnnnnnnnnnnnnnnnnnnnnnnnnnnnnnnnnnnnnnnnnnnnnnnnnnnnnnnnnnnnnnnnnnnnnnnnnnnnnnnnnnnnnnnnnnnnnnnnnnnnnnnnnnnnnnnnnnnnnnnnnnnnnnnnnnnnnnnnnnnnnnnnnnnnnnnnnnnnnnnnnnnnnnnnnnnnnnnnnnnnnnnnnnnnnnnnnnnnnnnnnnnnnnnnnnnnnnnnnnnnnnnnnnnnnnnnnnnnnnnnnnnnnnnnnnnnnnnnnnnnnnnnnnnnnnnnnnnnnnnnnnnnnnnnnnnnnnnnnnnnnnnnnnnnnnnnnnnnnnnnnnnnnnnnnnnnnnnnnnnnnnnnnnnnnnnnnnnnnnnnnnnnnnnnnnnnnnnnnnnnnnnnnnnnnnnnnnnnnnnnnnnnnnnnnnnnnnnnnnnnnnnnnnnnnnnnnnnnnnnnnnnnnnnnnnnnnnnnnnnnnnnnnnnnnnnnnnnnnnnnnnnnnnnnnnnnnnnnnnnnnnnnnnnnnnnnnnnnnnnnnnnnnnnnnnnnnnnnnnnnnnnnnnnnnnnnnnnnnnnnnnnnnnnnnnnnnnnnnnnnnnnnnnnnnnnnnnnnnnnnnnnnnnnnnnnnnnnnnnnnnnnnnnnnnnnnnnnnnnnnnnnnnnnnnnnnnnnnnnnnnnnnnnnnnnnnnnnnnnnnnnnnnnnnnnnnnnnnnnnnnnnnnnnnnnnnnnnnnnnnnnnnnnnnnnnnnnnnnnnnnnnnnnnnnnnnnnnnnnnnnnnnnnnnnnnnnnnnnnnnnnnnnnnnnnnnnnnnnnnnnnnnnnnnnnnnnnnnnnnnnnnnnnnnnnnnnnnnnnnnnnnnnnnnnnnnnnnnnnnnnnnnnnnnnnnnnnnnnnnnnnnnnnnnnnnnnnnnnnnnnnnnnnnnnnnnnnnnnnnnnnnnnnnnnnnnnnnnnnnnnnnnnnnnnnnnnnnnnnnnnnnnnnnnnnnnnnnnnnnnnnnnnnnnnnnnnnnnnnnnnnnnnnnnnnnnnnnnnnnnnnnnnnnnnnnnnnnnnnnnnnnnnnnnnnnnnnnnnnnnnnnnnnnnnnnnnnnnnnnnnnnnnnnnnnnnnnnnnnnnnnnnnnnnnnnnnnnnnnnnnnnnnnnnnnnnnnnnnnnnnnnnnnnnnnnnnnnnnnnnnnnnnnnnnnnnnnnnnnnnnnnnnnnnnnnnnnnnnnnnnnnnnnnnnnnnnnnnnnnnnnnnnnnnnnnnnnnnnnnnnnnnnnnnnnnnnnnnnnnnnnnnnnnnnnnnnnnnnnnnnnnnnnnnnnnnnnnnnnnnnnnnnnnnnnnnnnnnnnnnnnnnnnnnnnnnnnnnnnnnnnnnnnnnnnnnnnnnnnnnnnnnnnnnnnnnnnnnnnnnnnnnnnnnnnnnnnnnnnnnnnnnnnnnnnnnnnnnnnnnnnnnnnnnnnnnnnnnnnnnnnnnnnnnnnnnnnnnnnnnnnnnnnnnnnnnnnnnnnnnnnnnnnnnnnnnnnnnnnnnnnnnnnnnnnnnnnnnnnnnnnnnnnnnnnnnnnnnnnnnnnnnnnnnnnnnnnnnnnnnnnnnnnnnnnnnnnnnnnnnnnnnnnnnnnnnnnnnnnnnnnnnnnnnnnnnnnnnnnnnnnnnnnnnnnnnnnnnnnnnnnnnnnnnnnnnnnnnnnnnnnnnnnnnnnnnnnnnnnnnnnnnnnnnnnnnnnnnnnnnnnnnnnnnnnnnnnnnnnnnnnnnnnnnnnnnnnnnnnnnnnnnnnnnnnnnnnnnnnnnnnnnnnnnnnnnnnnnnnnnnnnnnnnnnnnnnnnnnnnnnnnnnnnnnnnnnnnnnnnnnnnnnnnnnnnnnnnnnnnnnnnnnnnnnnnnnnnnnnnnnnnnnnnnnnnnnnnnnnnnnnnnnnnnnnnnnnnnnnnnnnnnnnnnnnnnnnnnnnnnnnnnnnnnnnnnnnnnnnnnnnnnnnnnnnnnnnnnnnnnnnnnnnnnnnnnnnnnnnnnnnnnnnnnnnnnnnnnnnnnnnnnnnnnnnnnnnnnnnnnnnnnnnnnnnnnnnnnnnnnnnnnnnnnnnnnnnnnnnnnnnnnnnnnnnnnnnnnnnnnnnnnnnnnnnnnnnnnnnnnnnnnnnnnnnnnnnnnnnnnnnnnnnnnnnnnnnnnnnnnnnnnnnnnnnnnnnnnnnnnnnnnnnnnnnnnnnnnnnnnnnnnnnnnnnnnnnnnnnnnnnnnnnnnnnnnnnnnnnnnnnnnnnnnnnnnnnnnnnnnnnnnnnnnnnnnnnnnnnnnnnnnnnnnnnnnnnnnnnnnnnnnnnnnnnnnnnnnnnnnnnnnnnnnnnnnnnnnnnnnnnnnnnnnnnnnnnnnnnnnnnnnnnnnnnnnnnnnnnnnnnnnnnnnnnnnnnnnnnnnnnnnnnnnnnnnnnnnnnnnnnnnnnnnnnnnnnnnnnnnnnnnnnnnnnnnnnnnnnnnnnnnnnnnnnnnnnnnnnnnnnnnnnnnnnnnnnnnnnnnnnnnnnnnnnnnnnnnnnnnnnnnnnnnnnnnnnnnnnnnnnnnnnnnnnnnnnnnnnnnnnnnnnnnnnnnnnnnnnnnnnnnnnnnnnnnnnnnnnnnnnnnnnnnnnnnnnnnnnnnnnnnnnnnnnnnnnnnnnnnnnnnnnnnnnnnnnnnnnnnnnnnnnnnnnnnnnnnnnnnnnnnnnnnnnnnnnnnnnnnnnnnnnnnnnnnnnnnnnnnnnnnnnnnnnnnnnnnnnnnnnnnnnnnnnnnnnnnnnnnnnnnnnnnnnnnnnnnnnnnnnnnnnnnnnnnnnnnnnnnnnnnnnnnnnnnnnnnnnnnnnnnnnnnnnnnnnnnnnnnnnnnnnnnnnnnnnnnnnnnnnnnnnnnnnnnnnnnnnnnnnnnnnnnnnnnnnnnnnnnnnnnnnnnnnnnnnnnnnnnnnnnnnnnnnnnnnnnnnnnnnnnnnnnnnnnnnnnnnnnnnnnnnnnnnnnnnnnnnnnnnnnnnnnnnnnnnnnnnnnnnnnnnnnnnnnnnnnnnnnnnnnnnnnnnnnnnnnnnnnnnnnnnnnnnnnnnnnnnnnnnnnnnnnnnnnnnnnnnnnnnnnnnnnnnnnnnnnnnnnnnnnnnnnnnnnnnnnnnnnnnnnnnnnnnnnnnnnnnnnnnnnnnnnnnnnnnnnnnnnnnnnnnnnnnnnnnnnnnnnnnnnnnnnnnnnnnnnnnnnnnnnnnnnnnnnnnnnnnnnnnnnnnnnnnnnnnnnnnnnnnnnnnnnnnnnnnnnnnnnnnnnnnnnnnnnnnnnnnnnnnnnnnnnnnnnnnnnnnnnnnnnnnnnnnnnnnnnnnnnnnnnnnnnnnnnnnnnnnnnnnnnnnnnnnnnnnnnnnnnnnnnnnnnnnnnnnnnnnnnnnnnnnnnnnnnnnnnnnnnnnnnnnnnnnnnnnnnnnnnnnnnnnnnnnnnnnnnnnnnnnnnnnnnnnnnnnnnnnnnnnnnnnnnnnnnnnnnnnnnnnnnnnnnnnnnnnnnnnnnnnnnnnnnnnnnnnnnnnnnnnnnnnnnnnnnnnnnnnnnnnnnnnnnnnnnnnnnnnnnnnnnnnnnnnnnnnnnnnnnnnnnnnnnnnnnnnnnnnnnnnnnnnnnnnnnnnnnnnnnnnnnnnnnnnnnnnnnnnnnnnnnnnnnnnnnnnnnnnnnnnnnnnnnnnnnnnnnnnnnnnnnnnnnnnnnnnnnnnnnnnnnnnnnnnnnnnnnnnnnnnnnnnnnnnnnnnnnnnnnnnnnnnnnnnnnnnnnnnnnnnnnnnnnnnnnnnnnnnnnnnnnnnnnnnnnnnnnnnnnnnnnnnnnnnnnnnnnnnnnnnnnnnnnnnnnnnnnnnnnnnnnnnnnnnnnnnnnnnnnnnnnnnnnnnnnnnnnnnnnnnnnnnnnnnnnnnnnnnnnnnnnnnnnnnnnnnnnnnnnnnnnnnnnnnnnnnnnnnnnnnnnnnnnnnnnnnnnnnnnnnnnnnnnnnnnnnnnnnnnnnnnnnnnnnnnnnnnnnnnnnnnnnnnnnnnnnnnnnnnnnnnnnnnnnnnnnnnnnnnnnnnnnnnnnnnnnnnnnnnnnnnnnnnnnnnnnnnnnnnnnnnnnnnnnnnnnnnnnnnnnnnnnnnnnnnnnnnnnnnnnnnnnnnnnnnnnnnnnnnnnnnnnnnnnnnnnnnnnnnnnnnnnnnnnnnnnnnnnnnnnnnnnnnnnnnnnnnnnnnnnnnnnnnnnnnnnnnnnnnnnnnnnnnnnnnnnnnnnnnnnnnnnnnnnnnnnnnnnnnnnnnnnnnnnnnnnnnnnnnnnnnnnnnnnnnnnnnnnnnnnnnnnnnnnnnnnnnnnnnnnnnnnnnnnnnnnnnnnnnnnnnnnnnnnnnnnnnnnnnnnnnnnnnnnnnnnnnnnnnnnnnnnnnnnnnnnnnnnnnnnnnnnnnnnnnnnnnnnnnnnnnnnnnnnnnnnnnnnnnnnnnnnnnnnnnnnnnnnnnnnnnnnnnnnnnnnnnnnnnnnnnnnnnnnnnnnnnnnnnnnnnnnnnnnnnnnnnnnnnnnnnnnnnnnnnnnnnnnnnnnnnnnnnnnnnnnnnnnnnnnnnnnnnnnnnnnnnnnnnnnnnnnnnnnnnnnnnnnnnnnnnnnnnnnnnnnnnnnnnnnnnnnnnnnnnnnnnnnnnnnnnnnnnnnnnnnnnnnnnnnnnnnnnnnnnnnnnnnnnnnnnnnnnnnnnnnnnnnnnnnnnnnnnnnnnnnnnnnnnnnnnnnnnnnnnnnnnnnnnnnnnnnnnnnnnnnnnnnnnnnnnnnnnnnnnnnnnnnnnnnnnnnnnnnnnnnnnnnnnnnnnnnnnnnnnnnnnnnnnnnnnnnnnnnnnnnnnnnnnnnnnnnnnnnnnnnnnnnnnnnnnnnnnnnnnnnnnnnnnnnnnnnnnnnnnnnnnnnnnnnnnnnnnnnnnnnnnnnnnnnnnnnnnnnnnnnnnnnnnnnnnnnnnnnnnnnnnnnnnnnnnnnnnnnnnnnnnnnnnnnnnnnnnnnnnnnnnnnnnnnnnnnnnnnnnnnnnnnnnnnnnnnnnnnnnnnnnnnnnnnnnnnnnnnnnnnnnnnnnnnnnnnnnnnnnnnnnnnnnnnnnnnnnnnnnnnnnnnnnnnnnnnnnnnnnnnnnnnnnnnnnnnnnnnnnnnnnnnnnnnnnnnnnnnnnnnnnnnnnnnnnnnnnnnnnnnnnnnnnnnnnnnnnnnnnnnnnnnnnnnnnnnnnnnnnnnnnnnnnnnnnnnnnnnnnnnnnnnnnnnnnnnnnnnnnnnnnnnnnnnnnnnnnnnnnnnnnnnnnnnnnnnnnnnnnnnnnnnnnnnnnnnnnnnnnnnnnnnnnnnnnnnnnnnnnnnnnnnnnnnnnnnnnnnnnnnnnnnnnnnnnnnnnnnnnnnnnnnnnnnnnnnnnnnnnnnnnnnnnnnnnnnnnnnnnnnnnnnnnnnnnnnnnnnnnnnnnnnnnnnnnnnnnnnnnnnnnnnnnnnnnnnnnnnnnnnnnnnnnnnnnnnnnnnnnnnnnnnnnnnnnnnnnnnnnnnnnnnnnnnnnnnnnnnnnnnnnnnnnnnnnnnnnnnnnnnnnnnnnnnnnnnnnnnnnnnnnnnnnnnnnnnnnnnnnnnnnnnnnnnnnnnnnnnnnnnnnnnnnnnnnnnnnnnnnnnnnnnnnnnnnnnnnnnnnnnnnnnnnnnnnnnnnnnnnnnnnnnnnnnnnnnnnnnnnnnnnnnnnnnnnnnnnnnnnnnnnnnnnnnnnnnnnnnnnnnnnnnnnnnnnnnnnnnnnnnnnnnnnnnnnnnnnnnnnnnnnnnnnnnnnnnnnnnnnnnnnnnnnnnnnnnnnnnnnnnnnnnnnnnnnnnnnnnnnnnnnnnnnnnnnnnnnnnnnnnnnnnnnnnnnnnnnnnnnnnnnnnnnnnnnnnnnnnnnnnnnnnnnnnnnnnnnnnnnnnnnnnnnnnnnnnnnnnnnnnnnnnnnnnnnnnnnnnnnnnnnnnnnnnnnnnnnnnnnnnnnnnnnnnnnnnnnnnnnnnnnnnnnnnnnnnnnnnnnnnnnnnnnnnnnnnnnnnnnnnnnnnnnnnnnnnnnnnnnnnnnnnnnnnnnnnnnnnnnnnnnnnnnnnnnnnnnnnnnnnnnnnnnnnnnnnnnnnnnnnnnnnnnnnnnnnnnnnnnnnnnnnnnnnnnnnnnnnnnnnnnnnnnnnnnnnnnnnnnnnnnnnnnnnnnnnnnnnnnnnnnnnnnnnnnnnnnnnnnnnnnnnnnnnnnnnnnnnnnnnnnnnnnnnnnnnnnnnnnnnnnnnnnnnnnnnnnnnnnnnnnnnnnnnnnnnnnnnnnnnnnnnnnnnnnnnnnnnnnnnnnnnnnnnnnnnnnnnnnnnnnnnnnnnnnnnnnnnnnnnnnnnnnnnnnnnnnnnnnnnnnnnnnnnnnnnnnnnnnnnnnnnnnnnnnnnnnnnnnnnnnnnnnnnnnnnnnnnnnnnnnnnnnnnnnnnnnnnnnnnnnnnnnnnnnnnnnnnnnnnnnnnnnnnnnnnnnnnnnnnnnnnnnnnnnnnnnnnnnnnnnnnnnnnnnnnnnnnnnnnnnnnnnnnnnnnnnnnnnnnnnnnnnnnnnnnnnnnnnnnnnnnnnnnnnnnnnnnnnnnnnnnnnnnnnnnnnnnnnnnnnnnnnnnnnnnnnnnnnnnnnnnnnnnnnnnnnnnnnnnnnnnnnnnnnnnnnnnnnnnnnnnnnnnnnnnnnnnnnnnnnnnnnnnnnnnnnnnnnnnnnnnnnnnnnnnnnnnnnnnnnnnnnnnnnnnnnnnnnnnnnnnnnnnnnnnnnnnnnnnnnnnnnnnnnnnnnnnnnnnnnnnnnnnnnnnnnnnnnnnnnnnnnnnnnnnnnnnnnnnnnnnnnnnnnnnnnnnnnnnnnnnnnnnnnnnnnnnnnnnnnnnnnnnnnnnnnnnnnnnnnnnnnnnnnnnnnnnnnnnnnnnnnnnnnnnnnnnnnnnnnnnnnnnnnnnnnnnnnnnnnnnnnnnnnnnnnnnnnnnnnnnnnnnnnnnnnnnnnnnnnnnnnnnnnnnnnnnnnnnnnnnnnnnnnnnnnnnnnnnnnnnnnnnnnnnnnnnnnnnnnnnnnnnnnnnnnnnnnnnnnnnnnnnnnnnnnnnnnnnnnnnnnnnnnnnnnnnnnnnnnnnnnnnnnnnnnnnnnnnnnnnnnnnnnnnnnnnnnnnnnnnnnnnnnnnnnnnnnnnnnnnnnnnnnnnnnnnnnnnnnnnnnnnnnnnnnnnnnnnnnnnnnnnnnnnnnnnnnnnnnnnnnnnnnnnnnnnnnnnnnnnnnnnnnnnnnnnnnnnnnnnnnnnnnnnnnnnnnnnnnnnnnnnnnnnnnnnnnnnnnnnnnnnnnnnnnnnnnnnnnnnnnnnnnnnnnnnnnnnnnnnnnnnnnnnnnnnnnnnnnnnnnnnnnnnnnnnnnnnnnnnnnnnnnnnnnnnnnnnnnnnnnnnnnnnnnnnnnnnnnnnnnnnnnnnnnnnnnnnnnnnnnnnnnnnnnnnnnnnnnnnnnnnnnnnnnnnnnnnnnnnnnnnnnnnnnnnnnnnnnnnnnnnnnnnnnnnnnnnnnnnnnnnnnnnnnnnnnnnnnnnnnnnnnnnnnnnnnnnnnnnnnnnnnnnnnnnnnnnnnnnnnnnnnnnnnnnnnnnnnnnnnnnnnnnnnnnnnnnnnnnnnnnnnnnnnnnnnnnnnnnnnnnnnnnnnnnnnnnnnnnnnnnnnnnnnnnnnnnnnnnnnnnnnnnnnnnnnnnnnnnnnnnnnnnnnnnnnnnnnnnnnnnnnnnnnnnnnnnnnnnnnnnnnnnnnnnnnnnnnnnnnnnnnnnnnnnnnnnnnnnnnnnnnnnnnnnnnnnnnnnnnnnnnnnnnnnnnnnnnnnnnnnnnnnnnnnnnnnnnnnnnnnnnnnnnnnnnnnnnnnnnnnnnnnnnnnnnnnnnnnnnnnnnnnnnnnnnnnnnnnnnnnnnnnnnnnnnnnnnnnnnnnnnnnnnnnnnnnnnnnnnnnnnnnnnnnnnnnnnnnnnnnnnnnnnnnnnnnnnnnnnnnnnnnnnnnnnnnnnnnnnnnnnnnnnnnnnnnnnnnnnnnnnnnnnnnnnnnnnnnnnnnnnnnnnnnnnnnnnnnnnnnnnnnnnnnnnnnnnnnnnnnnnnnnnnnnnnnnnnnnnnnnnnnnnnnnnnnnnnnnnnnnnnnnnnnnnnnnnnnnnnnnnnnnnnnnnnnnnnnnnnnnnnnnnnnnnnnnnnnnnnnnnnnnnnnnnnnnnnnnnnnnnnnnnnnnnnnnnnnnnnnnnnnnnnnnnnnnnnnnnnnnnnnnnnnnnnnnnnnnnnnnnnnnnnnnnnnnnnnnnnnnnnnnnnnnnnnnnnnnnnnnnnnnnnnnnnnnnnnnnnnnnnnnnnnnnnnnnnnnnnnnnnnnnnnnnnnnnnnnnnnnnnnnnnnnnnnnnnnnnnnnnnnnnnnnnnnnnnnnnnnnnnnnnnnnnnnnnnnnnnnnnnnnnnnnnnnnnnnnnnnnnnnnnnnnnnnnnnnnnnnnnnnnnnnnnnnnnnnnnnnnnnnnnnnnnnnnnnnnnnnnnnnnnnnnnnnnnnnnnnnnnnnnnnnnnnnnnnnnnnnnnnnnnnnnnnnnnnnnnnnnnnnnnnnnnnnnnnnnnnnnnnnnnnnnnnnnnnnnnnnnnnnnnnnnnnnnnnnnnnnnnnnnnnnnnnnnnnnnnnnnnnnnnnnnnnnnnnnnnnnnnnnnnnnnnnnnnnnnnnnnnnnnnnnnnnnnnnnnnnnnnnnnnnnnnnnnnnnnnnnnnnnnnnnnnnnnnnnnnnnnnnnnnnnnnnnnnnnnnnnnnnnnnnnnnnnnnnnnnnnnnnnnnnnnnnnnnnnnnnnnnnnnnnnnnnnnnnnnnnnnnnnnnnnnnnnnnnnnnnnnnnnnnnnnnnnnnnnnnnnnnnnnnnnnnnnnnnnnnnnnnnnnnnnnnnnnnnnnnnnnnnnnnnnnnnnnnnnnnnnnnnnnnnnnnnnnnnnnnnnnnnnnnnnnnnnnnnnnnnnnnnnnnnnnnnnnnnnnnnnnnnnnnnnnnnnnnnnnnnnnnnnnnnnnnnnnnnnnnnnnnnnnnnnnnnnnnnnnnnnnnnnnnnnnnnnnnnnnnnnnnnnnnnnnnnnnnnnnnnnnnnnnnnnnnnnnnnnnnnnnnnnnnnnnnnnnnnnnnnnnnnnnnnnnnnnnnnnnnnnnnnnnnnnnnnnnnnnnnnnnnnnnnnnnnnnnnnnnnnnnnnnnnnnnnnnnnnnnnnnnnnnnnnnnnnnnnnnnnnnnnnnnnnnnnnnnnnnnnnnnnnnnnnnnnnnnnnnnnnnnnnnnnnnnnnnnnnnnnnnnnnnnnnnnnnnnnnnnnnnnnnnnnnnnnnnnnnnnnnnnnnnnnnnnnnnnnnnnnnnnnnnnnnnnnnnnnnnnnnnnnnnnnnnnnnnnnnnnnnnnnnnnnnnnnnnnnnnnnnnnnnnnnnnnnnnnnnnnnnnnnnnnnnnnnnnnnnnnnnnnnnnnnnnnnnnnnnnnnnnnnnnnnnnnnnnnnnnnnnnnnnnnnnnnnnnnnnnnnnnnnnnnnnnnnnnnnnnnnnnnnnnnnnnnnnnnnnnnnnnnnnnnnnnnnnnnnnnnnnnnnnnnnnnnnnnnnnnnnnnnnnnnnnnnnnnnnnnnnnnnnnnnnnnnnnnnnnnnnnnnnnnnnnnnnnnnnnnnnnnnnnnnnnnnnnnnnnnnnnnnnnnnnnnnnnnnnnnnnnnnnnnnnnnnnnnnnnnnnnnnnnnnnnnnnnnnnnnnnnnnnnnnnnnnnnnnnnnnnnnnnnnnnnnnnnnnnnnnnnnnnnnnnnnnnnnnnnnnnnnnnnnnnnnnnnnnnnnnnnnnnnnnnnnnnnnnnnnnnnnnnnnnnnnnnnnnnnnnnnnnnnnnnnnnnnnnnnnnnnnnnnnnnnnnnnnnnnnnnnnnnnnnnnnnnnnnnnnnnnnnnnnnnnnnnnnnnnnnnnnnnnnnnnnnnnnnnnnnnnnnnnnnnnnnnnnnnnnnnnnnnnnnnnnnnnnnnnnnnnnnnnnnnnnnnnnnnnnnnnnnnnnnnnnnnnnnnnnnnnnnnnnnnnnnnnnnnnnnnnnnnnnnnnnnnnnnnnnnnnnnnnnnnnnnnnnnnnnnnnnnnnnnnnnnnnnnnnnnnnnnnnnnnnnnnnnnnnnnnnnnnnnnnnnnnnnnnnnnnnnnnnnnnnnnnnnnnnnnnnnnnnnnnnnnnnnnnnnnnnnnnnnnnnnnnnnnnnnnnnnnnnnnnnnnnnnnnnnnnnnnnnnnnnnnnnnnnnnnnnnnnnnnnnnnnnnnnnnnnnnnnnnnnnnnnnnnnnnnnnnnnnnnnnnnnnnnnnnnnnnnnnnnnnnnnnnnnnnnnnnnnnnnnnnnnnnnnnnnnnnnnnnnnnnnnnnnnnnnnnnnnnnnnnnnnnnnnnnnnnnnnnnnnnnnnnnnnnnnnnnnnnnnnnnnnnnnnnnnnnnnnnnnnnnnnnnnnnnnnnnnnnnnnnnnnnnnnnnnnnnnnnnnnnnnnnnnnnnnnnnnnnnnnnnnnnnnnnnnnnnnnnnnnnnnnnnnnnnnnnnnnnnnnnnnnnnnnnnnnnnnnnnnnnnnnnnnnnnnnnnnnnnnnnnnnnnnnnnnnnnnnnnnnnnnnnnnnnnnnnnnnnnnnnnnnnnnnnnnnnnnnnnnnnnnnnnnnnnnnnnnnnnnnnnnnnnnnnnnnnnnnnnnnnnnnnnnnnnnnnnnnnnnnnnnnnnnnnnnnnnnnnnnnnnnnnnnnnnnnnnnnnnnnnnnnnnnnnnnnnnnnnnnnnnnnnnnnnnnnnnnnnnnnnnnnnnnnnnnnnnnnnnnnnnnnnnnnnnnnnnnnnnnnnnnnnnnnnnnnnnnnnnnnnnnnnnnnnnnnnnnnnnnnnnnnnnnnnnnnnnnnnnnnnnnnnnnnnnnnnnnnnnnnnnnnnnnnnnnnnnnnnnnnnnnnnnnnnnnnnnnnnnnnnnnnnnnnnnnnnnnnnnnnnnnnnnnnnnnnnnnnnnnnnnnnnnnnnnnnnnnnnnnnnnnnnnnnnnnnnnnnnnnnnnnnnnnnnnnnnnnnnnnnnnnnnnnnnnnnnnnnnnnnnnnnnnnnnnnnnnnnnnnnnnnnnnnnnnnnnnnnnnnnnnnnnnnnnnnnnnnnnnnnnnnnnnnnnnnnnnnnnnnnnnnnnnnnnnnnnnnnnnnnnnnnnnnnnnnnnnnnnnnnnnnnnnnnnnnnnnnnnnnnnnnnnnnnnnnnnnnnnnnnnnnnnnnnnnnnnnnnnnnnnnnnnnnnnnnnnnnnnnnnnnnnnnnnnnnnnnnnnnnnnnnnnnnnnnnnnnnnnnnnnnnnnnnnnnnnnnnnnnnnnnnnnnnnnnnnnnnnnnnnnnnnnnnnnnnnnnnnnnnnnnnnnnnnnnnnnnnnnnnnnnnnnnnnnnnnnnnnnnnnnnnnnnnnnnnnnnnnnnnnnnnnnnnnnnnnnnnnnnnnnnnnnnnnnnnnnnnnnnnnnnnnnnnnnnnnnnnnnnnnnnnnnnnnnnnnnnnnnnnnnnnnnnnnnnnnnnnnnnnnnnnnnnnnnnnnnnnnnnnnnnnnnnnnnnnnnnnnnnnnnnnnnnnnnnnnnnnnnnnnnnnnnnnnnnnnnnnnnnnnnnnnnnnnnnnnnnnnnnnnnnnnnnnnnnnnnnnnnnnnnnnnnnnnnnnnnnnnnnnnnnnnnnnnnnnnnnnnnnnnnnnnnnnnnnnnnnnnnnnnnnnnnnnnnnnnnnnnnnnnnnnnnnnnnnnnnnnnnnnnnnnnnnnnnnnnnnnnnnnnnnnnnnnnnnnnnnnnnnnnnnnnnnnnnnnnnnnnnnnnnnnnnnnnnnnnnnnnnnnnnnnnnnnnnnnnnnnnnnnnnnnnnnnnnnnnnnnnnnnnnnnnnnnnnnnnnnnnnnnnnnnnnnnnnnnnnnnnnnnnnnnnnnnnnnnnnnnnnnnnnnnnnnnnnnnnnnnnnnnnnnnnnnnnnnnnnnnnnnnnnnnnnnnnnnnnnnnnnnnnnnnnnnnnnnnnnnnnnnnnnnnnnnnnnnnnnnnnnnnnnnnnnnnnnnnnnnnnnnnnnnnnnnnnnnnnnnnnnnnnnnnnnnnnnnnnnnnnnnnnnnnnnnnnnnnnnnnnnnnnnnnnnnnnnnnnnnnnnnnnnnnnnnnnnnnnnnnnnnnnnnnnnnnnnnnnnnnnnnnnnnnnnnnnnnnnnnnnnnnnnnnnnnnnnnnnnnnnnnnnnnnnnnnnnnnnnnnnnnnnnnnnnnnnnnnnnnnnnnnnnnnnnnnnnnnnnnnnnnnnnnnnnnnnnnnnnnnnnnnnnnnnnnnnnnnnnnnnnnnnnnnnnnnnnnnnnnnnnnnnnnnnnnnnnnnnnnnnnnnnnnnnnnnnnnnnnnnnnnnnnnnnnnnnnnnnnnnnnnnnnnnnnnnnnnnnnnnnnnnnnnnnnnnnnnnnnnnnnnnnnnnnnnnnnnnnnnnnnnnnnnnnnnnnnnnnnnnnnnnnnnnnnnnnnnnnnnnnnnnnnnnnnnnnnnnnnnnnnnnnnnnnnnnnnnnnnnnnnnnnnnnnnnnnnnnnnnnnnnnnnnnnnnnnnnnnnnnnnnnnnnnnnnnnnnnnnnnnnnnnnnnnnnnnnnnnnnnnnnnnnnnnnnnnnnnnnnnnnnnnnnnnnnnnnnnnnnnnnnnnnnnnnnnnnnnnnnnnnnnnnnnnnnnnnnnnnnnnnnnnnnnnnnnnnnnnnnnnnnnnnnnnnnnnnnnnnnnnnnnnnnnnnnnnnnnnnnnnnnnnnnnnnnnnnnnnnnnnnnnnnnnnnnnnnnnnnnnnnnnnnnnnnnnnnnnnnnnnnnnnnnnnnnnnnnnnnnnnnnnnnnnnnnnnnnnnnnnnnnnnnnnnnnnnnnnnnnnnnnnnnnnnnnnnnnnnnnnnnnnnnnnnnnnnnnnnnnnnnnnnnnnnnnnnnnnnnnnnnnnnnnnnnnnnnnnnnnnnnnnnnnnnnnnnnnnnnnnnnnnnnnnnnnnnnnnnnnnnnnnnnnnnnnnnnnnnnnnnnnnnnnnnnnnnnnnnnnnnnnnnnnnnnnnnnnnnnnnnnnnnnnnnnnnnnnnnnnnnnnnnnnnnnnnnnnnnnnnnnnnnnnnnnnnnnnnnnnnnnnnnnnnnnnnnnnnnnnnnnnnnnnnnnnnnnnnnnnnnnnnnnnnnnnnnnnnnnnnnnnnnnnnnnnnnnnnnnnnnnnnnnnnnnnnnnnnnnnnnnnnnnnnnnnnnnnnnnnnnnnnnnnnnnnnnnnnnnnnnnnnnnnnnnnnnnnnnnnnnnnnnnnnnnnnnnnnnnnnnnnnnnnnnnnnnnnnnnnnnnnnnnnnnnnnnnnnnnnnnnnnnnnnnnnnnnnnnnnnnnnnnnnnnnnnnnnnnnnnnnnnnnnnnnnnnnnnnnnnnnnnnnnnnnnnnnnnnnnnnnnnnnnnnnnnnnnnnnnnnnnnnnnnnnnnnnnnnnnnnnnnnnnnnnnnnnnnnnnnnnnnnnnnnnnnnnnnnnnnnnnnnnnnnnnnnnnnnnnnnnnnnnnnnnnnnnnnnnnnnnnnnnnnnnnnnnnnnnnnnnnnnnnnnnnnnnnnnnnnnnnnnnnnnnnnnnnnnnnnnnnnnnnnnnnnnnnnnnnnnnnnnnnnnnnnnnnnnnnnnnnnnnnnnnnnnnnnnnnnnnnnnnnnnnnnnnnnnnnnnnnnnnnnnnnnnnnnnnnnnnnnnnnnnnnnnnnnnnnnnnnnnnnnnnnnnnnnnnnnnnnnnnnnnnnnnnnnnnnnnnnnnnnnnnnnnnnnnnnnnnnnnnnnnnnnnnnnnnnnnnnnnnnnnnnnnnnnnnnnnnnnnnnnnnnnnnnnnnnnnnnnnnnnnnnnnnnnnnnnnnnnnnnnnnnnnnnnnnnnnnnnnnnnnnnnnnnnnnnnnnnnnnnnnnnnnnnnnnnnnnnnnnnnnnnnnnnnnnnnnnnnnnnnnnnnnnnnnnnnnnnnnnnnnnnnnnnnnnnnnnnnnnnnnnnnnnnnnnnnnnnnnnnnnnnnnnnnnnnnnnnnnnnnnnnnnnnnnnnnnnnnnnnnnnnnnnnnnnnnnnnnnnnnnnnnnnnnnnnnnnnnnnnnnnnnnnnnnnnnnnnnnnnnnnnnnnnnnnnnnnnnnnnnnnnnnnnnnnnnnnnnnnnnnnnnnnnnnnnnnnnnnnnnnnnnnnnnnnnnnnnnnnnnnnnnnnnnnnnnnnnnnnnnnnnnnnnnnnnnnnnnnnnnnnnnnnnnnnnnnnnnnnnnnnnnnnnnnnnnnnnnnnnnnnnnnnnnnnnnnnnnnnnnnnnnnnnnnnnnnnnnnnnnnnnnnnnnnnnnnnnnnnnnnnnnnnnnnnnnnnnnnnnnnnnnnnnnnnnnnnnnnnnnnnnnnnnnnnnnnnnnnnnnnnnnnnnnnnnnnnnnnnnnnnnnnnnnnnnnnnnnnnnnnnnnnnnnnnnnnnnnnnnnnnnnnnnnnnnnnnnnnnnnnnnnnnnnnnnnnnnnnnnnnnnnnnnnnnnnnnnnnnnnnnnnnnnnnnnnnnnnnnnnnnnnnnnnnnnnnnnnnnnnnnnnnnnnnnnnnnnnnnnnnnnnnnnnnnnnnnnnnnnnnnnnnnnnnnnnnnnnnnnnnnnnnnnnnnnnnnnnnnnnnnnnnnnnnnnnnnnnnnnnnnnnnnnnnnnnnnnnnnnnnnnnnnnnnnnnnnnnnnnnnnnnnnnnnnnnnnnnnnnnnnnnnnnnnnnnnnnnnnnnnnnnnnnnnnnnnnnnnnnnnnnnnnnnnnnnnnnnnnnnnnnnnnnnnnnnnnnnnnnnnnnnnnnnnnnnnnnnnnnnnnnnnnnnnnnnnnnnnnnnnnnnnnnnnnnnnnnnnnnnnnnnnnnnnnnnnnnnnnnnnnnnnnnnnnnnnnnnnnnnnnnnnnnnnnnnnnnnnnnnnnnnnnnnnnnnnnnnnnnnnnnnnnnnnnnnnnnnnnnnnnnnnnnnnnnnnnnnnnnnnnnnnnnnnnnnnnnnnnnnnnnnnnnnnnnnnnnnnnnnnnnnnnnnnnnnnnnnnnnnnnnnnnnnnnnnnnnnnnnnnnnnnnnnnnnnnnnnnnnnnnnnnnnnnnnnnnnnnnnnnnnnnnnnnnnnnnnnnnnnnnnnnnnnnnnnnnnnnnnnnnnnnnnnnnnnnnnnnnnnnnnnnnnnnnnnnnnnnnnnnnnnnnnnnnnnnnnnnnnnnnnnnnnnnnnnnnnnnnnnnnnnnnnnnnnnnnnnnnnnnnnnnnnnnnnnnnnnnnnnnnnnnnnnnnnnnnnnnnnnnnnnnnnnnnnnnnnnnnnnnnnnnnnnnnnnnnnnnnnnnnnnnnnnnnnnnnnnnnnnnnnnnnnnnnnnnnnnnnnnnnnnnnnnnnnnnnnnnnnnnnnnnnnnnnnnnnnnnnnnnnnnnnnnnnnnnnnnnnnnnnnnnnnnnnnnnnnnnnnnnnnnnnnnnnnnnnnnnnnnnnnnnnnnnnnnnnnnnnnnnnnnnnnnnnnnnnnnnnnnnnnnnnnnnnnnnnnnnnnnnnnnnnnnnnnnnnnnnnnnnnnnnnnnnnnnnnnnnnnnnnnnnnnnnnnnnnnnnnnnnnnnnnnnnnnnnnnnnnnnnnnnnnnnnnnnnnnnnnnnnnnnnnnnnnnnnnnnnnnnnnnnnnnnnnnnnnnnnnnnnnnnnnnnnnnnnnnnnnnnnnnnnnnnnnnnnnnnnnnnnnnnnnnnnnnnnnnnnnnnnnnnnnnnnnnnnnnnnnnnnnnnnnnnnnnnnnnnnnnnnnnnnnnnnnnnnnnnnnnnnnnnnnnnnnnnnnnnnnnnnnnnnnnnnnnnnnnnnnnnnnnnnnnnnnnnnnnnnnnnnnnnnnnnnnnnnnnnnnnnnnnnnnnnnnnnnnnnnnnnnnnnnnnnnnnnnnnnnnnnnnnnnnnnnnnnnnnnnnnnnnnnnnnnnnnnnnnnnnnnnnnnnnnnnnnnnnnnnnnnnnnnnnnnnnnnnnnnnnnnnnnnnnnnnnnnnnnnnnnnnnnnnnnnnnnnnnnnnnnnnnnnnnnnnnnnnnnnnnnnnnnnnnnnnnnnnnnnnnnnnnnnnnnnnnnnnnnnnnnnnnnnnnnnnnnnnnnnnnnnnnnnnnnnnnnnnnnnnnnnnnnnnnnnnnnnnnnnnnnnnnnnnnnnnnnnnnnnnnnnnnnnnnnnnnnnnnnnnnnnnnnnnnnnnnnnnnnnnnnnnnnnnnnnnnnnnnnnnnnnnnnnnnnnnnnnnnnnnnnnnnnnnnnnnnnnnnnnnnnnnnnnnnnnnnnnnnnnnnnnnnnnnnnnnnnnnnnnnnnnnnnnnnnnnnnnnnnnnnnnnnnnnnnnnnnnnnnnnnnnnnnnnnnnnnnnnnnnnnnnnnnnnnnnnnnnnnnnnnnnnnnnnnnnnnnnnnnnnnnnnnnnnnnnnnnnnnnnnnnnnnnnnnnnnnnnnnnnnnnnnnnnnnnnnnnnnnnnnnnnnnnnnnnnnnnnnnnnnnnnnnnnnnnnnnnnnnnnnnnnnnnnnnnnnnnnnnnnnnnnnnnnnnnnnnnnnnnnnnnnnnnnnnnnnnnnnnnnnnnnnnnnnnnnnnnnnnnnnnnnnnnnnnnnnnnnnnnnnnnnnnnnnnnnnnnnnnnnnnnnnnnnnnnnnnnnnnnnnnnnnnnnnnnnnnnnnnnnnnnnnnnnnnnnnnnnnnnnnnnnnnnnnnnnnnnnnnnnnnnnnnnnnnnnnnnnnnnnnnnnnnnnnnnnnnnnnnnnnnnnnnnnnnnnnnnnnnnnnnnnnnnnnnnnnnnnnnnnnnnnnnnnnnnnnnnnnnnnnnnnnnnnnnnnnnnnnnnnnnnnnnnnnnnnnnnnnnnnnnnnnnnnnnnnnnnnnnnnnnnnnnnnnnnnnnnnnnnnnnnnnnnnnnnnnnnnnnnnnnnnnnnnnnnnnnnnnnnnnnnnnnnnnnnnnnnnnnnnnnnnnnnnnnnnnnnnnnnnnnnnnnnnnnnnnnnnnnnnnnnnnnnnnnnnnnnnnnnnnnnnnnnnnnnnnnnnnnnnnnnnnnnnnnnnnnnnnnnnnnnnnnnnnnnnnnnnnnnnnnnnnnnnnnnnnnnnnnnnnnnnnnnnnnnnnnnnnnnnnnnnnnnnnnnnnnnnnnnnnnnnnnnnnnnnnnnnnnnnnnnnnnnnnnnnnnnnnnnnnnnnnnnnnnnnnnnnnnnnnnnnnnnnnnnnnnnnnnnnnnnnnnnnnnnnnnnnnnnnnnnnnnnnnnnnnnnnnnnnnnnnnnnnnnnnnnnnnnnnnnnnnnnnnnnnnnnnnnnnnnnnnnnnnnnnnnnnnnnnnnnnnnnnnnnnnnnnnnnnnnnnnnnnnnnnnnnnnnnnnnnnnnnnnnnnnnnnnnnnnnnnnnnnnnnnnnnnnnnnnnnnnnnnnnnnnnnnnnnnnnnnnnnnnnnnnnnnnnnnnnnnnnnnnnnnnnnnnnnnnnnnnnnnnnnnnnnnnnnnnnnnnnnnnnnnnnnnnnnnnnnnnnnnnnnnnnnnnnnnnnnnnnnnnnnnnnnnnnnnnnnnnnnnnnnnnnnnnnnnnnnnnnnnnnnnnnnnnnnnnnnnnnnnnnnnnnnnnnnnnnnnnnnnnnnnnnnnnnnnnnnnnnnnnnnnnnnnnnnnnnnnnnnnnnnnnnnnnnnnnnnnnnnnnnnnnnnnnnnnnnnnnnnnnnnnnnnnnnnnnnnnnnnnnnnnnnnnnnnnnnnnnnnnnnnnnnnnnnnnnnnnnnnnnnnnnnnnnnnnnnnnnnnnnnnnnnnnnnnnnnnnnnnnnnnnnnnnnnnnnnnnnnnnnnnnnnnnnnnnnnnnnnnnnnnnnnnnnnnnnnnnnnnnnnnnnnnnnnnnnnnnnnnnnnnnnnnnnnnnnnnnnnnnnnnnnnnnnnnnnnnnnnnnnnnnnnnnnnnnnnnnnnnnnnnnnnnnnnnnnnnnnnnnnnnnnnnnnnnnnnnnnnnnnnnnnnnnnnnnnnnnnnnnnnnnnnnnnnnnnnnnnnnnnnnnnnnnnnnnnnnnnnnnnnnnnnnnnnnnnnnnnnnnnnnnnnnnnnnnnnnnnnnnnnnnnnnnnnnnnnnnnnnnnnnnnnnnnnnnnnnnnnnnnnnnnnnnnnnnnnnnnnnnnnnnnnnnnnnnnnnnnnnnnnnnnnnnnnnnnnnnnnnnnnnnnnnnnnnnnnnnnnnnnnnnnnnnnnnnnnnnnnnnnnnnnnnnnnnnnnnnnnnnnnnnnnnnnnnnnnnnnnnnnnnnnnnnnnnnnnnnnnnnnnnnnnnnnnnnnnnnnnnnnnnnnnnnnnnnnnnnnnnnnnnnnnnnnnnnnnnnnnnnnnnnnnnnnnnnnnnnnnnnnnnnnnnnnnnnnnnnnnnnnnnnnnnnnnnnnnnnnnnnnnnnnnnnnnnnnnnnnnnnnnnnnnnnnnnnnnnnnnnnnnnnnnnnnnnnnnnnnnnnnnnnnnnnnnnnnnnnnnnnnnnnnnnnnnnnnnnnnnnnnnnnnnnnnnnnnnnnnnnnnnnnnnnnnnnnnnnnnnnnnnnnnnnnnnnnnnnnnnnnnnnnnnnnnnnnnnnnnnnnnnnnnnnnnnnnnnnnnnnnnnnnnnnnnnnnnnnnnnnnnnnnnnnnnnnnnnnnnnnnnnnnnnnnnnnnnnnnnnnnnnnnnnnnnnnnnnnnnnnnnnnnnnnnnnnnnnnnnnnnnnnnnnnnnnnnnnnnnnnnnnnnnnnnnnnnnnnnnnnnnnnnnnnnnnnnnnnnnnnnnnnnnnnnnnnnnnnnnnnnnnnnnnnnnnnnnnnnnnnnnnnnnnnnnnnnnnnnnnnnnnnnnnnnnnnnnnnnnnnnnnnnnnnnnnnnnnnnnnnnnnnnnnnnnnnnnnnnnnnnnnnnnnnnnnnnnnnnnnnnnnnnnnnnnnnnnnnnnnnnnnnnnnnnnnnnnnnnnnnnnnnnnnnnnnnnnnnnnnnnnnnnnnnnnnnnnnnnnnnnnnnnnnnnnnnnnnnnnnnnnnnnnnnnnnnnnnnnnnnnnnnnnnnnnnnnnnnnnnnnnnnnnnnnnnnnnnnnnnnnnnnnnnnnnnnnnnnnnnnnnnnnnnnnnnnnnnnnnnnnnnnnnnnnnnnnnnnnnnnnnnnnnnnnnnnnnnnnnnnnnnnnnnnnnnnnnnnnnnnnnnnnnnnnnnnnnnnnnnnnnnnnnnnnnnnnnnnnnnnnnnnnnnnnnnnnnnnnnnnnnnnnnnnnnnnnnnnnnnnnnnnnnnnnnnnnnnnnnnnnnnnnnnnnnnnnnnnnnnnnnnnnnnnnnnnnnnnnnnnnnnnnnnnnnnnnnnnnnnnnnnnnnnnnnnnnnnnnnnnnnnnnnnnnnnnnnnnnnnnnnnnnnnnnnnnnnnnnnnnnnnnnnnnnnnnnnnnnnnnnnnnnnnnnnnnnnnnnnnnnnnnnnnnnnnnnnnnnnnnnnnnnnnnnnnnnnnnnnnnnnnnnnnnnnnnnnnnnnnnnnnnnnnnnnnnnnnnnnnnnnnnnnnnnnnnnnnnnnnnnnnnnnnnnnnnnnnnnnnnnnnnnnnnnnnnnnnnnnnnnnnnnnnnnnnnnnnnnnnnnnnnnnnnnnnnnnnnnnnnnnnnnnnnnnnnnnnnnnnnnnnnnnnnnnnnnnnnnnnnnnnnnnnnnnnnnnnnnnnnnnnnnnnnnnnnnnnnnnnnnnnnnnnnnnnnnnnnnnnnnnnnnnnnnnnnnnnnnnnnnnnnnnnnnnnnnnnnnnnnnnnnnnnnnnnnnnnnnnnnnnnnnnnnnnnnnnnnnnnnnnnnnnnnnnnnnnnnnnnnnnnnnnnnnnnnnnnnnnnnnnnnnnnnnnnnnnnnnnnnnnnnnnnnnnnnnnnnnnnnnnnnnnnnnnnnnnnnnnnnnnnnnnnnnnnnnnnnnnnnnnnnnnnnnnnnnnnnnnnnnnnnnnnnnnnnnnnnnnnnnnnnnnnnnnnnnnnnnnnnnnnnnnnnnnnnnnnnnnnnnnnnnnnnnnnnnnnnnnnnnnnnnnnnnnnnnnnnnnnnnnnnnnnnnnnnnnnnnnnnnnnnnnnnnnnnnnnnnnnnnnnnnnnnnnnnnnnnnnnnnnnnnnnnnnnnnnnnnnnnnnnnnnnnnnnnnnnnnnnnnnnnnnnnnnnnnnnnnnnnnnnnnnnnnnnnnnnnnnnnnnnnnnnnnnnnnnnnnnnnnnnnnnnnnnnnnnnnnnnnnnnnnnnnnnnnnnnnnnnnnnnnnnnnnnnnnnnnnnnnnnnnnnnnnnnnnnnnnnnnnnnnnnnnnnnnnnnnnnnnnnnnnnnnnnnnnnnnnnnnnnnnnnnnnnnnnnnnnnnnnnnnnnnnnnnnnnnnnnnnnnnnnnnnnnnnnnnnnnnnnnnnnnnnnnnnnnnnnnnnnnnnnnnnnnnnnnnnnnnnnnnnnnnnnnnnnnnnnnnnnnnnnnnnnnnnnnnnnnnnnnnnnnnnnnnnnnnnnnnnnnnnnnnnnnnnnnnnnnnnnnnnnnnnnnnnnnnnnnnnnnnnnnnnnnnnnnnnnnnnnnnnnnnnnnnnnnnnnnnnnnnnnnnnnnnnnnnnnnnnnnnnnnnnnnnnnnnnnnnnnnnnnnnnnnnnnnnnnnnnnnnnnnnnnnnnnnnnnnnnnnnnnnnnnnnnnnnnnnnnnnnnnnnnnnnnnnnnnnnnnnnnnnnnnnnnnnnnnnnnnnnnnnnnnnnnnnnnnnnnnnnnnnnnnnnnnnnnnnnnnnnnnnnnnnnnnnnnnnnnnnnnnnnnnnnnnnnnnnnnnnnnnnnnnnnnnnnnnnnnnnnnnnnnnnnnnnnnnnnnnnnnnnnnnnnnnnnnnnnnnnnnnnnnnnnnnnnnnnnnnnnnnnnnnnnnnnnnnnnnnnnnnnnnnnnnnnnnnnnnnnnnnnnnnnnnnnnnnnnnnnnnnnnnnnnnnnnnnnnnnnnnnnnnnnnnnnnnnnnnnnnnnnnnnnnnnnnnnnnnnnnnnnnnnnnnnnnnnnnnnnnnnnnnnnnnnnnnnnnnnnnnnnnnnnnnnnnnnnnnnnnnnnnnnnnnnnnnnnnnnnnnnnnnnnnnnnnnnnnnnnnnnnnnnnnnnnnnnnnnnnnnnnnnnnnnnnnnnnnnnnnnnnnnnnnnnnnnnnnnnnnnnnnnnnnnnnnnnnnnnnnnnnnnnnnnnnnnnnnnnnnnnnnnnnnnnnnnnnnnnnnnnnnnnnnnnnnnnnnnnnnnnnnnnnnnnnnnnnnnnnnnnnnnnnnnnnnnnnnnnnnnnnnnnnnnnnnnnnnnnnnnnnnnnnnnnnnnnnnnnnnnnnnnnnnnnnnnnnnnnnnnnnnnnnnnnnnnnnnnnnnnnnnnnnnnnnnnnnnnnnnnnnnnnnnnnnnnnnnnnnnnnnnnnnnnnnnnnnnnnnnnnnnnnnnnnnnnnnnnnnnnnnnnnnnnnnnnnnnnnnnnnnnnnnnnnnnnnnnnnnnnnnnnnnnnnnnnnnnnnnnnnnnnnnnnnnnnnnnnnnnnnnnnnnnnnnnnnnnnnnnnnnnnnnnnnnnnnnnnnnnnnnnnnnnnnnnnnnnnnnnnnnnnnnnnnnnnnnnnnnnnnnnnnnnnnnnnnnnnnnnnnnnnnnnnnnnnnnnnnnnnnnnnnnnnnnnnnnnnnnnnnnnnnnnnnnnnnnnnnnnnnnnnnnnnnnnnnnnnnnnnnnnnnnnnnnnnnnnnnnnnnnnnnnnnnnnnnnnnnnnnnnnnnnnnnnnnnnnnnnnnnnnnnnnnnnnnnnnnnnnnnnnnnnnnnnnnnnnnnnnnnnnnnnnnnnnnnnnnnnnnnnnnnnnnnnnnnnnnnnnnnnnnnnnnnnnnnnnnnnnnnnnnnnnnnnnnnnnnnnnnnnnnnnnnnnnnnnnnnnnnnnnnnnnnnnnnnnnnnnnnnnnnnnnnnnnnnnnnnnnnnnnnnnnnnnnnnnnnnnnnnnnnnnnnnnnnnnnnnnnnnnnnnnnnnnnnnnnnnnnnnnnnnnnnnnnnnnnnnnnnnnnnnnnnnnnnnnnnnnnnnnnnnnnnnnnnnnnnnnnnnnnnnnnnnnnnnnnnnnnnnnnnnnnnnnnnnnnnnnnnnnnnnnnnnnnnnnnnnnnnnnnnnnnnnnnnnnnnnnnnnnnnnnnnnnnnnnnnnnnnnnnnnnnnnnnnnnnnnnnnnnnnnnnnnnnnnnnnnnnnnnnnnnnnnnnnnnnnnnnnnnnnnnnnnnnnnnnnnnnnnnnnnnnnnnnnnnnnnnnnnnnnnnnnnnnnnnnnnnnnnnnnnnnnnnnnnnnnnnnnnnnnnnnnnnnnnnnnnnnnnnnnnnnnnnnnnnnnnnnnnnnnnnnnnnnnnnnnnnnnnnnnnnnnnnnnnnnnnnnnnnnnnnnnnnnnnnnnnnnnnnnnnnnnnnnnnnnnnnnnnnnnnnnnnnnnnnnnnnnnnnnnnnnnnnnnnnnnnnnnnnnnnnnnnnnnnnnnnnnnnnnnnnnnnnnnnnnnnnnnnnnnnnnnnnnnnnnnnnnnnnnnnnnnnnnnnnnnnnnnnnnnnnnnnnnnnnnnnnnnnnnnnnnnnnnnnnnnnnnnnnnnnnnnnnnnnnnnnnnnnnnnnnnnnnnnnnnnnnnnnnnnnnnnnnnnnnnnnnnnnnnnnnnnnnnnnnnnnnnnnnnnnnnnnnnnnnnnnnnnnnnnnnnnnnnnnnnnnnnnnnnnnnnnnnnnnnnnnnnnnnnnnnnnnnnnnnnnnnnnnnnnnnnnnnnnnnnnnnnnnnnnnnnnnnnnnnnnnnnnnnnnnnnnnnnnnnnnnnnnnnnnnnnnnnnnnnnnnnnnnnnnnnnnnnnnnnnnnnnnnnnnnnnnnnnnnnnnnnnnnnnnnnnnnnnnnnnnnnnnnnnnnnnnnnnnnnnnnnnnnnnnnnnnnnnnnnnnnnnnnnnnnnnnnnnnnnnnnnnnnnnnnnnnnnnnnnnnnnnnnnnnnnnnnnnnnnnnnnnnnnnnnnnnnnnnnnnnnnnnnnnnnnnnnnnnnnnnnnnnnnnnnnnnnnnnnnnnnnnnnnnnnnnnnnnnnnnnnnnnnnnnnnnnnnnnnnnnnnnnnnnnnnnnnnnnnnnnnnnnnnnnnnnnnnnnnnnnnnnnnnnnnnnnnnnnnnnnnnnnnnnnnnnnnnnnnnnnnnnnnnnnnnnnnnnnnnnnnnnnnnnnnnnnnnnnnnnnnnnnnnnnnnnnnnnnnnnnnnnnnnnnnnnnnnnnnnnnnnnnnnnnnnnnnnnnnnnnnnnnnnnnnnnnnnnnnnnnnnnnnnnnnnnnnnnnnnnnnnnnnnnnnnnnnnnnnnnnnnnnnnnnnnnnnnnnnnnnnnnnnnnnnnnnnnnnnnnnnnnnnnnnnnnnnnnnnnnnnnnnnnnnnnnnnnnnnnnnnnnnnnnnnnnnnnnnnnnnnnnnnnnnnnnnnnnnnnnnnnnnnnnnnnnnnnnnnnnnnnnnnnnnnnnnnnnnnnnnnnnnnnnnnnnnnnnnnnnnnnnnnnnnnnnnnnnnnnnnnnnnnnnnnnnnnnnnnnnnnnnnnnnnnnnnnnnnnnnnnnnnnnnnnnnnnnnnnnnnnnnnnnnnnnnnnnnnnnnnnnnnnnnnnnnnnnnnnnnnnnnnnnnnnnnnnnnnnnnnnnnnnnnnnnnnnnnnnnnnnnnnnnnnnnnnnnnnnnnnnnnnnnnnnnnnnnnnnnnnnnnnnnnnnnnnnnnnnnnnnnnnnnnnnnnnnnnnnnnnnnnnnnnnnnnnnnnnnnnnnnnnnnnnnnnnnnnnnnnnnnnnnnnnnnnnnnnnnnnnnnnnnnnnnnnnnnnnnnnnnnnnnnnnnnnnnnnnnnnnnnnnnnnnnnnnnnnnnnnnnnnnnnnnnnnnnnnnnnnnnnnnnnnnnnnnnnnnnnnnnnnnnnnnnnnnnnnnnnnnnnnnnnnnnnnnnnnnnnnnnnnnnnnnnnnnnnnnnnnnnnnnnnnnnnnnnnnnnnnnnnnnnnnnnnnnnnnnnnnnnnnnnnnnnnnnnnnnnnnnnnnnnnnnnnnnnnnnnnnnnnnnnnnnnnnnnnnnnnnnnnnnnnnnnnnnnnnnnnnnnnnnnnnnnnnnnnnnnnnnnnnnnnnnnnnnnnnnnnnnnnnnnnnnnnnnnnnnnnnnnnnnnnnnnnnnnnnnnnnnnnnnnnnnnnnnnnnnnnnnnnnnnnnnnnnnnnnnnnnnnnnnnnnnnnnnnnnnnnnnnnnnnnnnnnnnnnnnnnnnnnnnnnnnnnnnnnnnnnnnnnnnnnnnnnnnnnnnnnnnnnnnnnnnnnnnnnnnnnnnnnnnnnnnnnnnnnnnnnnnnnnnnnnnnnnnnnnnnnnnnnnnnnnnnnnnnnnnnnnnnnnnnnnnnnnnnnnnnnnnnnnnnnnnnnnnnnnnnnnnnnnnnnnnnnnnnnnnnnnnnnnnnnnnnnnnnnnnnnnnnnnnnnnnnnnnnnnnnnnnnnnnnnnnnnnnnnnnnnnnnnnnnnnnnnnnnnnnnnnnnnnnnnnnnnnnnnnnnnnnnnnnnnnnnnnnnnnnnnnnnnnnnnnnnnnnnnnnnnnnnnnnnnnnnnnnnnnnnnnnnnnnnnnnnnnnnnnnnnnnnnnnnnnnnnnnnnnnnnnnnnnnnnnnnnnnnnnnnnnnnnnnnnnnnnnnnnnnnnnnnnnnnnnnnnnnnnnnnnnnnnnnnnnnnnnnnnnnnnnnnnnnnnnnnnnnnnnnnnnnnnnnnnnnnnnnnnnnnnnnnnnnnnnnnnnnnnnnnnnnnnnnnnnnnnnnnnnnnnnnnnnnnnnnnnnnnnnnnnnnnnnnnnnnnnnnnnnnnnnnnnnnnnnnnnnnnnnnnnnnnnnnnnnnnnnnnnnnnnnnnnnnnnnnnnnnnnnnnnnnnnnnnnnnnnnnnnnnnnnnnnnnnnnnnnnnnnnnnnnnnnnnnnnnnnnnnnnnnnnnnnnnnnnnnnnnnnnnnnnnnnnnnnnnnnnnnnnnnnnnnnnnnnnnnnnnnnnnnnnnnnnnnnnnnnnnnnnnnnnnnnnnnnnnnnnnnnnnnnnnnnnnnnnnnnnnnnnnnnnnnnnnnnnnnnnnnnnnnnnnnnnnnnnnnnnnnnnnnnnnnnnnnnnnnnnnnnnnnnnnnnnnnnnnnnnnnnnnnnnnnnnnnnnnnnnnnnnnnnnnnnnnnnnnnnnnnnnnnnnnnnnnnnnnnnnnnnnnnnnnnnnnnnnnnnnnnnnnnnnnnnnnnnnnnnnnnnnnnnnnnnnnnnnnnnnnnnnnnnnnnnnnnnnnnnnnnnnnnnnnnnnnnnnnnnnnnnnnnnnnnnnnnnnnnnnnnnnnnnnnnnnnnnnnnnnnnnnnnnnnnnnnnnnnnnnnnnnnnnnnnnnnnnnnnnnnnnnnnnnnnnnnnnnnnnnnnnnnnnnnnnnnnnnnnnnnnnnnnnnnnnnnnnnnnnnnnnnnnnnnnnnnnnnnnnnnnnnnnnnnnnnnnnnnnnnnnnnnnnntttcacaagttgaatccgctcaggtgaactcaaaactaatcgagaacggtcacgcttggtaaattggagtgagtctcctttcggaaccgcacgaaccaattctccctgctcgtttaatatgctacgcgaaccatcggacataaaccgcacagtacagaggtactcgttggtgcgagaataatacgccagatcgtaaccgaatggtggaactccaccgagccaccacccaccttcggcgcgagtcaataatccgcgtatcgttactttcgacaggtctttcaactcttgccgggcttgccattgcttgaccggacgcagtaaatcgtcggtatcgtcaccgttgaatccctccgacacatatatgatctcgataccacgtgttttcagttgatgccggtagtatcccgcctcgtcattatcgactcttccaaaccgctttatatcgtacacgaggacctgcttgaacggacacgatttcagtttcgcgtccgcgatcaatttcaagaatgctgttcgtccatcggtcgatgctccgctaatcgcatcgtcggtgtagaagttcaatatctcaatcccatgattgagagcgtaaccttcgatggtgcggcgttgatctccgatggattgttcctgccgatcggtggaacgtctcaagtatcccaccgccggatgatagttgttattactcagaaccattatcgtactcctccagttgaatcgttattgagtgctggaagggtgcaatcaaggggtgtcgaagtcaaggcggggtcgggcgctccggctgccggaggattgcgtgcgcctgcattagactgtcgctgtaacgctgtagacaatgaccattttgccaacactcgaaacgcgagatgctgacgttccatttcctcttcgttcggagtgcgatacatcgcaatgagttttatctcggtctgttgtattccgtgtgcagttaatgtttttgaatttttcattacctttttccgatcaatcaatactgcactctattaaggcaaccggcgtgccagttttttttatgacagaattgatgtaatcagaaacggtaagtagcgaggaaatcaagaggaggtattactgcggaaaacaaaacgagttatccaccgcttaaaataggcggtcgcaaagccaagccctgtctgacgaccgttcaaaatgagcgctgaattttggtaaaaacgttcattttcggcggtcgttctgtaatcagtaacacttcatagcggtgaaaaaaatatccaccgcctaaaataagcggtctctaactcaatgcctgcttgacagtgcctaaaatgagcggtggataaacccctaaaaacgagcaaaataggcgctccggttcatagcgggttatgatattcctcacattaacgactcccggaaaccagcaccattagcatcttccagtacttacaacattccggacaatcttggcacgatgattgcgtttagtcgtttcggacacttgcgatgaatcaattcttacgtcgcagacaaatagggaaatcgaaatgtgctggtgcaatggagtggacgaaaagtttgaacagactaagcgactgatccaaatccgcgatatggctgcggagcagattcgtgaattggaatcaattcgtcggacccgcgacctcgtccttgcggaacggttacgactggaacgtctgcaacgcgagcatgatcgtattcaaaccgccatcacagaaattaaaatggaaagcagtaaaaaatgagtctatccaattctcacatatctgaagataccgatgaaaaggaacttgctccgtcgcggatcgggcagggtgtttcgaatgagtgagctaaaaccgaatgtgcaattgacggcaacgatttgtatcgaattgacgccggaggaagcagatgcattgctactgattctgaatgcgtaccgcgaacaactgccgttaccagtcgatgacgatttgtaccgcgaactgatccgaaaattgggaactattcatgaagcaaggcaaaatcatgcgtgaccattgtgtcgaattattgcagcattatttcttctcgcgcaccgacaaagtggcgtttcgcaatggctctggcaaaccgaatccggcgctcgccggtgagttgctccccgcgcttctggcggcacatgttcgcggtaaggaacttccgaaagtaactatcgaatcgatccacagccgggggacaacgaaagttactggacactttcgcattggttcctacacaccaaatgccgaaggattaacgaaatggctttgcatcgatttcgatggcggaccggaacatcccaatggactggtcgatcccaaacaagcagtattattgtcacagcgatgcgcaaacgattttgggattccttcttacatcgaacgctcgggtggtggtcaagggtggcacctgtgggttttattcgaaccaatggttccggcatttatggcaagacaactgggtctggcgctttacccggaagatgcacgactcgctaacggcgaatctgccgatgctaaagtgaatcgcggcatcgaggtatttccgaaacaagcaacaatcaaacccgaaggctatggcaatttgctatggctcccatggtggcatcaagcagcgcctggtggtaacgaattttatatcgcatccatgttgggaaaactcgatccatttctaccggaacaattcgataccgtttccccgaaacagttggaacagacattaacggcacaccatcgcaattcaccagaattggcacccacccgtcggaacaccgcaacgacaccgtcgccacacccgacaaagaccaccacatcggaatgggacgaatggcgaactactgcactagagaaactcacactgaccgatgtttatggtgatttattgactggcagtcaatccggtgcggaatggttggaatgccgcgacccggcttcccccaccggcgaccgcaatccatcggcgggagtggcgaccggcaccggtactatcgagcgtggatcgtttcattcctttctcaccggtgaaacgatctcggtcttcgatttccttattcggattggtaaagcgaaacatttccgcgattcctgccaatggatttcccggcaaacaggtataccgctaccaacgcggcaagcgaccacagaacctgcaaatgatttgccggaaattgtcgtcaacaaccggcaactttctgtgatcttgtccgatgcttgggacgcactcattgctgcgaatcaaccaccgcgcgtttttcggcgaacgaatcacctcatccgcatcaaaatcaatactaccgaagacaaagcttatccacaaatcctcgatgatgtcgatatcttcggtctgctattccggtgtgcccgttgggttcgtatgaccgaaaccggaatctccgacagccaaccaccgcacgacattgcgcgcgacattacgcgggaaatcgatgagcgcattccgtggttcgacgatattgtccagaccccggtctttgccgccaatggtattttactcaatacccccggttattatccggaggaacatctctatgttcacctcccggacaatctcaccggaattgctgtgccatcgcatccctctccgaaagaaattaaatcggcgcgcgattatttactggatgagttactggtcgattttccgtttgttactgacagcgaccgcgcgcatgcggtagcggcattgttccaaccattcatccgacccttgatacaaggttgttcgccactccatttgatcgaatcgccggtgcccggttcgggtaaagggctgctttgtaacattatttccctcattgccaccggcagtattaccggtgcccgcacaatacctaatgacgaagacgagttccgcaaagcgatcactgccgaattgctgaaagacgattccataatcttactcgataatattaacgagcagcgctcactcaacagtaccaatctggcaacagttttgacctcaacggtttggtctgaccgcttactaggggcaaccactaaaatatcgattcgcaatcatgcactctggcttatgaccggcaacaatctgaagatgtcgctggatttaatccggcggatggtgcgctgccggatcgatcctcacctcgagcaaccgtggctgagggagaaatttaaacatgccgatttgccgctatgggtacgcaaacagcgacgcgaattggtgcacgcaatcctagtactcattcaggcatgggtcgatgcgggcatgccgccctataccaaaccgctcggttcgttcgagcattggtcgcaaatgatcggtggcattctcgatgtggttgggatacccggttttctcggtaatctgcagtcgcaatacgaatctgccgatcccgaccatgcgatctggcgagaatttgtctcggcatggtgggaaaagtaccgggaaaaaccagtcaagatttccgagttgaatgaattctgcgaaacgaatgaattgctcgctgccttgcgcagcgacggtacgacccgctcgcaacagaccaagctgggacatgccctgcgcagaatggtcgaccgcaacttcgccggttaccgcatccggcaggcgaccgaaggggtgagtcagagccgctacaatttttatttcctcacgccggagaatgcatgaaccagcgcactcaaccgtttgtgcggcagaccttgaacgcaggtaaatgcttgtcattccgtcaaggtctgcagatgtatgcagcaaggtctgcacaccggaatccttactggatgcgcttttccggtcgtatgcagacctcagcagacctcgattgtacccctcctgcgagcgtgcgtgcctgtgcccgcgcgggtgagaacaggttatacgataaggtgtgcagaggtctgctcgccatcgcaacgtccgattcctacagcgaatgcgagtacagacctcaggttataaggtctgaatcaggtacgaaaaggtctgaagagaataacaaaaagaatttcattcaccaccatgattcgaatggaaaccggtaatgaagaaatccaataatgacagtacttccagtaaaaagcaccgcgtcaaggcgcgctcgctaactgcgctggttccagatacgcaagaacgctcaggtgttacaggtactctgaatggtaataccgtctgtggtgtcgtcacgaagaaaggaactcaatgccgacaaccagcacaggcgaatggcaggtgccggtttcatggtggcaaatacgaaggcgcgatcatggcgcgtccgggaaatcgcaatgctgttattcatggtgcgtatttaccggagctacaggatgagcgcgaaaagaaagcgttcgatttgttccttgccgatttgtacgaggtcttccccgatctgaataaggcgagcgacctgcggcatgcgcaacttgccgcgattacctatatccgtttgctgcgtgcgttgtggggcgatgcttccagttcgactatcgacgatctatcacgcgcgttcacgcggcaccttgcggcaatccgtgtaaaccgtgaccaacgggtggttgatggcgagggtgcggcaggtccgaaatcacctgccgagtatgcggtcgagattattcagcaagtacggatgtactcgaaaggcggcaaagttccagtgccaatcgatccggctctgatcggtttaggtccatcggcggagatactacccgatgaatagtaggaacatgccggaaaattttcgcaaaccatcgcagagggtcgcagtgtcggtgcgaaaacacaagagttacaacgacgcagtgccgaactcaatcgcagagtcactattctacgggcattgggagctggtgagaacctggcagtgtcgcgggtgttagtctgaacatggtctgtgcaatgacaggtagagaaagccaagagttaggcgaatttccgaatcagtgtctcggaaattctggtgcgcaccacaggtgtgtgttggatcatgttctgacgtcattccgcctaactatcgaagaaaccaaacgtatggaaaaatgctgcacatgttcttccgatctgttaggaccgttgtcgtcaccgcatgtcgagttgggtgcgagtgcgcaggagaaagtcgtgttaggtgattcatttatgacttttttcaacacccacacccatacaggcaatctcggttctccgacgtcaccaccgatcgaaccaatgagcgactcgctgttatcgcaggtcgctaagacggagtgattcattgtcttgttgtcgctttagacaatggtgtaataaacaccacgtccttttccgtgcggtatcagttgtccgctacgaacgagggcttccaaatgctttttgatcgtgttgcggttgaaccggtaatggctgacaacatccgacatcgtaatacgaccacgctctttgactaggcggataattgcttcgggaatcggtaacgactgttgctcgcgttgcgattcgacccgctcgagtaaacgatccttttgccgcttgagtgtgagcaggaagaactcattccaagcgggatcgcagaggtctaattgggtctttcgtagcgccagataatagtcctgcttttgcagttcaatttgttgttcgagtgaactgtactggacatagtcgtatccggcacgcaacaacaataggttggtaagcacgcgcgagacgcgtccattgccatcttgaaagggatgaatggcgagaaaacgaaccgtgaactcggagattgtcaataacgggtgttccgattctgcccttaagcgttgtccgatatcggcaattagttcgcgcatcaaatgcggagtttccaacggtgaagatgtttcgaaaatcacaccgacttcgtgaccggtttcgtcgaatgccgagacatggttgggatgctgtttgtattcgccgagatgccactgatccttgctggaatgcgcaagcaaaattttatgcaattgcttcacgtggttttcggtcaagtcgatttcagcaaacgactcggttatcaatcgcatcgcatcagcgtatccggcgacttcttcttcgtcacggttgcggaaagaatgaatatcgatgccgcgcaggagcatttccacttctgaattggaaagttttgccccttcgattcgcgtcgaagaaccaatcgattcgatggttgcaaacatccggagggttcgcagcgcatcggtcgataatgaagaaactccgcgccagtaacccttgaactcatcgatttcagcgatgagtcggacaatctggggagtgagtgtgatagacatgggtaatccaatttgatacacaattatatccaattatacccaataagtaccgcgactgcaaatttaatgggtctatatgggtaacaatgggtatagcaataatgtaggattttttatgtttgagcatctcggcaccgatttagcattcgataatgatggcgaccttgtcgtttcggcgactggagattttgccctcgtaaccggacgcgactgtctgctccacgatctcgccgatgcattgcgcaccctaccgggagaactatttccgcatcctgaatacggttgcggattgcttggtatgctaggatgcaacgacactccgctcaaccgggcactggcacagcgctatatcacacagaccatcgagcgcgatccccgcgttgttgcctcgacgattcgggtggaagcgatctcgtttgaaagtattgagaaatcgtttcgggcaagttttcaagcggtcggtgacgaagacacccatacactcgtttggggttatggaataaagagtatcgatgatttgaaacggaatgcaacaaagtgaaatcgtacactgacattcgcgatgaattgattgaacgggttgcaagtaaaacaccattcaccaatttctcgacctcgagcggaatccgcaatctgctggagattttcgcgtatgtcatcgcatcgctgtacaactttgtattcaaggtggcacaacagggctttctgatgagcgccaccggtgaatggctcgacctgcgcgcacgcgagtgcggagtcgaacggttgcccggcaataaagcgcaactctggatcacattcaatcggacggcatcagcaaatcccttgacgattccggcaggtaatattgtcaaaagccgagctgattcatccggtaatgaataccggttttcgacgatacaaccggcgacaattcctgcaaatgaatcattcgttcgggtgctggcggaagcggaagcgattggcactgcttacaacattggtagtggaacggttacgcgactggtgacatcgatctccggaattaccagtgtcatcaatgacgattttttactcgcaaatgggaaaacggtatcaaccctctatcgcgaggggagtgacatcgagactgatggtgcattgcgcaagcgtgcccaacttgcgtggcaggcaatcggtgtcggtggtaaccgtgccgcctacgagcaatgggcattgtcagtcccgggtgttcggtcggtacagatcctcgatgattttccctttggacccgggacggttggagttgtggtcttgggtgtcgatggcatgccatcatcgcaattgttgtcggatgtattgctctatctgcggcaacgtaaaccactcactagtgacgtacgggtcgtgggtcccagcaagcgcaccatcgacgtatcggtcaatgtatggcgcttctctgatgccgatcgtgaaaccatcgataatacagcgcgtcaagtgattcaaattcacactgacaaattgctgttgggtgagggattgttagttgcgcgcttgctgcaagcgattctgaatatcgatggcgtgtacaacgtccgattactcttgcctgcgcaggatctgctctgtggtcccactgaatttttggaactgggagcgcttactatcgagcatttcctcaagggacgcagttaccaggacactggtatcattatcgaaccagtcgagaccaccgatggcgaatccgttccggcactcaagcgggagaatttctactgatgagtgtgatcggcgatttcctctggatgctgttgcccggtatccgcaaacaaaaggacacagaaaatagtgctttgtacgggttactctcggcgattggagaagtgctcgacgatgcgaaaagcgatatccgcagaattcggttgtcatggtatgcgcaggtagtggagccggacgatggttattacgcattgccggaacgtaatagcgatctcgataccattgccctcggacgcgggactcgccgttatccggtagaatcgaatgagtcactggctcttcggctcaccgattggccgaatacctgccggtggattggcaccaagccgggattaaaggcattaattgaatcgcacggttttgtctgccgggagatcgtcgaaagttatgccgacccgcagggaatgattttgctgtctattaacgatcaaccgctggaagcggaaatcaatctgacgcatctcttttccgaagaggatgccggtaaaaccgactatgtcgaataccgccagaatcgggtctaccgtgccagtgagctggtctggaatttctgctttacggtgagtattggcagcaatggactgccggaacaccggcgcgagcaattgcaacaagcgatatatgactttaaacccgcgcacacccaaacgcaaatattattcgtggactaagaaaagcaaatgaagaaactactatacttctccggtataaagccgaccatcgaagacctcgagtaccagcaagacgggattgaggaagcgctgtcgtccatgcaatccgatctggtgagtgatggtgtggtgcggggattgcttgtttccaagggaatccaagactacctctgcgcatccggtgtcgcttatatcagttgcaaacggattgaattaatagaaacgacatcctttcaatcgacagcgaatcgttatgtctttttacaatacacgacaatatcaagtcacgaagtatcgcactttctgactggcgacaaatacaacatctatggcgacgactcctttagtattgtatcacgcaccgacaacaccccgcaatccggtgaggtactgctcgcccacattgaaaccgatggttcggttaccgatctgcgggagccagtttcgctattgatcgatgaacggttgcatgcaccgaacaccgatacccatacaactgcttcggaatttcgcatcggaggtgccgatggacctgtcggccttaccgtggaaaatattctctcagtttatcccgagctaaggaatttattacgtaacggactgatcaacttccaagatggcaatggtgaccagttgctactcacccgcaagattccttcgcaaccaaacgcaccggtgctttcgctttcgaatgctcaactgaaactgtacccgaccagtcaacgatcaagtgaactatcgctggcactcgattcgtatcaagcggcatcaatagcgagtcagcaaatatcggcgcacttatcgtcgctgcaggaactgcgcgcgctggtcattgccaaacaaatcgcaggttatactttcgagcaactgcgcggcaataccgctttgcccggtggctcctttgattttgaagtgcgcaataccaagaatgacttgattcgcaacggtgtgttatcgaatatgcgcctaccgggaacggtttctctctcaagcggttcacaggcgatggttggcaacggcaccagtttcgatagttcctatatcggcaagcgaaccctaatcgatccgggggcgaatagttccccactcgaatttactatttcggcagtcactgatagcactcatgccacactttccactacggcaaccggcaatattgccaatgcagtgttttatttttccgatgtcccggagatcggttttggtggttcgattacaaccattaccggaatgctggctggcatcgatgcggttaaatccggcaaggagcaaaaccgttcgctggcgctccaacaacagacccactctaccaatctgatcggcgatagtgccgcagttatctcccaaccgcaaagcaaccagtatgtattattttttagttggacaaaaccgttactgttcgaccacgaagagatcgtgcaatatctcgttcgtgtctatgaattgttgcccaataccggatcgctaccggtcgatatatcagttgctgtgctcgaagcaaatcacaccgatgccatcgttcgtgtaaatgaatcaccaactaaacagcgccgccagatcgaaaccgacgatgcgaccacaacggttgggaatggctccactacgagtgaaatcatctataccggcactatgtcttttcaaccgaatcaacgaatcatcgtcggtaacgaaagcggaatagttcgcactgtcgatcccggcaccaagaccataacgctgttatcaccacttaccaatgctcccatctccggcaccacactcaccggtaagaaactactctatgaatccgatgtccgcaccgagtcgttctccatcgaagtaaacccgggacaacgattgctactgttcgttcggtcaatgtccgagtacaatgtcgtgagcaactggagcaatagtctcgccattaccgtcgatgcgctccagagtggcgatggcaagacggtagcacagcttgccgatgctgatcgcaaagcgatgacgaccatcaaacagatcgagcgtgagcaagtaacgcgtgatttatccgaacaggtctttactctccaacgcgccattgccgaagccccgactcaagagcaattagatgcgctggcggcagctatgccaacgggagcgaactaatggcagaccggatattgacattaagtggtcttcccgtgggcagaagcgcagtgttgtatgacctgctggcaagagtgcaacgcgatgggaaatggtgctcgctgccggtgcgggtagtgacagtggcaaccgatggcacactcaccatcaccggactgcgcgacagtcgctatgcattgctctttaccgctcctgcgctggtcgtgttttcgcgttatcgaatcgaagttggcgagcccggaaattatcgcacccgctatctcggcgatgcggtggagacacctttgttaacacaggtatcgtcagtggtagcgaataatgagattggtctgcaattcaagtggtcgctgcgcaacgattacggcgtcactcattatgaattgtatgccgagcgtcaagatgtcgatgcggctggtgtgccagtaattatcccgggacgtaatgcacgttccggtattcttcccgcagttcaaccggagacacagtacgaatgttacctcgttgcctgcggactgcgattgaaaagtaaaccttcacaccgcatttcagtgacaactccgcagtgcccaatagcggaaccaaatttaattattaatggcaattttgaacaaatggtctggtgaaaggataacctgacatggcaaatcaaatcacaatttcaacaactgaaaagttattcggcacccaatcgatggagattactaccgatagtgcgatggcttcattgctcaccgatccggataaaaccaattttgtaaatgtcaccggactctcggcagtcactgtctcgtgctatctctatatcaagacctacactgccggatacatcgtagcgcgcaccctgttttatgatgtgaatggtaatttgctcggtaaccatgactgggttttacaatcggcgattaatgccggattcacccgtttctaccagacctaccggttggatcaatctccggttccaaccggaacggttaagctgaaactgcaattcggtggtattcagaagtcgagtgcgaatccgaacttcgatctatttattgatggtgtgaaagcggagcagggggacaaactcactgccttctccgactatactctaaaggagaacgattcgctcgatctggtcggtgacggtgtcgtcttcaagaaggttgctggtgtcaataccgaccaccggatcacgagtgactctattgagtccgcagccgtgaccacaactaaactggcggatagtgcagtcgatgccaccaagctcgccaatggcgcagtcgataataccaaacttgcggataatgcggtcaccagtatcaaaattcaagacggtacgattacaaatgctaaagttgcagaaagcacccttactgaagaccggctaaacagcggcatggtcacgaaactttcgaaattgaagtcggatggtgatttccaaggtgacctcttcgcttccgatggcactaccaagctcattgattccgcttctggcaaggtaaccacagcactccagaccagtagtggcgcttccatcgacgaccggatcgaacaattctacaccgatatctataataaggatatcgcgattcccctgctcgataaagatgtaaccaaatccgcagtccatccgacttacttgacctaccgtcccggttttactaccggagatatcaatatcggtaacatcggcgatagttgggacagtatgttcgatctgacgcgcgccgataatggtgaggatttacttgatgcttccggcaatccgattaaggtggtcgcgctctggcagaaacagaataagaccaatgcgataactgccgggagtgatccgcacgggtcgggtcccggttggtcccgcaacgacggcgatggcagcaataactcgacatggatcgaactctcggtaataccggttgtcaacttcacgattgcttattcagtacggaaaaaattatcgcaactcgcaacccgcgatttggtcaccgttggtgtaatcaaagggggacaatccgatgccaatgttaccactgcgctgcaggaactcaagggtactccgaattggaacgatgcggttcccagtggtcgcaaattaatcgaacttaccaccaccaaagatggcgggataacctacgtcatcgccgatggcaaggtgaaagggacttcgattgccagcaatgaagtcggtaacactcaccttgttgataatgcggttactacccagaaaattgatgcgaatgcggtcactggaaataaaattgctagcggtgcggtggggaatacacagattgccaatgccgccatcaatgacaccaaacttgccgatggcgcggtaaccgctatcaaagtcgcgaatcaagccatcgatgcaagcaagctggcgagtagcgcagttactacggtaaagattgcaccgaatgccgtcgatggtagtaagctggcaagtgattcagtcgatactacccacctagtcaataatgcggttgatgcatcgaagctggcaagtaattctgtcactgccgggaaaattgctaattctgcggtcggtacagcgaatcttgccgatggcgcagtaatcgataccaaaatttccgatggtgcaataactaccaacaaactgaatgcgactgcactggcagcattcgatgcacataatttggtgcagaacccatcgttcgaatcgggagcatgggtctgatgagtttcttcgatacgacgaccgattactcggtatttggtggtagttcactgcgattggttggtgattctgcgccaccgaatgtcatcaccggacgcagcaatccgatcccggtgcacgggcgcgatgctatcgtcgtatccgcttacgtcttcgcccaggcaattatcaccggaaccgaattttcaggattactgacttcctatgataacaacggcaatgaactcagcaccatcgaatggttaaagcttactgccggtaatggacagtttatccggtattatttggtacaagacattagcaaactcccctataacacctcttcaatccggctctcgttcgcactttctgatccgtcaaataaacctgccggacaagtctatgtcgattgtgtgaagtgcgaatatggtaatcgggtcaccggttattcggagtccgtgttttacgaagagatctgcaaacacatcggtggatttggtgttccgacaatcggcacggcacagttagcgaatgattgtgtaacaagcgggcaactggtaaccgaccccgcctccctcggaaagttgaccggagaggcgttgcaatataatggtgcggcactgaatgccaatgtcccgctcaatgtgaataatggactaaatgcactcggaaaaaccggtattactcagatgatacaagtatcgaatccctggggcggaataattaacattgaaatcactaatggcattattacgagcatcgcatgagtgaatttgaacacacttccggtgaacatctcgaaccaccctattcctgccagtaccatctggctaaagtggagcagattgtacagcaactgcaggacttaaaagaatcgattcaaaccgtgcaaacggaagcgaaggaagaacgcaaggaagtccatgctgcattgaaggaattaaacgatgcgatcaaaggcaacggaaaggaagggctcgttgtgcagatggatcgcaatactaacttccggctcatgatgacgaagctgctctgggtattattcacgccactttacggtggattgatcgcactcgttataaatctatttctatccaaatcattgaggtgaatgatgagtattctcacagcaatccccattgtgggacaaattatcgataaagccgaaggcatcatcgacaagttagtgtcggataaagaccttgcggcgaaactgaatcacgacctgcagacgcagatgctcgcactcgattatggtgcgctggaaaaagagatcgatgccaaggcgaaggtactggtcgcagaggtacaagggcagagttggctgcagcgcaactggcgaccgctcttgatgttggtgtttacatacatcgttgctcacaactttgtgattgcaccgatctttggcattacctccgtgccggtgccggagcagatgtggacgttactcaatatcggaatcggtggctatatcgtcggacgcagtgctgagaaaattgcgacctcattaaagaaggatgactcaaaatgactctggacgacatcgaatttattcctgcggcaagaaccaacgcatattcccgaccaaggaatatcgtgattgacacggttgtcattcattatactgccaatggtagcattgaggatacgattgcgtggttccagaattccgcaaataaagtatcggcgcattatgtaatcggcacagacggacgcattgtccgaatggtgccggacgacaagcgcgcttatcatgctggtgtttccgaatggcagggtcgtccgagtgtcaatgccttttcgattggaatcgaactcgtcaactggggtccgctcaagctgcgcgatgaatcctttttcgcttggcctaatgattataccgaacgctatgatggcgatgagccggtattgatcggcaccgaatattggcagtcgttcccggagctacagcttgctgctcttgagcaactgctcgtgctcctccgcgaagagcacccaatccagtggctggtcggtcataatgaaatagcccccggacgcaagattgacccgggtcccgcgtttccatgggagcgctttcgacctaacgtttgaccctgtcaaccgttcgataatctctcctttcccaatctagttagctaacctacaagccgctacagtagcggctttaacggttattgccttgccttgacttcgcaagaccccgcgcttaaggtgttgccaacaagtaaatccaacgcaaggcattatcatgaaatacacaatacacaaccagaagttcggagtcgagatagagactgccggatgcgagcggaagcgaatcgccgaagcgatcaagactatcgtcaacgggcgagtcacccaagagttcggaacctttcaagcatcgctggtcacgcaacctgatggtcgcatctggcgagtccaaaacgatgcatcaataacaaccatccgcggtcacaagggttccgagattgtatcgccgattctgacctacgacgatatcccgacgctccaattaatcatcatcgcggttaagggaatcggctgtatcgcccatcggagttgctccgtgcatgttcatgtcgatgcgacaccgcataccgcacagtccttaaccaatctggcgaagatggtctatcgcaatgaggatttactcttccaagcgatcggcacctcaccggaacgcagagcacattacactaagccgatggagcaggagttcatcgaccggttgcttcagagtaaaccggatacgatgaccgatttgaaccgggcatggtatggacatgctaatcaaaacccgcaacactatgaccagagccgctatcgaggtcttaattacaacaatttgtaccgctcaatccacacgattgaattccggtatttccaagcctccttaaactcagaacgaattacttcctggattcaactggtgctcgcaatgtcggcaaaagccctcgacctcaaaaagacgactcactccaaaattgaaaccgacaatcccaagttcaacttccgggtcttcatggttgccggtctgggaatgaagggcaacgagttcaaaaccgcacgaaccatcctgcttaagaacctgccgggcaatagtgcatggcgatatggcaagccgcaaaagaatacggaggtcgccaatgtccaataaagcgacgattccctatttcgcgtatggagcgaatctcaatctcgacgatatggaatggcgttgcccggggcatctgcctcgctgcgtcgcctatatcgaaaactaccggcttgtctttcgcggggtggcatcgattgaaccagcaaaaggacatcgtgtttacggtgcgttgtatctgctcaccaaatccgacctcgacgcactagaccggtttgaaggatatccccggttgtatcaccgcaaaattttaccgctccgcaaatccggaaacaatcacaatacgaaagcgtgggtgtacataatgaatgccgaccgtaacggttactatcccccttccggtggatacctcgagacgatacttgacggttgccgtgactggtgtattcctgatttctatcgcaagcaaatcctcaacgttgcaaggaggcaacacaaatgatcaataagcacgaactcgtcaatgaaaatgcggtcttcgtcggcactgccgtcgagatcgtcgaacaactccggacgcagggatacttcgaacggtcgcttccgttccggcagtatctgcggcaactggtcgacaccatcgaaatcgcgggaggtcccaatctttacaaagggatcttcaatgaatcagagaaaatatccgacgaggagttggcggaacggtttatccgcgaactcattaacaacggtctattcaaggaagcgtgagcatctgctcactcaatcgtaatcatcaaatccaaatcaatcactcaacactctcttgaaaggagaacagcatgagtaccacaacaaccaaaaccaagaagcaaatcggcgaccgtgtcgttatcaccggtggctcccgcaagggcattcaaggaaacatcatcgcattgcagggattgaaagcgaccctgcgcaccgacgatggcgaagagattccggcaatgctcgcctggatcgataaaatcgaatcaactcaaccggcacaggaaaccgtagagacacccagcgaacccgtcgagacactggtcgtggagaccacttccgatacgacgaccgaaccacccgaaccgccacaaccgacagtatccgagccggttgctgaatcctcttcacccgaaactgagacagcaccgatagtgaagaagcgaggtcggaaacccaagccagatgccgcatcaacggcaacggtgcaatccgaaccggcagaaacgacagaatcggcaccgactacggaaactgcgacagtcgcaccggaggcaataccggtcgcaccgaagcggacacgcaagcccaaatccaacccggcaccggaaattgcccctgaatcgaacgtggcgcaaaacccctacgaacaaatgacagtagtcgagttgcagaagcttgccaaagagcgtgatatttcaattgctcggacaaaagccgactttgtccgcatcataaaggaaatggagcccgattgcgataccgaggcactcaagggtccggcactctttaacaaggtatccgaactgcacatctcgcggctccggtcgaagaaggatttggtggagttgctctcggtttaataaattttcacgatagtacaagcggatgctcacgacgggcatccgttttttttctgttcaaattttacttgtgtgattccgtattaccacatgctgagattcaacagtggccttcaacatatcaactacagatcgaagattgttggaatcgactgacgatgaatgtattaaatcagtaaatttctctgccctcaccaatgactcatcgatcaatatgtagccttggtataacttcacaaagcataataccgtctcactcgttagagtatccgtgtttatcaacacaccagattttttataggaatgcaccgtaattccaagacaattgagctgatttcggtatcgatgtacagaaacgatatcaacctcgagctgctttgcgatgtcctcgtattgtaatcgattatttttattatttaagcaaatatttacaaattctatcaaccgcctaccatgttcgatgttgctgaataatttttgccacttggttttcctcatcatgctctctttagtcgtaaaaaattctcactagttgatagttatcgtccaaaatgtcatgagtaccttgtggtttgggaaacttcgcgaagcttagttcgcgtgcttccattgattaacggtttcaagggtaaactgtccctaacggctttcatgaatacatttatcgataacaaactatcaactactctcaagctgcatgcggtggcttatctgcgtaagtcgacccgcgagatgcaggaaaactcgattttgaaccagcgcaaagcgattgacgcatttgccgaacatcataacattcacattctgaagtacttcatcgacgacggtatatccggtctaacgatgtcgaaacgggatgcttttaaggagttgattaacgagtacgtcattggcggaaaactgagttttagcatcatccttgtattggatgtaacgcggtggggtcgtttccaggatatcgacgaatcggcgcatttggagtttatttgccgtaagcacggtaaggaaatcatttatgttacggaagagttcaagaacgacaactcgatcatggactctttaattaaagcgttgaaacgagcgatggcggcggagtactcgaagaatttaagcgataaggtgttagccggatcgctgactatcgcgcggcaggggttccgggtcggtgcacctgcgccgtacggttttgaaaggatgcggctcgatcagcaaagaaatccagttggcattttgcacgatggtgagcggaaagcgattgccaatgagcgggttacgttggtgcccggtaatgcagaggaagtggagacgataaaacatatttttggtttatttaccagacgggggctacgggaaggaaacattgcaatcgaactgaatgagcggaaaataccttctcctgggggtggcgaatggacagagaatacaatacgagtgatgcttcgagatgagacgtacaccgggaccttacgatataaccgcacatcttcgcggctgcatggacctacccgcaagaatccgcgtgaccgctgggtattggttccacaggcgtttgaagcgattgtctcacccgacacatttctcgaagcgcagcagatatttcagaaacgacatccggtttggagcgatcaagatatcctacttcgtttgcaggaactattccagacgcacgggaagctcaccggtctgatcatcgagtcgacaccacaaatgccctccaccaatattctaaagaaacggttcggttcgctgttcaatgcttacaaattagtcggatatgtacctccctatgatatccggtttttcgaattgaaagagttggtgaaatccattgaggaacggttgtggcaggaagtatttgccgcattggtggaaatgggactcactgtggtcgaccacggcacacatctctgtttgaacgaccagttgaacattcaacttatggcatcaagtattcgcaacaacaatggcaaaaagcgttgggtgtatcgttttgaccggcaagtagacatcgatcttacgctcgcagttcggcttgccgacgatgcgggaaatatcctcgatttctattgtttcccatctatcgccatggaaaccgacaagttatttgtgtcatggtcgaatggtatctatctcgatgcataccgtttcgacaaaataatcgatgtgtacgatttattcggcgatagcggacatatcaataaggagaaaacctgcgatgaaatcggtacgtgatgtgattgaaattaaaatcgataagatcaaaattatcaatccccgacaacgcgatccggcaaaatttgaagaaaacgtcgaatcgattcggcgacagggattaaagcgtccaatcgtggtgaatacccgatatatccctgaacatagtaaatatgaattggtttgcgggcaaggtcgaattgaggcgtttcaaaaattgggacacacgacgattcctgccttgaccgtcgatgtcgaccgtgaaacggcgtatgtaatgtccatcgctgaaaatgctacacggatgacacccccgcccatttggttcgcgcaagtaattaaaggactcgcggacactgggatgccgattgaacaaatttccgttattcttgaccgtacaccggacaagatcaaggattatctcttattaatcgagcatggggacaaattactaatcgaggcggttgaacaaggaaaagtgagtgccagtgcggcatttatgatcgtaaaagagccgattcccgaattacaacggttgctaactgattgcgtcgaaaacaatgtattcgattattccgatgtaccggcggtgcgaaaattaattaagcaacgtcttcgttttcagcaggaaaataactcgaatcgatccggcaagaccccttatggcgaattatctatcgaaacattgcgtaaagagattcgacgaactctcgacaagcaagaaaacttcgttcgcaggtcgcgccgatacgagaaccaaatcatgattctgatagaagcattcactcgtttgaacaacgatcccgattgggtgtctttgctgcgaaatcaaaaattaacggattttccgaaactcaaagggaagcatttgcaggacctgtttgcaaacttttcaaaaagtgaggccgcatgaacaatatctcttttcgtaccggaacagtgaccttgccggtgaataatctgtatcccctgtttccgcgaaagcttacaggtcatttatgcacgacctatcgaaaaatcgtcagttcgattaaagagattggtttggtcgaaccactggtcgtcgtcgaaaaggaaggacgctactacattaaggacggtgtcttgcgttggacagcgctgaaagagttaaagatcgagtcggttgaatgtctaatcggcaccgacgatgatgtctatacttacaacaaacgggtcaatcccctgacggttagcgagacacatacgatgatcaataaagcgattcaagaaggggtcagtctggatcgaatcgccgctactctgaatgtcaaaaaagagtgggtgcgtaaaatggattcgatgctgatcggagtcgctccttccgttatcggtctattacgtcaacataatgtgtcgaggttgacttgtgaagagttgaaaaaagtgtcctatcatcggcaaatcgaaattgttgaactcttgaatgccgcgaacgacttttcgcgtcgttataccagaactttggtgctttccactccagaagatcaatggagtaaagcgcatccgacaaaaaccgtagggtcagaagcacaaagaaaagaactgacgggaaaactttaccaaatggaagatgagtttaaacgggctacaagtagttatcgggacaatgtattcgatttggttaaatttaccggatatgtacggaaggtaattgccgacttggcggtacgcgctttccttgaacagaattatcccgatatacaacttttttttgaaaaagtgattaacgatcatgaactggacgtttgatcatcggtagtgcgacaaagtttacgcatcgaagattgcaaaccgtcgttacaaagtgtcatacttaatctttcaagtagtacggaatgtaggattatgccccgagccgaagaaatactcacttttatcaaacttattggaattgttcaagtaagcgacttagtaaaacaggatatccaacgagatgttttagcccggttagtgaaggaaagcaaactgaagcgggttggccggggtctatactgcgtcgctgactaccaaccatgcatgcatgctgaatttattccggttgcactgactatacccaaggcgactatctctttgttgtctgcgctctggtatcacggtttattgacacaaatacccaacgaaatatggattactcttcctagtgaaatgcgcactcccaaaacggactttctccaattgcaggtgtcaagaacatcgcctgatattattaaggtgggacgcgaacaacagttaattgaggatactccggtgtacatctattcgttggaaaggacgatcgtcgattgtttcaaacatcggaaccgaattggtttggatatcgcaactgaggcattacgtaacggtatttatcaaaagaaagtcaatccacgcaccattatgaggattgcgaggctgttgcgtatggataaaattattaaaccgtacctgcaggtacgaaaaattcagaaaaacgcggagtcctgtgaaatcagcttgaactcaggtctgtaaaaaatgtcttgccctcgctttacctgtaattacattgtgtaggttagcgttttgccgcctccgatatttatatcaaatcttcgtttttctttgccctgaaagcaacctgacgagacctctctgagccgtaaccaatatcgtaactcctgatatttccttatcggcttccttaacgggtttttcctcaaccggtaatgtttgttatactaacacctgttagctatactctggtaaccgggtaacgaggcaaaaaatgagcgaaatccccttaaccgaccgacagtcggaattgttgcaatggatcacccaatatttccagaagcatggtcggactccgacgatgcaggaaattggcgaccatttttcgatcagtcgtccgaccgcattcaatatcgtcaagcccttgattaataaagggtatctgcggaaagtcggaagcggaccgtttagacggttggatatcatcgatgagaccggaaccatcttgaaacaacaaggggttcccgtagtcggaagagttgccgcaggtttgcccctgttggcgacagagaaccggattggatggatgcttgtggatgacgtttttgtgcgccggggggcaacctatgtgctcgtggttgaagggaagtcgatggtcggtgccggtatcctgtcaggggacaaagttatcgtccgaccgcaaaaaacagccgaaaaggggcagattgtcatagcgcggttcgatgacgaggtgacaattaagtatttccatacagtaaaaaacggtatggtcacgctcaaagcggcgaatcccgaccaccaggacattgtaaaaccggcatccgagtgttcgatacagggaattgttgtcggattgtgccgcgagtacccgatgaaataagtgtcagattttgacgttcaaacacattcattgatgagatgaagatgcagattacacaactcagtcgctacgattttcccgaggacatgattgccaactggcggaaactcgggatacagaccttacaaccaattcaagtgcaagcgatacagaagcataagctgttcgacggcaacagcatgatcgtctccgcgcccacttcctccggcaagacatttatcggtgagcttgccgccgtgtatcaagcaatcaacaaaaagaagacggcattcctagttccactgaaagccatcgcagaggaaaagttccagaccttccgtcagatgtattcgtcgtctggaatcaaggtggtgatctcgactcgtgatcataaggagtatgactcggacatcgagaatggtaaattcgatatcgcgattatcgtttatgagaagttctttcaattactcaactgcaataaaacgttcctcaataaattgggtctggtagtggtcgacgagttgcagatgctggcggacatcagtcgtggaccgacactggaaatgatcctgacccatcttcgcatgcaacgggagcaactcggtttccaactcgtaggactatcggcagttctgggcaaccatcggttggtcaatgagtggctggatatcgatttgttgcattacgagcgccgcccagtggagctgcgaatcggttatctctatcaaggtgtgtttcattaccgtacgatgaacagtccaggcaccggtgacgaaacgattctcaaacgaccaccggaggatcgggctgaagtattatatgcggcggtgacaaaattcagtgaagatggtgaacagtcgttactttttttgaaagacaaaaattcggtgcgcggtgtggcgaaggcgcttatacaatggatcaatgcgccgagtgcgaccgatgcaatcgcggaattggagactttggaagagactcattcccgcgacgaattaatggaactgttacaacacggtatcgcattgcaccatgccgatctgaccatcgaggaacgagagctggtggaacgccactaccgtaatcgcagtatcctggtgttagtctcaacatctactttggcaatgggtgtcaatcttcccacccgaaatgtgttcattgaattgcagcaatggcgctatgatccaaagtttaaaaaattggataccgtcgatttatccaaaggtgagttcgagaatatgggcggtcgtgccggacgctaccaattagaggatgaattcggtcgtgcgattgcgttggcgcattcgatagtggagcgggaacagatacgccgattttatttggaaggggaattggaggaagtcaaacccaatctctggcgttcttcgatggcgacgacagtgttgggtgttgtctcgttactcggtggtggttccaccgaacagataaaatcgtatctgcgcaattcattgagttggcatgtccatgaaaaagatgcgcaacaacaggaggagttgaaccaagagttggattgcggcctgaattattgtttgcgcgcgggtgtggtttccggtacgactggtgagaaactgactcttaccgagtttggaaccacggtagtcagcatgggcatccgggttgaaacggctcacgttattaagcaatggttatcgcaacgggacgatcaagctatttcgtgcatggaggcggtgttatttgcgctattgactgccgatggtcaagaaggatatgtcaatttctccacttccgaataccattaccatggttacgaatatacgatgcgagtaacagaacagattggctcgaatggcatggcaatcttcgattcagtttgtagtaacaacatcgatcagtataaccgggcaaaaacatgtaaaagcgctttactgttgaacgattacatcggtagttctaccaataaggaattggagaaaaggtatcaaatttacttgggtgcaattcgccgtatggcggaacaaattgcatgggtactatccagtgctgcagaactcgcaaaaacattgggttatcccaattcctggcgtaaatcactggatcaaatcgcgatgcaagtgcaatacggtgttccaaatgcgggtatcgcactcgcacagttgcaaatcccgcgactcggacgcgaacggatacgtaaacttgtcgctgccggacttaccgaaccgcaacaaatcttggaagcgggtgctgccgtgttagccaagtacgtgacaaaaccggtcgcaacttcgttacttgcctggtgcaagcaccgcactcaagcggttgaattggaaaccgcgctaagcgacactaccgatacaaatacctcttcggtgtcgatagagaataaaggacaccataatgtagtcgtgggcgtgaatcacggaacgatcatcatgaatccacgtgaaaacactcaggtaaaaaaagcggaaccgccggttgatttgtcaacactgccattgacgagttggaaacgcgaagtatcacagcgcctcgaatccctaactcccgaggcattggaacagttgtacgaagagacgcgggcaacccggcacgatagaatccgcgcagcatgcaacgagttgaaggcgatgacaagcattgccgatgcgacgcgacgaatcaaacaactgaaagatgaatatgtcgcgtttacaacactactcaacgatacgttacatgcaattgtgataccatcgtttatatccgattttaccagtctgttgcggagtcgagcgagtttcgataccgtccgaaaccgtgcacttgctgtatttgattcgatactggttccactgaatgggctgatcaagctgctggaatcgttccgcgtttctcccgaggaactattattggaagcggtacaacgtagccgtccggtattaaatggaacgaacattgactcggatggtttgctggacgagttacagcgaacggaacgatttctacccaagcaacaactggtagaagcctttggtaacctgttacggaatgccggtgatagtttacacaatactgacgacccgataatagtcctgtcgtctcgtatcgagtccaaccagacttgccttaccatccgtgataacggttgcggcatttctcccgaacaacatgagtcgatattcaataacggtttctcgaccaaggatacagaaggattcggacttgcccgagtcaaacacacactgcaatctctcggtggcgatgttcgtctcgtcgagagtgaacccaatgtcggcacgacattcgaggttgttctatgagtggaaacggttcgggttgtcgagtccgcatcttgttggttgaggataatgaatacgaccggcagacgattcgtaaggcgtttggctcgcagttcgatatcgatgcagcgatccattattcgcaagcgatggagaaactcaaatccgaccaatacgactttgtactactcgacttgatgcttcccgaacggcatggtgcgaaaattatggaggatggttcgttaggattccaactactcaaatatattcgggagaatgagccgctctgtccggtagtcgttatctccgggatgcaatcggtcaaaaccgctctgaaagtgctttccgttggtgtcgtcgattacattgtaaaagaggaattgatagaccagctaccggtgattctaaaaaagattgagctaattcgtcgtggtcaaatcgagagcttgatgctgcgtcgcactcagacgcatggctccgaacggaagttcatctacgcctccgaacaaatggctgctatcgataagcagattacgaaagtggcacaggatgacacaccggtaattctgcttggtgaatctggtacgggtaaagaagttgtcgcgcgcgaaatacaccgacgtagtcaccgcacaaattctccatttatcgatatcaattgcggtgcaatcccggaattgctgctggagaccgaatttttcgggcatgagaaaggtgcgttcaccggtgccgataaaatcaagaatgggttgttcgaactggcgcacaatgggacgctgtttctcgatgagatcgcggatttatctgcaccattgcaagtgaaattgctgcgggtcctgcaagaaaaaacgtttcggcgcgtgggtggtacgaaaaatttactggcggatgtacggattattgccgcgacaaacaaagatttgcatattgagagggctgaaaagcggttccgggacgacctttactaccgaatcgcaggactagttcttcacattccgcccctgcgggaccggaaggaagacatcgaagcgcttgctaagtactttttgctcaagctgtctcctaagcacgatattgtccttaccgagcgtgcgatgcaggctctaacggcgtatctatggccgggaaacgtccgcgagctggaaaatataattcatcgactcgtgttccacgccgatagcgacgagatcgaccggaaagacgtgttggcgatactcccgacgacttcgcagtcactgcaaacagtcgtttccgagacattgaatttgcgacaggttgaaacgtcggttattcaagaagcaataaggagaagcaaaacccaaaaagaggctgcaaagttgcttgggattgcagagagtagtttaaggcggaaacttagctaatgttactaatttgtaacattgaagtggcacacagaattttatggaaaaattaccgctaagtaaactcgaacaacaccttgctaaagctgcatggatactaaaaggtccagtcgatgcggctgatttcaaggcatatatctttccactccttttcttcaaacgcatttctgatgtgtacgacgaggagcttcgtcatgcactcgaggattcgggtggtgaccgcgagtatgcttcccatgccgaatttcactctttttctcttccggacgattgtcattggaacgatgttcgccaagtaacagtaaatgtcgggaaggcgttacaaaaagcattccgaggaatcgaaaaagccaaccagcagctcctatacggtattttcggtgacgcgaactgggcaaacaaagaaaaacttcctgattcgctacttaccaacctcatcgaacacttttcccaatacaatctgtcaaacgaggcagtcgaacccgacgttctcggtaaagcgtatgaatatctgattagccaatttgccgaccttactaataaaaaggcgggtgaattttacacgccacgttcggttgtccatttgatcgggctcattatcgatgtccaagaaggtgaatccgtttacgatcctgcctgcggaaccggtggtatgctgctggagagtatcgagcacttgcggcgaaccaaccgggattaccgaacgctcaaaatgtacggtcaggaaaaaaacttgacgacttccaccattgctcgcatcaatatgtacctgcacggcatcgaggatttccgaatcgagcgtggcgatacgctgcgtcaaccggcattcgttgaaaacgatcaactccagcaattcgattgtgttgttgccaatccgcccttctctttaaaagaatggggtgcggagcaatgggtgaatgatccctacggacgtaacatcgccggtgtgccaccgaagggaaatggggatatggcttgggtacaacacatgattcaatccatgaaacccgataccgggcgaatggctgtcgtgttacctcatggtgcgctctttcgaaagggtgcggaaggtcgtatccgtcaaaaactgattgatagcgatcggttggatactataatcggactgggagctaatgtattttatggagcgacacttgcggcttgtattctgattttccgggcgaagaaacccaagcaacgaaaacggaaggtgctgtttatcgatgcgtccgatcaaatcagagtcggtagagcacaaaatttcctggaagcacagcatgtcgaaacaatctataaatggtatcgtgagtacaaatcacttcctgatcatgtacgagtcgtcgataatgaagagatcgtaacgaaagagtacaacctcaatattccgctctatattgagaaaaccatagtcgacaacctcccttcgatggaagaggcgattgccgaactcgaaattgcagcacaagcggcatggcaagctgaagatcgctttaaagagttgctcatggaattcgggttgctatcatgatgaaacgcaaggagctggaaagttatctttggggtgcagcgacctatctgcgcggccatatcgatgccggtgattacaagcagtttattttccctctgttgttttacaagcgaatttgtgatgtttacgacgaggagtaccagcaagcattagccgagagtggcggtgacctggagtatgcatccttcgccgaaaatcaccggtttcaggtgccgaaagggtcgcattggaatgatgtccgctcggtgactcgaaatgttggcgaagcgctacagaagggtatgcgcgaattagagaaagcgaatcaggaacaattattcggaatattcggagatgcatcgtggacgaataaggatcggttgaacaatgagacgctcaccaacctaatcgagcatttcagtcagcatagtctcagcatcggtaatgtcccccaagatgaacttggtgatgcctacgagtttctgattaagaaattcgccgacgacagcgggcataccgccgcggaattttataccaaccgtaccgtcgttcggttaatgacgttaatttccgacccgcaaccgggagagagtgtgtacgacccaacttgcggttccggcgggttgttattgaactgtgcgctccagttgaaagacacgggtaaggaataccggacgctgaaattgtacggacaagagatcaacctgattacttcctcaattgctcgtatgaatatgtttatgcacggtatcgaggattttcagattgttcgcggcaatactctcagcaaccccgcgtttctggaaaacgaccgactgaagacattcaacgtgatacttgccaatcctccatacagtatcaaggcatgggatcagaaagcatttgcgagcgatccattcggcagaaatatctgggggacgcctcctcagggatatgccgattacgtattccaacaacacatccatacatctctcgatcctgacaacgggaggtgtgttattctttggccggatggtattctctatagagatgccgaatctgctatccgccgtaaaatgatagaaagtgatgtggtggaatgtgtgatcggtttgggaccgaatctcttctataactcaccaatggagagttatctcctgatctgtaggaacaataaaccgaaaacgcggcaaggaaaaattctctttatcaatgccgtgaaagaagttcataaagaaaaagcgacgagttacttggaagagaaacacattcagaagattttcaatacatatcatgactaccaaacgatagacggcttcagcaaggttatatcggttgaaggtgtgcttgataagaaagctaatttgaacattacgctttacaccggatcaatgcagaaaaccggtaatggtgagaacttacacgatgcaattgatcaatggaatagtagcgcagatgaattacgacagtcgattcaaaagctgatagcgaaactacagtgaagcaaacattcgacaagcaaggttggaaacgaatcaagttcggtgaagtatgccgcaacttgaatattgccgagcgtgatccattatcgaatgggatcgaccgatttgttggattggagcatatcgaaccggaaaacctacatcttaagtcgtggggcaatatcgctgatggtataactttttcgaaacgattcaaacccggtcaagtactgttcggtaaacgtcgttcgtatcagaaaaaagttgcgtttgcagagttcgatggaatttgttctagtgatattctggtcttagaagccaatgagaaacgaatcgaaccaagtttgttccctttcttattacagagtgagcggttcttggagcatgcggttaatacatcggctggggctctttcacctcgaacaaagtttcaagaccttgctcaattcgagttcctccttcccccaaaagaacaacaagcgaaaatcgctgaattgttgtgggcagcggataacgccacacaaaaggcaatatcgttggtaaatgggctaggagaacttctaaaactctcatcagatctaatttttgaaacatacacaaagaaaccaactattaataacgtcagaaatttggatgggtatcaagagtgtcccgtaacggatttgttaagcacaaaactgcttaatggaatttataaatcaaaagaatatcttgggcatgggataaaattggtaaatatgggagaattattcgcttatcctaaactgtataacccggatatgcaaagaatcacgttaagcgataaagaggaaaaacaattcttacttcaaaaaggcgacttacttttcgctagacgttcgttagtcatcgaaggagctggtaagtgttcgattgtgatgactgatgaagagaaaatgacttttgaatcttcgattatcagactacggctcaacacaaaattaatactcccaatgtactgccattattttttccggtcttctgagggtgtaaaaagaataaagagaatagtcggatatacaactgttgccggtattactggatcagatctctacaatatttcagtaccggttatcgaaaaaaaagaacaagaaaaatgtgtcgaaaatttgggcagaatcgaagagttaattactgaagccaaaaaccatgttaccaaaactgagaatgtaatcaagaatttaattcacaaggtgttctaatatgccttttaccgaaatgaatagcgtcgaacatttcattgtgcaacaactcaccggtgtcaatctgaatgccggtgatggggttgtttcatctccagacactggtcgtcacgtctggcgctatatgcctaccgacacactcgaccgcgagattactgaagttcttgttgaaagcgagctaaaacaggcactaattcggatcaaccctgaaatcgccgaacaacccgaccgcgccgacgaattgattcacaaactacgcgccatcctcatcacagtaaataatgtgggattagtaaagtcaaatgaagagtttgccaagtggtacaagggtgagattacgatgccgttcggcatcgacggtaagcacgttggtgtaaacctaatcgactttgatcatcctgaaaacaactcctatatcttgactaaccagttcaaaattcgtgcccgcgagaccaagattcccgatatcgttctgttcataaacggcattccggtagtagtcggcgaagcgaaaacgccagtacgaccggcagtaacatgggtcgatggtgcgcacgaaatccatgcggtttacgagaatactgtcccgaatctgtttgtacccaacatcctcagtttcgctaccgacggtcgcgatttcttctatggtgccgttcgcacaccacttgaattttggtgcccatggcgattggatgaatccaatagtactcttgcacttttttccggactgaatgaagtcggtaaacaactcaacagtttgttacgaccggaaactttgctcgatatcctgcgtcatttttcaatttatgcgaccaatccgcaaaaacgcaagatcaaagttgtctgtcgctaccagcaatatgaaggtgcaaatgcaatcgtacagcgggtttccgaaggacatatcaagaaggggttgatttggcacttccaaggttctggtaaatcgctactcatgctatttgctgcgcagaaactgcgaaagaaagccgacctcaagagtcctactatcatcattgtcgtggatcgggtcgatctcgatacacagataaccaatactcttggtgctgccgaagttcctaatatggtcaatgctgatagtatccaagcgttacacgacctgctcgaacgcgacatccgtaagattattgttacgacgattcacaaattcaaggatgcctatcccgacatgaatctgcgggataatatcattcttatggtcgatgaagcccaccgcacacaggaaggtgatctcggtcgtaaaatgcgtgcagcactcccgaatgcgtttctcttcggtatgaccggtactccgatcaatcgttccgacaagaacactttttgggcatttggtgcaccggaggatgagggtggatacctcagccgctatacatttcaggaaagtatccgcgatttacaaacgcttccacttcacttcgaaccgcgactccccaatgttcacattgacaaggaagggctcgatattgctttccgcgaaatggctaatgatctaacggaagaagatcgcaacaaattgagtcaaaaagctgcgaagatgctgctcttcctcaaatcgccagagcggatcagaacgattgtcgaagacattgcgaaccattatcgcacacatgtcgaaccgcacagttttaaagcgatgattgtgactccggatcgtctcgcttgtgttgcttacaaagaagcactcgatgaacaactcggtgtggatgccagtcgagtggtcatttcaacgaccgcaaacgacccactcgaattcaaacaaaaatggggattggataaagaccagcaagagaaagttattgagcagttcaacaatccggattctcaactaaagttcttgattgtgaccgctaaattacttgccggattcgatgctcaactcttgcagacgatgtacctcgataaatcgctgaaagatcacacattattacaagcgatctgtcgcaccaaccgcgtctatccaaataaaacttacggtcgcattgtcgattactttggggttttcgatgatactgcgaaggcgttagagtttgacgaagcgactgtgcgtgctgtaataacgaacctgcaggaattgagagacaaacttccagaattgatcgagaaagcgtgttcccattttcccggagttgatcgtacgattgaaggattcgaaggtctgagtcgggcgcaggattgtatcaactcgaatgaaatgcgcgatgcgtttgctaaggactacgtcactctatcaaaagtgtgggaagcactgagtcccgattcaattctcaatcgttttcagcgtgactacaaatggttatcgcaagtctatacctctgttcgaccagcttcggatgacaacggacgattactctggcatgcgtttggaccgcagacggaaaaattgattcacgagcatgttcatgtctccggcattcacgatgacatggaagagatggtgctcgatgccgagttaatcgacggattgatgaatagtaaggacactaagcgagccaaacagatcgttcttattcttgtcggtcgattagggaaacatccaggtaatcctaagtttaagaaacttagcgagcggttagaggaattgcggaatcgtgctgagcaagggttgattagcagtatcgattttatcaagcacctctgccaaatcgcgcgcgatacgttagagaccgagcgtgagttattttctgcagacgaacggagaactgccaagacagcacttacagaactttttcttgaaatgcgcacagataagacaccgtcagtagtcgaacgcattgtcaacgatatcgatgagatcgtgaaaattgttcggtttgacggttggcagactacgattgcaggagagcgcgaagtccagaaatcgctacgcaagactcttctaaagtatcagcttcataaagaggaagaactgtttgagaaggcgtatgcatatatcaaggaatactactgagcgaatttgtagttgagtacattcatgatctgatgagtttcagtcattgagagcgatttatgcctagtaaaaaacgacaaatagttgaacccaatgagaaacgtcgtgctttaggtcggactcgagccgaggcaacttttcctgtcgcagcacccctatcagggatgccaaaaggttacaacgaatttttccagcagatcaaacaacatattcaacgggaacgattgaaaacggttcttgctgcgaatgccgctatggttttactttactgggatatcggtcggacgattctcgaacgtcaggaacaggagggttggggagcacaagtaattgatcgattgtctgtcgatctacaaaaatcgtttccagaaatgcgcggcttctcgccacgcaacctgaaatacatgcgggcatttgcctctgcatggactgaccggacaattgtgcaagaggcacttgcacaaatcacatggtatcataacctcaccttattggaaaaattagacgatcctgaaacacgcttgtggtacattaacaaaaccgttgagcatgggtggtcccgcaacattctcgcattacagattgactcacaacttcacaaacgccaaggcaaagcaattacgaattttccggtaacgctccctccaactgaatcggatatggctgcacaggtgttcaaagacccatatttgttcgactttttgggtactgccgatccccggcgtgagcatgaaatcgagcaggcattggttgaccatattcagagttttctactggagctgggagcgggatttgcctttgttggcaggcaggttcgattggaagttggggatcaagaattcttagtggacttattattctaccatctcaaattgcgttgttttgtcgtaatcgagctaaaagctgtaccattcgatcctgctttcattggacaaataaatctttacctatctgctgtcgacgatctactacgtcatcccgacgataagccgacaatcggattgctactatgtaggacgaaaaacgagttggtagtggagtatgcactacgcagtttgaagaaaccaattggtgttgccggttgggagactaaaatcgttaaaacacttccaaaggagctgaagggaagcctgccgtcgattaaagaaattgaggatgaacttggcaaccacgaataatgaactacgttatatctttcaactacgggagcgcttatgtgctataacctgttagagaaaaaatggattccggtactctatcgaaacggacaattcgaccgggtcgggatcaaagacgcgctaattaaagccggtcaaatccgagagatcgccgcatcgaatccgatggacaggtttgcagtgatgcgttttttgctcgccattttgtattggtgcaaggggaatccccctgatgaaacaaatatcgattcgtttccagcagagtggttttccaaacttgaagagacagagaatcgggattgcttcaatttacttggaaacggaaagcggttttatcaggatgctgatgcaagacgttctcgtcccacgacagatttgtatcaagagataccaactggacacaatttttggcattttaaacacacaaccgattttcaagaggggttgtgcgcttcctgttgtgcaataggactacttcggctcccattatttatgacttttggtggcaatactaaaccatacctttatccgggaataaatggagttccgcctgtttacataatgtcggtgggcaattcgttgttcgagactctccacaaaaactggatacctcgcgccattcctttcggtgaaccatcttggatcgacctcaattttaatgtgggcgacactgccgaaattccactactcaaagggctaacgatgctcgcccgtaaagtttggttggcagaaacggagagccatcaaacttgctacaactgtggagtaaaatccgatacgattatccgcagttgtgaatttcaatcgccaggtaagcaggaaactgccctttggagagacccacacgcactttatctcagtagcacttctcaaaaatcgataaaagcacctgatccggtttcggctggaaaatttaagatggatcgacccttatggaaattacttgcacctgttatcgaagccgctaaaacgatttatccaacttcgaccacttttgctatcatcggtctcggtacagataatgcgaagtatgtcgatgtttgggaacgaattgttgagttaccatcaaataattcagtacccgaagcagcggtgtctacggttgagcaatggcagaaagagacatcgaacaacgaattcgtaaagcgtctgcctaagacgatgcgagtgaaacggaaactcgatcacctgaaagcaacctacgattccaatcgtcctcatgtcgagcatgccgtctcaacagctgttgggaatcttctatccgggggtgaaacggaatggcaaaacgcagcatcggaatatcgtccaatgcaggagatgatcgcgaaatcactcgcacccggcgctacactaacagcgacgatacggcgaaagagtatcgcgaacgcattacccgatatgcgagcaaaacatgacccaccggagaaaacgaaacgtagaaagtcggctacagaatgagttcaaccaatgattttatcatggtcttacaaacattaaaagcaggtgacctaggactcttgcgaacccatgctaataaaggacttgaccagactgttgatgggttcgatctgtttaccggtttgtggtggccgctacggcaaaagaaccagtttgcaccgcgacgggaagtcgcgtggttgatcgctaaactatatgcaaagtgtcccattgaacatcagtctgattgtttgtttgcacaccaactacagcgatgcgaaccaagagaagaacgtgcgcgaaaccggtttcgacagaaattcgatgaactgataaccactcccttggagcaaatcgagcccacattgcgaagagcgcttcaagaaatttcttcccatgaattgaaactcgactgggtaaaactgaccgatgatctctccttttgggaacaggagaccaagcatcaggaatggataaaccaatatctcagcatcaacgaaagggtacaaccatgttgatcgaaattcacatgatccagaaccacagcccggcgaatcttaatagggacgacctcggcgcaccaaaaacctgttatttcggtggtgtattacgctcgcgcatctcgagtcaatgcatcaagcgaagtattcggatgagtccagagtttgcgaaactgttaggaggagtaagaacgcgcgatctcgctaagaggattcttgacaagatcgaaggtgatgcaaacgacaaaaaacgagtcgaaggcattctcaaagtttgcggtttcaaaccaaagactgaatcaaaagcgaagaaaccgcgcaccactgcaggcgaagaaggagagaccgatgaatccgatgaaaccagtcagagaagcaaggcaccgctcttcgtgacccaacaagccattgagaagattgtgaatctcttccaatcaaggaacagcaaatctgatgatgagttagcaaaagaatttgcgaaagcaatcgctctttacacacaagcgcccgatatggcactaagtggacgtatgcttgaacccgacaaatctgcgaagaaaatttgggaaaaactagaaaagaatgtcgaggcatcgttgcaaacggctcacgctatatcgacccacgccgcctttcctgaaactgattacttcgtggcaatgggagacgaaacacgcgaggaaaaagaagaagctggtgccgatttaatcggtgaacaactatttgcttccgcgtgtttctacaaatatttctccattaattttgagcaacttgtagagaatctcggcgataacaaacaattagccgctcatacagtaggcacatttattcgcactgccgcagtagtaaatccgagtgggaagcaaaacagtttcgccgcgaacaatcctcccgatgggatactcatcgagatcaaaggcacgccaatcagctatgccaacgcctttgcgaatccagtgccagccaaaggggaacgggaaatcatttcacaaagtatcgctcaattaggtcaatatatgcatgaccttgatactgggtttggcatccctaaacagcgcttctggttttcacccaatcttcgctatcccctctacgtggttgaaaacaaacaagagatcgcactaaccgaccataatatcaagtcacttgatgaactgataccaatggttatagctgcaatcggtttcgactggaacgaggtacaacaggcaatcgttaacaacgaggcatagcatgagcgatctgcccaatacgctctttctccgcctagaaagttccatgcaatcatggggtgtacacgaatcgaaattcgtagttcgacgaactgccgaagcgccgacgaaatcgggagtcatcggattgttctgtgctgcgctaggtattacccgtcaacaagcgccggacgagtggttaccgaaactaagtgaacttcgaattggtgtacgaattgatgtaccgggaattcgctggtgggattaccacaccgtcggtgccgaaatgcaaatgcgaaccgcaaagggagaatgtaagtcgggagcaatgctcacccgacgcgagtacctttgcgatgccagttttttggtagtattgcagggcgacccatctctcattcaagagttagaaaaagcggtcaaatacccacagtggacactctaccttggtcgcaaatgctgtgttccgtcgcgaccattgttggaacatccggctgggttctttcccgatccgctctctgcgttaagttcgattccgtggcggaaacgactcaaacgtgataacgaacccaaaaagaacctcgtctgcctgatcgactggcaacccacttcggaacaacccgacgcccctgacgatgcacaggtctggtacgatataccggttagtttcgatccgccctcgcatcgacctcgattcgtcattcgtgaagagttgactgttggcgaacatgggcagataagcattgcaaatgaaccattgcagcacgaaacaccgcgaccaccaagaccccgcgccgattacactaatacgaaatacaaagcgaaaagacgcgaacggctatctcaggatcagcatctctgcgtcttctgcaaatctccggcaaccaccgtgcaacatattacctatcgacacgcgggaggcgaagaaaagcccgacgaattgcgttcgctttgtcgactttgccatgatgccgtgacgatgatcgagtatggggtcgggatgggattagatcgcatcaatcccgaagaggaacgttggcgtgaacttatcatcgaaaaacgctctgaaattgtcgcattccgttcattggaaacccgtcgtcgtcggctatccatcgaggaggtagagtgatgtatcattccaatctcatgatcgatgtcggcgataatccagaccgacctcgccccggtcgtttatggttgcgtaacatctatcacgttcatcaacgattgtcgatggcatttcccatgtccacgacgcaaaaagtcgatccgaattttcttctcccattcgatccaaacgggtttgaccgctctcgttttctcttccgtatcgatcaaatcgttcgagataattatcaacagacgatcatcattgtccaatcggaaacggagccagattggaagtatgcgttccacaacttagatatggttctagcagcaccaataaagccatacgagtacactcctgcatttcagaatggggacattcgtagatttcggattcgtgtcaatccgacgaaaaagagtgctacctacggatcgaatggtgcagatagaaacccttcttccaagtcgcaagggaaacgtgttactctttgggacaaagagacaaaaccaacagatgcgatccttgattggtttgctcgcaaaggatcgcagaaaggtttttctgtcggtagttgcgatgtcgtgaacttgggatgggtagttggtaaaaaaccgaacggaaagggtgacgaacacgtcatgcgctttcgttctgcattgttggaaggaaaactgactgtcaccgatgctatggaatttcatgctgcgataaatgcaggaattggatcggcgaagggattcggatttggtctactttctgtcttcccaattggagatcaccaatgaacgatctccgtgccctacctaaattacgtgatggtttatcgtatgcatacttcgaacattgccgggtcgaacaagacgaaatgtcgattgcggtttggacgaaagaaggaatcatacccgtacctgctgcttcacttggtgtattgttgttgggtcccggctcaacgattacccacgcggcagtgaaagcgcttgctgacaatggttgtatggtattgtggacgggtgaaggcgcgatccggttttatgcgaccggtatcggtgaaacccggaaaggagggcacctcgaacgacaagcggcactgtgggctgaccctgagtcacacgaacgaatcgtgcttcgaatgtaccggatgcgtttccgaaaacgattaccgaagggtttatcattggaacaaattcggggaatggaaggtgttcgtgtacgcgaagcgtatgcgattgcctcgaacgaaaccggtgtggagtgggtcggtcgaagctatgaccggaaccattgggagaattccgatccagtcaatcgcgcactttcggcagcaaatgcctgcctttattcgttgtgccatactgccatcgtgagtggcggctatactcccggtcttggtttcgtccatgtcggtaaagcgctctcattcgtgtacgatattggcgatctatacaaggttgagacgacgatcccactctcgtttcgcgtcgtacaggaatccactgacaacttggaaagtcgggtgcggcatctctgtcgagattacttccacgagtacaaattattagaacgtattttacctgatatcgaccgtttgtttgatttcaacttggacgacgaatctttcggttgggatatcgatgaagacccggcacgtccaactccgtattggaacccaccggaagtggaaaaggaattgacaaatggtagtgatgattcttgagaaggttcctgcgtcattgcgcggtgaattgacacgatggctgttcgaagcaaagaccggtgtctttatcggaaaggtttccgcgatagtccgcgataagctttgggatctttgtgtgggtcgtcgtggaacaccagcggtcattcaaatctggaacgacaacaatgagcaagggttttcgttgcggtcgaatggcgatacatcaaggaattttcaggaaaaagaaggattgtggtttgctgtaaagcatcttcctaaagaggatgcagttgccactgatacttaacacccttttcgtgatctaacttcaatgattacgaagggtaatccccacgcgcgtggggatgaaccgttgaacactccaattttatcaaaactgttgaggtaatccccacgcgcgtggggatgaaccggcgttaaaattccgcgcgttcgacattgaattgtaatccccacgcgcgtggggatgaaccggttgttccgatacgatacttca

SEQ ID NO: 972 - DNA, 122956 bp, Artificial Sequence
  Synthetic Oligonucleotide
  misc_feature (1)..(83979): n is a, c, g, or t
nnnnnnnnnnnnnnnnnnnnnnnnnnnnnnnnnnnnnnnnnnnnnnnnnnnnnnnnnnnnnnnnnnnnnnnnnnnnnnnnnnnnnnnnnnnnnnnnnnnnnnnnnnnnnnnnnnnnnnnnnnnnnnnnnnnnnnnnnnnnnnnnnnnnnnnnnnnnnnnnnnnnnnnnnnnnnnnnnnnnnnnnnnnnnnnnnnnnnnnnnnnnnnnnnnnnnnnnnnnnnnnnnnnnnnnnnnnnnnnnnnnnnnnnnnnnnnnnnnnnnnnnnnnnnnnnnnnnnnnnnnnnnnnnnnnnnnnnnnnnnnnnnnnnnnnnnnnnnnnnnnnnnnnnnnnnnnnnnnnnnnnnnnnnnnnnnnnnnnnnnnnnnnnnnnnnnnnnnnnnnnnnnnnnnnnnnnnnnnnnnnnnnnnnnnnnnnnnnnnnnnnnnnnnnnnnnnnnnnnnnnnnnnnnnnnnnnnnnnnnnnnnnnnnnnnnnnnnnnnnnnnnnnnnnnnnnnnnnnnnnnnnnnnnnnnnnnnnnnnnnnnnnnnnnnnnnnnnnnnnnnnnnnnnnnnnnnnnnnnnnnnnnnnnnnnnnnnnnnnnnnnnnnnnnnnnnnnnnnnnnnnnnnnnnnnnnnnnnnnnnnnnnnnnnnnnnnnnnnnnnnnnnnnnnnnnnnnnnnnnnnnnnnnnnnnnnnnnnnnnnnnnnnnnnnnnnnnnnnnnnnnnnnnnnnnnnnnnnnnnnnnnnnnnnnnnnnnnnnnnnnnnnnnnnnnnnnnnnnnnnnnnnnnnnnnnnnnnnnnnnnnnnnnnnnnnnnnnnnnnnnnnnnnnnnnnnnnnnnnnnnnnnnnnnnnnnnnnnnnnnnnnnnnnnnnnnnnnnnnnnnnnnnnnnnnnnnnnnnnnnnnnnnnnnnnnnnnnnnnnnnnnnnnnnnnnnnnnnnnnnnnnnnnnnnnnnnnnnnnnnnnnnnnnnnnnnnnnnnnnnnnnnnnnnnnnnnnnnnnnnnnnnnnnnnnnnnnnnnnnnnnnnnnnnnnnnnnnnnnnnnnnnnnnnnnnnnnnnnnnnnnnnnnnnnnnnnnnnnnnnnnnnnnnnnnnnnnnnnnnnnnnnnnnnnnnnnnnnnnnnnnnnnnnnnnnnnnnnnnnnnnnnnnnnnnnnnnnnnnnnnnnnnnnnnnnnnnnnnnnnnnnnnnnnnnnnnnnnnnnnnnnnnnnnnnnnnnnnnnnnnnnnnnnnnnnnnnnnnnnnnnnnnnnnnnnnnnnnnnnnnnnnnnnnnnnnnnnnnnnnnnnnnnnnnnnnnnnnnnnnnnnnnnnnnnnnnnnnnnnnnnnnnnnnnnnnnnnnnnnnnnnnnnnnnnnnnnnnnnnnnnnnnnnnnnnnnnnnnnnnnnnnnnnnnnnnnnnnnnnnnnnnnnnnnnnnnnnnnnnnnnnnnnnnnnnnnnnnnnnnnnnnnnnnnnnnnnnnnnnnnnnnnnnnnnnnnnnnnnnnnnnnnnnnnnnnnnnnnnnnnnnnnnnnnnnnnnnnnnnnnnnnnnnnnnnnnnnnnnnnnnnnnnnnnnnnnnnnnnnnnnnnnnnnnnnnnnnnnnnnnnnnnnnnnnnnnnnnnnnnnnnnnnnnnnnnnnnnnnnnnnnnnnnnnnnnnnnnnnnnnnnnnnnnnnnnnnnnnnnnnnnnnnnnnnnnnnnnnnnnnnnnnnnnnnnnnnnnnnnnnnnnnnnnnnnnnnnnnnnnnnnnnnnnnnnnnnnnnnnnnnnnnnnnnnnnnnnnnnnnnnnnnnnnnnnnnnnnnnnnnnnnnnnnnnnnnnnnnnnnnnnnnnnnnnnnnnnnnnnnnnnnnnnnnnnnnnnnnnnnnnnnnnnnnnnnnnnnnnnnnnnnnnnnnnnnnnnnnnnnnnnnnnnnnnnnnnnnnnnnnnnnnnnnnnnnnnnnnnnnnnnnnnnnnnnnnnnnnnnnnnnnnnnnnnnnnnnnnnnnnnnnnnnnnnnnnnnnnnnnnnnnnnnnnnnnnnnnnnnnnnnnnnnnnnnnnnnnnnnnnnnnnnnnnnnnnnnnnnnnnnnnnnnnnnnnnnnnnnnnnnnnnnnnnnnnnnnnnnnnnnnnnnnnnnnnnnnnnnnnnnnnnnnnnnnnnnnnnnnnnnnnnnnnnnnnnnnnnnnnnnnnnnnnnnnnnnnnnnnnnnnnnnnnnnnnnnnnnnnnnnnnnnnnnnnnnnnnnnnnnnnnnnnnnnnnnnnnnnnnnnnnnnnnnnnnnnnnnnnnnnnnnnnnnnnnnnnnnnnnnnnnnnnnnnnnnnnnnnnnnnnnnnnnnnnnnnnnnnnnnnnnnnnnnnnnnnnnnnnnnnnnnnnnnnnnnnnnnnnnnnnnnnnnnnnnnnnnnnnnnnnnnnnnnnnnnnnnnnnnnnnnnnnnnnnnnnnnnnnnnnnnnnnnnnnnnnnnnnnnnnnnnnnnnnnnnnnnnnnnnnnnnnnnnnnnnnnnnnnnnnnnnnnnnnnnnnnnnnnnnnnnnnnnnnnnnnnnnnnnnnnnnnnnnnnnnnnnnnnnnnnnnnnnnnnnnnnnnnnnnnnnnnnnnnnnnnnnnnnnnnnnnnnnnnnnnnnnnnnnnnnnnnnnnnnnnnnnnnnnnnnnnnnnnnnnnnnnnnnnnnnnnnnnnnnnnnnnnnnnnnnnnnnnnnnnnnnnnnnnnnnnnnnnnnnnnnnnnnnnnnnnnnnnnnnnnnnnnnnnnnnnnnnnnnnnnnnnnnnnnnnnnnnnnnnnnnnnnnnnnnnnnnnnnnnnnnnnnnnnnnnnnnnnnnnnnnnnnnnnnnnnnnnnnnnnnnnnnnnnnnnnnnnnnnnnnnnnnnnnnnnnnnnnnnnnnnnnnnnnnnnnnnnnnnnnnnnnnnnnnnnnnnnnnnnnnnnnnnnnnnnnnnnnnnnnnnnnnnnnnnnnnnnnnnnnnnnnnnnnnnnnnnnnnnnnnnnnnnnnnnnnnnnnnnnnnnnnnnnnnnnnnnnnnnnnnnnnnnnnnnnnnnnnnnnnnnnnnnnnnnnnnnnnnnnnnnnnnnnnnnnnnnnnnnnnnnnnnnnnnnnnnnnnnnnnnnnnnnnnnnnnnnnnnnnnnnnnnnnnnnnnnnnnnnnnnnnnnnnnnnnnnnnnnnnnnnnnnnnnnnnnnnnnnnnnnnnnnnnnnnnnnnnnnnnnnnnnnnnnnnnnnnnnnnnnnnnnnnnnnnnnnnnnnnnnnnnnnnnnnnnnnnnnnnnnnnnnnnnnnnnnnnnnnnnnnnnnnnnnnnnnnnnnnnnnnnnnnnnnnnnnnnnnnnnnnnnnnnnnnnnnnnnnnnnnnnnnnnnnnnnnnnnnnnnnnnnnnnnnnnnnnnnnnnnnnnnnnnnnnnnnnnnnnnnnnnnnnnnnnnnnnnnnnnnnnnnnnnnnnnnnnnnnnnnnnnnnnnnnnnnnnnnnnnnnnnnnnnnnnnnnnnnnnnnnnnnnnnnnnnnnnnnnnnnnnnnnnnnnnnnnnnnnnnnnnnnnnnnnnnnnnnnnnnnnnnnnnnnnnnnnnnnnnnnnnnnnnnnnnnnnnnnnnnnnnnnnnnnnnnnnnnnnnnnnnnnnnnnnnnnnnnnnnnnnnnnnnnnnnnnnnnnnnnnnnnnnnnnnnnnnnnnnnnnnnnnnnnnnnnnnnnnnnnnnnnnnnnnnnnnnnnnnnnnnnnnnnnnnnnnnnnnnnnnnnnnnnnnnnnnnnnnnnnnnnnnnnnnnnnnnnnnnnnnnnnnnnnnnnnnnnnnnnnnnnnnnnnnnnnnnnnnnnnnnnnnnnnnnnnnnnnnnnnnnnnnnnnnnnnnnnnnnnnnnnnnnnnnnnnnnnnnnnnnnnnnnnnnnnnnnnnnnnnnnnnnnnnnnnnnnnnnnnnnnnnnnnnnnnnnnnnnnnnnnnnnnnnnnnnnnnnnnnnnnnnnnnnnnnnnnnnnnnnnnnnnnnnnnnnnnnnnnnnnnnnnnnnnnnnnnnnnnnnnnnnnnnnnnnnnnnnnnnnnnnnnnnnnnnnnnnnnnnnnnnnnnnnnnnnnnnnnnnnnnnnnnnnnnnnnnnnnnnnnnnnnnnnnnnnnnnnnnnnnnnnnnnnnnnnnnnnnnnnnnnnnnnnnnnnnnnnnnnnnnnnnnnnnnnnnnnnnnnnnnnnnnnnnnnnnnnnnnnnnnnnnnnnnnnnnnnnnnnnnnnnnnnnnnnnnnnnnnnnnnnnnnnnnnnnnnnnnnnnnnnnnnnnnnnnnnnnnnnnnnnnnnnnnnnnnnnnnnnnnnnnnnnnnnnnnnnnnnnnnnnnnnnnnnnnnnnnnnnnnnnnnnnnnnnnnnnnnnnnnnnnnnnnnnnnnnnnnnnnnnnnnnnnnnnnnnnnnnnnnnnnnnnnnnnnnnnnnnnnnnnnnnnnnnnnnnnnnnnnnnnnnnnnnnnnnnnnnnnnnnnnnnnnnnnnnnnnnnnnnnnnnnnnnnnnnnnnnnnnnnnnnnnnnnnnnnnnnnnnnnnnnnnnnnnnnnnnnnnnnnnnnnnnnnnnnnnnnnnnnnnnnnnnnnnnnnnnnnnnnnnnnnnnnnnnnnnnnnnnnnnnnnnnnnnnnnnnnnnnnnnnnnnnnnnnnnnnnnnnnnnnnnnnnnnnnnnnnnnnnnnnnnnnnnnnnnnnnnnnnnnnnnnnnnnnnnnnnnnnnnnnnnnnnnnnnnnnnnnnnnnnnnnnnnnnnnnnnnnnnnnnnnnnnnnnnnnnnnnnnnnnnnnnnnnnnnnnnnnnnnnnnnnnnnnnnnnnnnnnnnnnnnnnnnnnnnnnnnnnnnnnnnnnnnnnnnnnnnnnnnnnnnnnnnnnnnnnnnnnnnnnnnnnnnnnnnnnnnnnnnnnnnnnnnnnnnnnnnnnnnnnnnnnnnnnnnnnnnnnnnnnnnnnnnnnnnnnnnnnnnnnnnnnnnnnnnnnnnnnnnnnnnnnnnnnnnnnnnnnnnnnnnnnnnnnnnnnnnnnnnnnnnnnnnnnnnnnnnnnnnnnnnnnnnnnnnnnnnnnnnnnnnnnnnnnnnnnnnnnnnnnnnnnnnnnnnnnnnnnnnnnnnnnnnnnnnnnnnnnnnnnnnnnnnnnnnnnnnnnnnnnnnnnnnnnnnnnnnnnnnnnnnnnnnnnnnnnnnnnnnnnnnnnnnnnnnnnnnnnnnnnnnnnnnnnnnnnnnnnnnnnnnnnnnnnnnnnnnnnnnnnnnnnnnnnnnnnnnnnnnnnnnnnnnnnnnnnnnnnnnnnnnnnnnnnnnnnnnnnnnnnnnnnnnnnnnnnnnnnnnnnnnnnnnnnnnnnnnnnnnnnnnnnnnnnnnnnnnnnnnnnnnnnnnnnnnnnnnnnnnnnnnnnnnnnnnnnnnnnnnnnnnnnnnnnnnnnnnnnnnnnnnnnnnnnnnnnnnnnnnnnnnnnnnnnnnnnnnnnnnnnnnnnnnnnnnnnnnnnnnnnnnnnnnnnnnnnnnnnnnnnnnnnnnnnnnnnnnnnnnnnnnnnnnnnnnnnnnnnnnnnnnnnnnnnnnnnnnnnnnnnnnnnnnnnnnnnnnnnnnnnnnnnnnnnnnnnnnnnnnnnnnnnnnnnnnnnnnnnnnnnnnnnnnnnnnnnnnnnnnnnnnnnnnnnnnnnnnnnnnnnnnnnnnnnnnnnnnnnnnnnnnnnnnnnnnnnnnnnnnnnnnnnnnnnnnnnnnnnnnnnnnnnnnnnnnnnnnnnnnnnnnnnnnnnnnnnnnnnnnnnnnnnnnnnnnnnnnnnnnnnnnnnnnnnnnnnnnnnnnnnnnnnnnnnnnnnnnnnnnnnnnnnnnnnnnnnnnnnnnnnnnnnnnnnnnnnnnnnnnnnnnnnnnnnnnnnnnnnnnnnnnnnnnnnnnnnnnnnnnnnnnnnnnnnnnnnnnnnnnnnnnnnnnnnnnnnnnnnnnnnnnnnnnnnnnnnnnnnnnnnnnnnnnnnnnnnnnnnnnnnnnnnnnnnnnnnnnnnnnnnnnnnnnnnnnnnnnnnnnnnnnnnnnnnnnnnnnnnnnnnnnnnnnnnnnnnnnnnnnnnnnnnnnnnnnnnnnnnnnnnnnnnnnnnnnnnnnnnnnnnnnnnnnnnnnnnnnnnnnnnnnnnnnnnnnnnnnnnnnnnnnnnnnnnnnnnnnnnnnnnnnnnnnnnnnnnnnnnnnnnnnnnnnnnnnnnnnnnnnnnnnnnnnnnnnnnnnnnnnnnnnnnnnnnnnnnnnnnnnnnnnnnnnnnnnnnnnnnnnnnnnnnnnnnnnnnnnnnnnnnnnnnnnnnnnnnnnnnnnnnnnnnnnnnnnnnnnnnnnnnnnnnnnnnnnnnnnnnnnnnnnnnnnnnnnnnnnnnnnnnnnnnnnnnnnnnnnnnnnnnnnnnnnnnnnnnnnnnnnnnnnnnnnnnnnnnnnnnnnnnnnnnnnnnnnnnnnnnnnnnnnnnnnnnnnnnnnnnnnnnnnnnnnnnnnnnnnnnnnnnnnnnnnnnnnnnnnnnnnnnnnnnnnnnnnnnnnnnnnnnnnnnnnnnnnnnnnnnnnnnnnnnnnnnnnnnnnnnnnnnnnnnnnnnnnnnnnnnnnnnnnnnnnnnnnnnnnnnnnnnnnnnnnnnnnnnnnnnnnnnnnnnnnnnnnnnnnnnnnnnnnnnnnnnnnnnnnnnnnnnnnnnnnnnnnnnnnnnnnnnnnnnnnnnnnnnnnnnnnnnnnnnnnnnnnnnnnnnnnnnnnnnnnnnnnnnnnnnnnnnnnnnnnnnnnnnnnnnnnnnnnnnnnnnnnnnnnnnnnnnnnnnnnnnnnnnnnnnnnnnnnnnnnnnnnnnnnnnnnnnnnnnnnnnnnnnnnnnnnnnnnnnnnnnnnnnnnnnnnnnnnnnnnnnnnnnnnnnnnnnnnnnnnnnnnnnnnnnnnnnnnnnnnnnnnnnnnnnnnnnnnnnnnnnnnnnnnnnnnnnnnnnnnnnnnnnnnnnnnnnnnnnnnnnnnnnnnnnnnnnnnnnnnnnnnnnnnnnnnnnnnnnnnnnnnnnnnnnnnnnnnnnnnnnnnnnnnnnnnnnnnnnnnnnnnnnnnnnnnnnnnnnnnnnnnnnnnnnnnnnnnnnnnnnnnnnnnnnnnnnnnnnnnnnnnnnnnnnnnnnnnnnnnnnnnnnnnnnnnnnnnnnnnnnnnnnnnnnnnnnnnnnnnnnnnnnnnnnnnnnnnnnnnnnnnnnnnnnnnnnnnnnnnnnnnnnnnnnnnnnnnnnnnnnnnnnnnnnnnnnnnnnnnnnnnnnnnnnnnnnnnnnnnnnnnnnnnnnnnnnnnnnnnnnnnnnnnnnnnnnnnnnnnnnnnnnnnnnnnnnnnnnnnnnnnnnnnnnnnnnnnnnnnnnnnnnnnnnnnnnnnnnnnnnnnnnnnnnnnnnnnnnnnnnnnnnnnnnnnnnnnnnnnnnnnnnnnnnnnnnnnnnnnnnnnnnnnnnnnnnnnnnnnnnnnnnnnnnnnnnnnnnnnnnnnnnnnnnnnnnnnnnnnnnnnnnnnnnnnnnnnnnnnnnnnnnnnnnnnnnnnnnnnnnnnnnnnnnnnnnnnnnnnnnnnnnnnnnnnnnnnnnnnnnnnnnnnnnnnnnnnnnnnnnnnnnnnnnnnnnnnnnnnnnnnnnnnnnnnnnnnnnnnnnnnnnnnnnnnnnnnnnnnnnnnnnnnnnnnnnnnnnnnnnnnnnnnnnnnnnnnnnnnnnnnnnnnnnnnnnnnnnnnnnnnnnnnnnnnnnnnnnnnnnnnnnnnnnnnnnnnnnnnnnnnnnnnnnnnnnnnnnnnnnnnnnnnnnnnnnnnnnnnnnnnnnnnnnnnnnnnnnnnnnnnnnnnnnnnnnnnnnnnnnnnnnnnnnnnnnnnnnnnnnnnnnnnnnnnnnnnnnnnnnnnnnnnnnnnnnnnnnnnnnnnnnnnnnnnnnnnnnnnnnnnnnnnnnnnnnnnnnnnnnnnnnnnnnnnnnnnnnnnnnnnnnnnnnnnnnnnnnnnnnnnnnnnnnnnnnnnnnnnnnnnnnnnnnnnnnnnnnnnnnnnnnnnnnnnnnnnnnnnnnnnnnnnnnnnnnnnnnnnnnnnnnnnnnnnnnnnnnnnnnnnnnnnnnnnnnnnnnnnnnnnnnnnnnnnnnnnnnnnnnnnnnnnnnnnnnnnnnnnnnnnnnnnnnnnnnnnnnnnnnnnnnnnnnnnnnnnnnnnnnnnnnnnnnnnnnnnnnnnnnnnnnnnnnnnnnnnnnnnnnnnnnnnnnnnnnnnnnnnnnnnnnnnnnnnnnnnnnnnnnnnnnnnnnnnnnnnnnnnnnnnnnnnnnnnnnnnnnnnnnnnnnnnnnnnnnnnnnnnnnnnnnnnnnnnnnnnnnnnnnnnnnnnnnnnnnnnnnnnnnnnnnnnnnnnnnnnnnnnnnnnnnnnnnnnnnnnnnnnnnnnnnnnnnnnnnnnnnnnnnnnnnnnnnnnnnnnnnnnnnnnnnnnnnnnnnnnnnnnnnnnnnnnnnnnnnnnnnnnnnnnnnnnnnnnnnnnnnnnnnnnnnnnnnnnnnnnnnnnnnnnnnnnnnnnnnnnnnnnnnnnnnnnnnnnnnnnnnnnnnnnnnnnnnnnnnnnnnnnnnnnnnnnnnnnnnnnnnnnnnnnnnnnnnnnnnnnnnnnnnnnnnnnnnnnnnnnnnnnnnnnnnnnnnnnnnnnnnnnnnnnnnnnnnnnnnnnnnnnnnnnnnnnnnnnnnnnnnnnnnnnnnnnnnnnnnnnnnnnnnnnnnnnnnnnnnnnnnnnnnnnnnnnnnnnnnnnnnnnnnnnnnnnnnnnnnnnnnnnnnnnnnnnnnnnnnnnnnnnnnnnnnnnnnnnnnnnnnnnnnnnnnnnnnnnnnnnnnnnnnnnnnnnnnnnnnnnnnnnnnnnnnnnnnnnnnnnnnnnnnnnnnnnnnnnnnnnnnnnnnnnnnnnnnnnnnnnnnnnnnnnnnnnnnnnnnnnnnnnnnnnnnnnnnnnnnnnnnnnnnnnnnnnnnnnnnnnnnnnnnnnnnnnnnnnnnnnnnnnnnnnnnnnnnnnnnnnnnnnnnnnnnnnnnnnnnnnnnnnnnnnnnnnnnnnnnnnnnnnnnnnnnnnnnnnnnnnnnnnnnnnnnnnnnnnnnnnnnnnnnnnnnnnnnnnnnnnnnnnnnnnnnnnnnnnnnnnnnnnnnnnnnnnnnnnnnnnnnnnnnnnnnnnnnnnnnnnnnnnnnnnnnnnnnnnnnnnnnnnnnnnnnnnnnnnnnnnnnnnnnnnnnnnnnnnnnnnnnnnnnnnnnnnnnnnnnnnnnnnnnnnnnnnnnnnnnnnnnnnnnnnnnnnnnnnnnnnnnnnnnnnnnnnnnnnnnnnnnnnnnnnnnnnnnnnnnnnnnnnnnnnnnnnnnnnnnnnnnnnnnnnnnnnnnnnnnnnnnnnnnnnnnnnnnnnnnnnnnnnnnnnnnnnnnnnnnnnnnnnnnnnnnnnnnnnnnnnnnnnnnnnnnnnnnnnnnnnnnnnnnnnnnnnnnnnnnnnnnnnnnnnnnnnnnnnnnnnnnnnnnnnnnnnnnnnnnnnnnnnnnnnnnnnnnnnnnnnnnnnnnnnnnnnnnnnnnnnnnnnnnnnnnnnnnnnnnnnnnnnnnnnnnnnnnnnnnnnnnnnnnnnnnnnnnnnnnnnnnnnnnnnnnnnnnnnnnnnnnnnnnnnnnnnnnnnnnnnnnnnnnnnnnnnnnnnnnnnnnnnnnnnnnnnnnnnnnnnnnnnnnnnnnnnnnnnnnnnnnnnnnnnnnnnnnnnnnnnnnnnnnnnnnnnnnnnnnnnnnnnnnnnnnnnnnnnnnnnnnnnnnnnnnnnnnnnnnnnnnnnnnnnnnnnnnnnnnnnnnnnnnnnnnnnnnnnnnnnnnnnnnnnnnnnnnnnnnnnnnnnnnnnnnnnnnnnnnnnnnnnnnnnnnnnnnnnnnnnnnnnnnnnnnnnnnnnnnnnnnnnnnnnnnnnnnnnnnnnnnnnnnnnnnnnnnnnnnnnnnnnnnnnnnnnnnnnnnnnnnnnnnnnnnnnnnnnnnnnnnnnnnnnnnnnnnnnnnnnnnnnnnnnnnnnnnnnnnnnnnnnnnnnnnnnnnnnnnnnnnnnnnnnnnnnnnnnnnnnnnnnnnnnnnnnnnnnnnnnnnnnnnnnnnnnnnnnnnnnnnnnnnnnnnnnnnnnnnnnnnnnnnnnnnnnnnnnnnnnnnnnnnnnnnnnnnnnnnnnnnnnnnnnnnnnnnnnnnnnnnnnnnnnnnnnnnnnnnnnnnnnnnnnnnnnnnnnnnnnnnnnnnnnnnnnnnnnnnnnnnnnnnnnnnnnnnnnnnnnnnnnnnnnnnnnnnnnnnnnnnnnnnnnnnnnnnnnnnnnnnnnnnnnnnnnnnnnnnnnnnnnnnnnnnnnnnnnnnnnnnnnnnnnnnnnnnnnnnnnnnnnnnnnnnnnnnnnnnnnnnnnnnnnnnnnnnnnnnnnnnnnnnnnnnnnnnnnnnnnnnnnnnnnnnnnnnnnnnnnnnnnnnnnnnnnnnnnnnnnnnnnnnnnnnnnnnnnnnnnnnnnnnnnnnnnnnnnnnnnnnnnnnnnnnnnnnnnnnnnnnnnnnnnnnnnnnnnnnnnnnnnnnnnnnnnnnnnnnnnnnnnnnnnnnnnnnnnnnnnnnnnnnnnnnnnnnnnnnnnnnnnnnnnnnnnnnnnnnnnnnnnnnnnnnnnnnnnnnnnnnnnnnnnnnnnnnnnnnnnnnnnnnnnnnnnnnnnnnnnnnnnnnnnnnnnnnnnnnnnnnnnnnnnnnnnnnnnnnnnnnnnnnnnnnnnnnnnnnnnnnnnnnnnnnnnnnnnnnnnnnnnnnnnnnnnnnnnnnnnnnnnnnnnnnnnnnnnnnnnnnnnnnnnnnnnnnnnnnnnnnnnnnnnnnnnnnnnnnnnnnnnnnnnnnnnnnnnnnnnnnnnnnnnnnnnnnnnnnnnnnnnnnnnnnnnnnnnnnnnnnnnnnnnnnnnnnnnnnnnnnnnnnnnnnnnnnnnnnnnnnnnnnnnnnnnnnnnnnnnnnnnnnnnnnnnnnnnnnnnnnnnnnnnnnnnnnnnnnnnnnnnnnnnnnnnnnnnnnnnnnnnnnnnnnnnnnnnnnnnnnnnnnnnnnnnnnnnnnnnnnnnnnnnnnnnnnnnnnnnnnnnnnnnnnnnnnnnnnnnnnnnnnnnnnnnnnnnnnnnnnnnnnnnnnnnnnnnnnnnnnnnnnnnnnnnnnnnnnnnnnnnnnnnnnnnnnnnnnnnnnnnnnnnnnnnnnnnnnnnnnnnnnnnnnnnnnnnnnnnnnnnnnnnnnnnnnnnnnnnnnnnnnnnnnnnnnnnnnnnnnnnnnnnnnnnnnnnnnnnnnnnnnnnnnnnnnnnnnnnnnnnnnnnnnnnnnnnnnnnnnnnnnnnnnnnnnnnnnnnnnnnnnnnnnnnnnnnnnnnnnnnnnnnnnnnnnnnnnnnnnnnnnnnnnnnnnnnnnnnnnnnnnnnnnnnnnnnnnnnnnnnnnnnnnnnnnnnnnnnnnnnnnnnnnnnnnnnnnnnnnnnnnnnnnnnnnnnnnnnnnnnnnnnnnnnnnnnnnnnnnnnnnnnnnnnnnnnnnnnnnnnnnnnnnnnnnnnnnnnnnnnnnnnnnnnnnnnnnnnnnnnnnnnnnnnnnnnnnnnnnnnnnnnnnnnnnnnnnnnnnnnnnnnnnnnnnnnnnnnnnnnnnnnnnnnnnnnnnnnnnnnnnnnnnnnnnnnnnnnnnnnnnnnnnnnnnnnnnnnnnnnnnnnnnnnnnnnnnnnnnnnnnnnnnnnnnnnnnnnnnnnnnnnnnnnnnnnnnnnnnnnnnnnnnnnnnnnnnnnnnnnnnnnnnnnnnnnnnnnnnnnnnnnnnnnnnnnnnnnnnnnnnnnnnnnnnnnnnnnnnnnnnnnnnnnnnnnnnnnnnnnnnnnnnnnnnnnnnnnnnnnnnnnnnnnnnnnnnnnnnnnnnnnnnnnnnnnnnnnnnnnnnnnnnnnnnnnnnnnnnnnnnnnnnnnnnnnnnnnnnnnnnnnnnnnnnnnnnnnnnnnnnnnnnnnnnnnnnnnnnnnnnnnnnnnnnnnnnnnnnnnnnnnnnnnnnnnnnnnnnnnnnnnnnnnnnnnnnnnnnnnnnnnnnnnnnnnnnnnnnnnnnnnnnnnnnnnnnnnnnnnnnnnnnnnnnnnnnnnnnnnnnnnnnnnnnnnnnnnnnnnnnnnnnnnnnnnnnnnnnnnnnnnnnnnnnnnnnnnnnnnnnnnnnnnnnnnnnnnnnnnnnnnnnnnnnnnnnnnnnnnnnnnnnnnnnnnnnnnnnnnnnnnnnnnnnnnnnnnnnnnnnnnnnnnnnnnnnnnnnnnnnnnnnnnnnnnnnnnnnnnnnnnnnnnnnnnnnnnnnnnnnnnnnnnnnnnnnnnnnnnnnnnnnnnnnnnnnnnnnnnnnnnnnnnnnnnnnnnnnnnnnnnnnnnnnnnnnnnnnnnnnnnnnnnnnnnnnnnnnnnnnnnnnnnnnnnnnnnnnnnnnnnnnnnnnnnnnnnnnnnnnnnnnnnnnnnnnnnnnnnnnnnnnnnnnnnnnnnnnnnnnnnnnnnnnnnnnnnnnnnnnnnnnnnnnnnnnnnnnnnnnnnnnnnnnnnnnnnnnnnnnnnnnnnnnnnnnnnnnnnnnnnnnnnnnnnnnnnnnnnnnnnnnnnnnnnnnnnnnnnnnnnnnnnnnnnnnnnnnnnnnnnnnnnnnnnnnnnnnnnnnnnnnnnnnnnnnnnnnnnnnnnnnnnnnnnnnnnnnnnnnnnnnnnnnnnnnnnnnnnnnnnnnnnnnnnnnnnnnnnnnnnnnnnnnnnnnnnnnnnnnnnnnnnnnnnnnnnnnnnnnnnnnnnnnnnnnnnnnnnnnnnnnnnnnnnnnnnnnnnnnnnnnnnnnnnnnnnnnnnnnnnnnnnnnnnnnnnnnnnnnnnnnnnnnnnnnnnnnnnnnnnnnnnnnnnnnnnnnnnnnnnnnnnnnnnnnnnnnnnnnnnnnnnnnnnnnnnnnnnnnnnnnnnnnnnnnnnnnnnnnnnnnnnnnnnnnnnnnnnnnnnnnnnnnnnnnnnnnnnnnnnnnnnnnnnnnnnnnnnnnnnnnnnnnnnnnnnnnnnnnnnnnnnnnnnnnnnnnnnnnnnnnnnnnnnnnnnnnnnnnnnnnnnnnnnnnnnnnnnnnnnnnnnnnnnnnnnnnnnnnnnnnnnnnnnnnnnnnnnnnnnnnnnnnnnnnnnnnnnnnnnnnnnnnnnnnnnnnnnnnnnnnnnnnnnnnnnnnnnnnnnnnnnnnnnnnnnnnnnnnnnnnnnnnnnnnnnnnnnnnnnnnnnnnnnnnnnnnnnnnnnnnnnnnnnnnnnnnnnnnnnnnnnnnnnnnnnnnnnnnnnnnnnnnnnnnnnnnnnnnnnnnnnnnnnnnnnnnnnnnnnnnnnnnnnnnnnnnnnnnnnnnnnnnnnnnnnnnnnnnnnnnnnnnnnnnnnnnnnnnnnnnnnnnnnnnnnnnnnnnnnnnnnnnnnnnnnnnnnnnnnnnnnnnnnnnnnnnnnnnnnnnnnnnnnnnnnnnnnnnnnnnnnnnnnnnnnnnnnnnnnnnnnnnnnnnnnnnnnnnnnnnnnnnnnnnnnnnnnnnnnnnnnnnnnnnnnnnnnnnnnnnnnnnnnnnnnnnnnnnnnnnnnnnnnnnnnnnnnnnnnnnnnnnnnnnnnnnnnnnnnnnnnnnnnnnnnnnnnnnnnnnnnnnnnnnnnnnnnnnnnnnnnnnnnnnnnnnnnnnnnnnnnnnnnnnnnnnnnnnnnnnnnnnnnnnnnnnnnnnnnnnnnnnnnnnnnnnnnnnnnnnnnnnnnnnnnnnnnnnnnnnnnnnnnnnnnnnnnnnnnnnnnnnnnnnnnnnnnnnnnnnnnnnnnnnnnnnnnnnnnnnnnnnnnnnnnnnnnnnnnnnnnnnnnnnnnnnnnnnnnnnnnnnnnnnnnnnnnnnnnnnnnnnnnnnnnnnnnnnnnnnnnnnnnnnnnnnnnnnnnnnnnnnnnnnnnnnnnnnnnnnnnnnnnnnnnnnnnnnnnnnnnnnnnnnnnnnnnnnnnnnnnnnnnnnnnnnnnnnnnnnnnnnnnnnnnnnnnnnnnnnnnnnnnnnnnnnnnnnnnnnnnnnnnnnnnnnnnnnnnnnnnnnnnnnnnnnnnnnnnnnnnnnnnnnnnnnnnnnnnnnnnnnnnnnnnnnnnnnnnnnnnnnnnnnnnnnnnnnnnnnnnnnnnnnnnnnnnnnnnnnnnnnnnnnnnnnnnnnnnnnnnnnnnnnnnnnnnnnnnnnnnnnnnnnnnnnnnnnnnnnnnnnnnnnnnnnnnnnnnnnnnnnnnnnnnnnnnnnnnnnnnnnnnnnnnnnnnnnnnnnnnnnnnnnnnnnnnnnnnnnnnnnnnnnnnnnnnnnnnnnnnnnnnnnnnnnnnnnnnnnnnnnnnnnnnnnnnnnnnnnnnnnnnnnnnnnnnnnnnnnnnnnnnnnnnnnnnnnnnnnnnnnnnnnnnnnnnnnnnnnnnnnnnnnnnnnnnnnnnnnnnnnnnnnnnnnnnnnnnnnnnnnnnnnnnnnnnnnnnnnnnnnnnnnnnnnnnnnnnnnnnnnnnnnnnnnnnnnnnnnnnnnnnnnnnnnnnnnnnnnnnnnnnnnnnnnnnnnnnnnnnnnnnnnnnnnnnnnnnnnnnnnnnnnnnnnnnnnnnnnnnnnnnnnnnnnnnnnnnnnnnnnnnnnnnnnnnnnnnnnnnnnnnnnnnnnnnnnnnnnnnnnnnnnnnnnnnnnnnnnnnnnnnnnnnnnnnnnnnnnnnnnnnnnnnnnnnnnnnnnnnnnnnnnnnnnnnnnnnnnnnnnnnnnnnnnnnnnnnnnnnnnnnnnnnnnnnnnnnnnnnnnnnnnnnnnnnnnnnnnnnnnnnnnnnnnnnnnnnnnnnnnnnnnnnnnnnnnnnnnnnnnnnnnnnnnnnnnnnnnnnnnnnnnnnnnnnnnnnnnnnnnnnnnnnnnnnnnnnnnnnnnnnnnnnnnnnnnnnnnnnnnnnnnnnnnnnnnnnnnnnnnnnnnnnnnnnnnnnnnnnnnnnnnnnnnnnnnnnnnnnnnnnnnnnnnnnnnnnnnnnnnnnnnnnnnnnnnnnnnnnnnnnnnnnnnnnnnnnnnnnnnnnnnnnnnnnnnnnnnnnnnnnnnnnnnnnnnnnnnnnnnnnnnnnnnnnnnnnnnnnnnnnnnnnnnnnnnnnnnnnnnnnnnnnnnnnnnnnnnnnnnnnnnnnnnnnnnnnnnnnnnnnnnnnnnnnnnnnnnnnnnnnnnnnnnnnnnnnnnnnnnnnnnnnnnnnnnnnnnnnnnnnnnnnnnnnnnnnnnnnnnnnnnnnnnnnnnnnnnnnnnnnnnnnnnnnnnnnnnnnnnnnnnnnnnnnnnnnnnnnnnnnnnnnnnnnnnnnnnnnnnnnnnnnnnnnnnnnnnnnnnnnnnnnnnnnnnnnnnnnnnnnnnnnnnnnnnnnnnnnnnnnnnnnnnnnnnnnnnnnnnnnnnnnnnnnnnnnnnnnnnnnnnnnnnnnnnnnnnnnnnnnnnnnnnnnnnnnnnnnnnnnnnnnnnnnnnnnnnnnnnnnnnnnnnnnnnnnnnnnnnnnnnnnnnnnnnnnnnnnnnnnnnnnnnnnnnnnnnnnnnnnnnnnnnnnnnnnnnnnnnnnnnnnnnnnnnnnnnnnnnnnnnnnnnnnnnnnnnnnnnnnnnnnnnnnnnnnnnnnnnnnnnnnnnnnnnnnnnnnnnnnnnnnnnnnnnnnnnnnnnnnnnnnnnnnnnnnnnnnnnnnnnnnnnnnnnnnnnnnnnnnnnnnnnnnnnnnnnnnnnnnnnnnnnnnnnnnnnnnnnnnnnnnnnnnnnnnnnnnnnnnnnnnnnnnnnnnnnnnnnnnnnnnnnnnnnnnnnnnnnnnnnnnnnnnnnnnnnnnnnnnnnnnnnnnnnnnnnnnnnnnnnnnnnnnnnnnnnnnnnnnnnnnnnnnnnnnnnnnnnnnnnnnnnnnnnnnnnnnnnnnnnnnnnnnnnnnnnnnnnnnnnnnnnnnnnnnnnnnnnnnnnnnnnnnnnnnnnnnnnnnnnnnnnnnnnnnnnnnnnnnnnnnnnnnnnnnnnnnnnnnnnnnnnnnnnnnnnnnnnnnnnnnnnnnnnnnnnnnnnnnnnnnnnnnnnnnnnnnnnnnnnnnnnnnnnnnnnnnnnnnnnnnnnnnnnnnnnnnnnnnnnnnnnnnnnnnnnnnnnnnnnnnnnnnnnnnnnnnnnnnnnnnnnnnnnnnnnnnnnnnnnnnnnnnnnnnnnnnnnnnnnnnnnnnnnnnnnnnnnnnnnnnnnnnnnnnnnnnnnnnnnnnnnnnnnnnnnnnnnnnnnnnnnnnnnnnnnnnnnnnnnnnnnnnnnnnnnnnnnnnnnnnnnnnnnnnnnnnnnnnnnnnnnnnnnnnnnnnnnnnnnnnnnnnnnnnnnnnnnnnnnnnnnnnnnnnnnnnnnnnnnnnnnnnnnnnnnnnnnnnnnnnnnnnnnnnnnnnnnnnnnnnnnnnnnnnnnnnnnnnnnnnnnnnnnnnnnnnnnnnnnnnnnnnnnnnnnnnnnnnnnnnnnnnnnnnnnnnnnnnnnnnnnnnnnnnnnnnnnnnnnnnnnnnnnnnnnnnnnnnnnnnnnnnnnnnnnnnnnnnnnnnnnnnnnnnnnnnnnnnnnnnnnnnnnnnnnnnnnnnnnnnnnnnnnnnnnnnnnnnnnnnnnnnnnnnnnnnnnnnnnnnnnnnnnnnnnnnnnnnnnnnnnnnnnnnnnnnnnnnnnnnnnnnnnnnnnnnnnnnnnnnnnnnnnnnnnnnnnnnnnnnnnnnnnnnnnnnnnnnnnnnnnnnnnnnnnnnnnnnnnnnnnnnnnnnnnnnnnnnnnnnnnnnnnnnnnnnnnnnnnnnnnnnnnnnnnnnnnnnnnnnnnnnnnnnnnnnnnnnnnnnnnnnnnnnnnnnnnnnnnnnnnnnnnnnnnnnnnnnnnnnnnnnnnnnnnnnnnnnnnnnnnnnnnnnnnnnnnnnnnnnnnnnnnnnnnnnnnnnnnnnnnnnnnnnnnnnnnnnnnnnnnnnnnnnnnnnnnnnnnnnnnnnnnnnnnnnnnnnnnnnnnnnnnnnnnnnnnnnnnnnnnnnnnnnnnnnnnnnnnnnnnnnnnnnnnnnnnnnnnnnnnnnnnnnnnnnnnnnnnnnnnnnnnnnnnnnnnnnnnnnnnnnnnnnnnnnnnnnnnnnnnnnnnnnnnnnnnnnnnnnnnnnnnnnnnnnnnnnnnnnnnnnnnnnnnnnnnnnnnnnnnnnnnnnnnnnnnnnnnnnnnnnnnnnnnnnnnnnnnnnnnnnnnnnnnnnnnnnnnnnnnnnnnnnnnnnnnnnnnnnnnnnnnnnnnnnnnnnnnnnnnnnnnnnnnnnnnnnnnnnnnnnnnnnnnnnnnnnnnnnnnnnnnnnnnnnnnnnnnnnnnnnnnnnnnnnnnnnnnnnnnnnnnnnnnnnnnnnnnnnnnnnnnnnnnnnnnnnnnnnnnnnnnnnnnnnnnnnnnnnnnnnnnnnnnnnnnnnnnnnnnnnnnnnnnnnnnnnnnnnnnnnnnnnnnnnnnnnnnnnnnnnnnnnnnnnnnnnnnnnnnnnnnnnnnnnnnnnnnnnnnnnnnnnnnnnnnnnnnnnnnnnnnnnnnnnnnnnnnnnnnnnnnnnnnnnnnnnnnnnnnnnnnnnnnnnnnnnnnnnnnnnnnnnnnnnnnnnnnnnnnnnnnnnnnnnnnnnnnnnnnnnnnnnnnnnnnnnnnnnnnnnnnnnnnnnnnnnnnnnnnnnnnnnnnnnnnnnnnnnnnnnnnnnnnnnnnnnnnnnnnnnnnnnnnnnnnnnnnnnnnnnnnnnnnnnnnnnnnnnnnnnnnnnnnnnnnnnnnnnnnnnnnnnnnnnnnnnnnnnnnnnnnnnnnnnnnnnnnnnnnnnnnnnnnnnnnnnnnnnnnnnnnnnnnnnnnnnnnnnnnnnnnnnnnnnnnnnnnnnnnnnnnnnnnnnnnnnnnnnnnnnnnnnnnnnnnnnnnnnnnnnnnnnnnnnnnnnnnnnnnnnnnnnnnnnnnnnnnnnnnnnnnnnnnnnnnnnnnnnnnnnnnnnnnnnnnnnnnnnnnnnnnnnnnnnnnnnnnnnnnnnnnnnnnnnnnnnnnnnnnnnnnnnnnnnnnnnnnnnnnnnnnnnnnnnnnnnnnnnnnnnnnnnnnnnnnnnnnnnnnnnnnnnnnnnnnnnnnnnnnnnnnnnnnnnnnnnnnnnnnnnnnnnnnnnnnnnnnnnnnnnnnnnnnnnnnnnnnnnnnnnnnnnnnnnnnnnnnnnnnnnnnnnnnnnnnnnnnnnnnnnnnnnnnnnnnnnnnnnnnnnnnnnnnnnnnnnnnnnnnnnnnnnnnnnnnnnnnnnnnnnnnnnnnnnnnnnnnnnnnnnnnnnnnnnnnnnnnnnnnnnnnnnnnnnnnnnnnnnnnnnnnnnnnnnnnnnnnnnnnnnnnnnnnnnnnnnnnnnnnnnnnnnnnnnnnnnnnnnnnnnnnnnnnnnnnnnnnnnnnnnnnnnnnnnnnnnnnnnnnnnnnnnnnnnnnnnnnnnnnnnnnnnnnnnnnnnnnnnnnnnnnnnnnnnnnnnnnnnnnnnnnnnnnnnnnnnnnnnnnnnnnnnnnnnnnnnnnnnnnnnnnnnnnnnnnnnnnnnnnnnnnnnnnnnnnnnnnnnnnnnnnnnnnnnnnnnnnnnnnnnnnnnnnnnnnnnnnnnnnnnnnnnnnnnnnnnnnnnnnnnnnnnnnnnnnnnnnnnnnnnnnnnnnnnnnnnnnnnnnnnnnnnnnnnnnnnnnnnnnnnnnnnnnnnnnnnnnnnnnnnnnnnnnnnnnnnnnnnnnnnnnnnnnnnnnnnnnnnnnnnnnnnnnnnnnnnnnnnnnnnnnnnnnnnnnnnnnnnnnnnnnnnnnnnnnnnnnnnnnnnnnnnnnnnnnnnnnnnnnnnnnnnnnnnnnnnnnnnnnnnnnnnnnnnnnnnnnnnnnnnnnnnnnnnnnnnnnnnnnnnnnnnnnnnnnnnnnnnnnnnnnnnnnnnnnnnnnnnnnnnnnnnnnnnnnnnnnnnnnnnnnnnnnnnnnnnnnnnnnnnnnnnnnnnnnnnnnnnnnnnnnnnnnnnnnnnnnnnnnnnnnnnnnnnnnnnnnnnnnnnnnnnnnnnnnnnnnnnnnnnnnnnnnnnnnnnnnnnnnnnnnnnnnnnnnnnnnnnnnnnnnnnnnnnnnnnnnnnnnnnnnnnnnnnnnnnnnnnnnnnnnnnnnnnnnnnnnnnnnnnnnnnnnnnnnnnnnnnnnnnnnnnnnnnnnnnnnnnnnnnnnnnnnnnnnnnnnnnnnnnnnnnnnnnnnnnnnnnnnnnnnnnnnnnnnnnnnnnnnnnnnnnnnnnnnnnnnnnnnnnnnnnnnnnnnnnnnnnnnnnnnnnnnnnnnnnnnnnnnnnnnnnnnnnnnnnnnnnnnnnnnnnnnnnnnnnnnnnnnnnnnnnnnnnnnnnnnnnnnnnnnnnnnnnnnnnnnnnnnnnnnnnnnnnnnnnnnnnnnnnnnnnnnnnnnnnnnnnnnnnnnnnnnnnnnnnnnnnnnnnnnnnnnnnnnnnnnnnnnnnnnnnnnnnnnnnnnnnnnnnnnnnnnnnnnnnnnnnnnnnnnnnnnnnnnnnnnnnnnnnnnnnnnnnnnnnnnnnnnnnnnnnnnnnnnnnnnnnnnnnnnnnnnnnnnnnnnnnnnnnnnnnnnnnnnnnnnnnnnnnnnnnnnnnnnnnnnnnnnnnnnnnnnnnnnnnnnnnnnnnnnnnnnnnnnnnnnnnnnnnnnnnnnnnnnnnnnnnnnnnnnnnnnnnnnnnnnnnnnnnnnnnnnnnnnnnnnnnnnnnnnnnnnnnnnnnnnnnnnnnnnnnnnnnnnnnnnnnnnnnnnnnnnnnnnnnnnnnnnnnnnnnnnnnnnnnnnnnnnnnnnnnnnnnnnnnnnnnnnnnnnnnnnnnnnnnnnnnnnnnnnnnnnnnnnnnnnnnnnnnnnnnnnnnnnnnnnnnnnnnnnnnnnnnnnnnnnnnnnnnnnnnnnnnnnnnnnnnnnnnnnnnnnnnnnnnnnnnnnnnnnnnnnnnnnnnnnnnnnnnnnnnnnnnnnnnnnnnnnnnnnnnnnnnnnnnnnnnnnnnnnnnnnnnnnnnnnnnnnnnnnnnnnnnnnnnnnnnnnnnnnnnnnnnnnnnnnnnnnnnnnnnnnnnnnnnnnnnnnnnnnnnnnnnnnnnnnnnnnnnnnnnnnnnnnnnnnnnnnnnnnnnnnnnnnnnnnnnnnnnnnnnnnnnnnnnnnnnnnnnnnnnnnnnnnnnnnnnnnnnnnnnnnnnnnnnnnnnnnnnnnnnnnnnnnnnnnnnnnnnnnnnnnnnnnnnnnnnnnnnnnnnnnnnnnnnnnnnnnnnnnnnnnnnnnnnnnnnnnnnnnnnnnnnnnnnnnnnnnnnnnnnnnnnnnnnnnnnnnnnnnnnnnnnnnnnnnnnnnnnnnnnnnnnnnnnnnnnnnnnnnnnnnnnnnnnnnnnnnnnnnnnnnnnnnnnnnnnnnnnnnnnnnnnnnnnnnnnnnnnnnnnnnnnnnnnnnnnnnnnnnnnnnnnnnnnnnnnnnnnnnnnnnnnnnnnnnnnnnnnnnnnnnnnnnnnnnnnnnnnnnnnnnnnnnnnnnnnnnnnnnnnnnnnnnnnnnnnnnnnnnnnnnnnnnnnnnnnnnnnnnnnnnnnnnnnnnnnnnnnnnnnnnnnnnnnnnnnnnnnnnnnnnnnnnnnnnnnnnnnnnnnnnnnnnnnnnnnnnnnnnnnnnnnnnnnnnnnnnnnnnnnnnnnnnnnnnnnnnnnnnnnnnnnnnnnnnnnnnnnnnnnnnnnnnnnnnnnnnnnnnnnnnnnnnnnnnnnnnnnnnnnnnnnnnnnnnnnnnnnnnnnnnnnnnnnnnnnnnnnnnnnnnnnnnnnnnnnnnnnnnnnnnnnnnnnnnnnnnnnnnnnnnnnnnnnnnnnnnnnnnnnnnnnnnnnnnnnnnnnnnnnnnnnnnnnnnnnnnnnnnnnnnnnnnnnnnnnnnnnnnnnnnnnnnnnnnnnnnnnnnnnnnnnnnnnnnnnnnnnnnnnnnnnnnnnnnnnnnnnnnnnnnnnnnnnnnnnnnnnnnnnnnnnnnnnnnnnnnnnnnnnnnnnnnnnnnnnnnnnnnnnnnnnnnnnnnnnnnnnnnnnnnnnnnnnnnnnnnnnnnnnnnnnnnnnnnnnnnnnnnnnnnnnnnnnnnnnnnnnnnnnnnnnnnnnnnnnnnnnnnnnnnnnnnnnnnnnnnnnnnnnnnnnnnnnnnnnnnnnnnnnnnnnnnnnnnnnnnnnnnnnnnnnnnnnnnnnnnnnnnnnnnnnnnnnnnnnnnnnnnnnnnnnnnnnnnnnnnnnnnnnnnnnnnnnnnnnnnnnnnnnnnnnnnnnnnnnnnnnnnnnnnnnnnnnnnnnnnnnnnnnnnnnnnnnnnnnnnnnnnnnnnnnnnnnnnnnnnnnnnnnnnnnnnnnnnnnnnnnnnnnnnnnnnnnnnnnnnnnnnnnnnnnnnnnnnnnnnnnnnnnnnnnnnnnnnnnnnnnnnnnnnnnnnnnnnnnnnnnnnnnnnnnnnnnnnnnnnnnnnnnnnnnnnnnnnnnnnnnnnnnnnnnnnnnnnnnnnnnnnnnnnnnnnnnnnnnnnnnnnnnnnnnnnnnnnnnnnnnnnnnnnnnnnnnnnnnnnnnnnnnnnnnnnnnnnnnnnnnnnnnnnnnnnnnnnnnnnnnnnnnnnnnnnnnnnnnnnnnnnnnnnnnnnnnnnnnnnnnnnnnnnnnnnnnnnnnnnnnnnnnnnnnnnnnnnnnnnnnnnnnnnnnnnnnnnnnnnnnnnnnnnnnnnnnnnnnnnnnnnnnnnnnnnnnnnnnnnnnnnnnnnnnnnnnnnnnnnnnnnnnnnnnnnnnnnnnnnnnnnnnnnnnnnnnnnnnnnnnnnnnnnnnnnnnnnnnnnnnnnnnnnnnnnnnnnnnnnnnnnnnnnnnnnnnnnnnnnnnnnnnnnnnnnnnnnnnnnnnnnnnnnnnnnnnnnnnnnnnnnnnnnnnnnnnnnnnnnnnnnnnnnnnnnnnnnnnnnnnnnnnnnnnnnnnnnnnnnnnnnnnnnnnnnnnnnnnnnnnnnnnnnnnnnnnnnnnnnnnnnnnnnnnnnnnnnnnnnnnnnnnnnnnnnnnnnnnnnnnnnnnnnnnnnnnnnnnnnnnnnnnnnnnnnnnnnnnnnnnnnnnnnnnnnnnnnnnnnnnnnnnnnnnnnnnnnnnnnnnnnnnnnnnnnnnnnnnnnnnnnnnnnnnnnnnnnnnnnnnnnnnnnnnnnnnnnnnnnnnnnnnnnnnnnnnnnnnnnnnnnnnnnnnnnnnnnnnnnnnnnnnnnnnnnnnnnnnnnnnnnnnnnnnnnnnnnnnnnnnnnnnnnnnnnnnnnnnnnnnnnnnnnnnnnnnnnnnnnnnnnnnnnnnnnnnnnnnnnnnnnnnnnnnnnnnnnnnnnnnnnnnnnnnnnnnnnnnnnnnnnnnnnnnnnnnnnnnnnnnnnnnnnnnnnnnnnnnnnnnnnnnnnnnnnnnnnnnnnnnnnnnnnnnnnnnnnnnnnnnnnnnnnnnnnnnnnnnnnnnnnnnnnnnnnnnnnnnnnnnnnnnnnnnnnnnnnnnnnnnnnnnnnnnnnnnnnnnnnnnnnnnnnnnnnnnnnnnnnnnnnnnnnnnnnnnnnnnnnnnnnnnnnnnnnnnnnnnnnnnnnnnnnnnnnnnnnnnnnnnnnnnnnnnnnnnnnnnnnnnnnnnnnnnnnnnnnnnnnnnnnnnnnnnnnnnnnnnnnnnnnnnnnnnnnnnnnnnnnnnnnnnnnnnnnnnnnnnnnnnnnnnnnnnnnnnnnnnnnnnnnnnnnnnnnnnnnnnnnnnnnnnnnnnnnnnnnnnnnnnnnnnnnnnnnnnnnnnnnnnnnnnnnnnnnnnnnnnnnnnnnnnnnnnnnnnnnnnnnnnnnnnnnnnnnnnnnnnnnnnnnnnnnnnnnnnnnnnnnnnnnnnnnnnnnnnnnnnnnnnnnnnnnnnnnnnnnnnnnnnnnnnnnnnnnnnnnnnnnnnnnnnnnnnnnnnnnnnnnnnnnnnnnnnnnnnnnnnnnnnnnnnnnnnnnnnnnnnnnnnnnnnnnnnnnnnnnnnnnnnnnnnnnnnnnnnnnnnnnnnnnnnnnnnnnnnnnnnnnnnnnnnnnnnnnnnnnnnnnnnnnnnnnnnnnnnnnnnnnnnnnnnnnnnnnnnnnnnnnnnnnnnnnnnnnnnnnnnnnnnnnnnnnnnnnnnnnnnnnnnnnnnnnnnnnnnnnnnnnnnnnnnnnnnnnnnnnnnnnnnnnnnnnnnnnnnnnnnnnnnnnnnnnnnnnnnnnnnnnnnnnnnnnnnnnnnnnnnnnnnnnnnnnnnnnnnnnnnnnnnnnnnnnnnnnnnnnnnnnnnnnnnnnnnnnnnnnnnnnnnnnnnnnnnnnnnnnnnnnnnnnnnnnnnnnnnnnnnnnnnnnnnnnnnnnnnnnnnnnnnnnnnnnnnnnnnnnnnnnnnnnnnnnnnnnnnnnnnnnnnnnnnnnnnnnnnnnnnnnnnnnnnnnnnnnnnnnnnnnnnnnnnnnnnnnnnnnnnnnnnnnnnnnnnnnnnnnnnnnnnnnnnnnnnnnnnnnnnnnnnnnnnnnnnnnnnnnnnnnnnnnnnnnnnnnnnnnnnnnnnnnnnnnnnnnnnnnnnnnnnnnnnnnnnnnnnnnnnnnnnnnnnnnnnnnnnnnnnnnnnnnnnnnnnnnnnnnnnnnnnnnnnnnnnnnnnnnnnnnnnnnnnnnnnnnnnnnnnnnnnnnnnnnnnnnnnnnnnnnnnnnnnnnnnnnnnnnnnnnnnnnnnnnnnnnnnnnnnnnnnnnnnnnnnnnnnnnnnnnnnnnnnnnnnnnnnnnnnnnnnnnnnnnnnnnnnnnnnnnnnnnnnnnnnnnnnnnnnnnnnnnnnnnnnnnnnnnnnnnnnnnnnnnnnnnnnnnnnnnnnnnnnnnnnnnnnnnnnnnnnnnnnnnnnnnnnnnnnnnnnnnnnnnnnnnnnnnnnnnnnnnnnnnnnnnnnnnnnnnnnnnnnnnnnnnnnnnnnnnnnnnnnnnnnnnnnnnnnnnnnnnnnnnnnnnnnnnnnnnnnnnnnnnnnnnnnnnnnnnnnnnnnnnnnnnnnnnnnnnnnnnnnnnnnnnnnnnnnnnnnnnnnnnnnnnnnnnnnnnnnnnnnnnnnnnnnnnnnnnnnnnnnnnnnnnnnnnnnnnnnnnnnnnnnnnnnnnnnnnnnnnnnnnnnnnnnnnnnnnnnnnnnnnnnnnnnnnnnnnnnnnnnnnnnnnnnnnnnnnnnnnnnnnnnnnnnnnnnnnnnnnnnnnnnnnnnnnnnnnnnnnnnnnnnnnnnnnnnnnnnnnnnnnnnnnnnnnnnnnnnnnnnnnnnnnnnnnnnnnnnnnnnnnnnnnnnnnnnnnnnnnnnnnnnnnnnnnnnnnnnnnnnnnnnnnnnnnnnnnnnnnnnnnnnnnnnnnnnnnnnnnnnnnnnnnnnnnnnnnnnnnnnnnnnnnnnnnnnnnnnnnnnnnnnnnnnnnnnnnnnnnnnnnnnnnnnnnnnnnnnnnnnnnnnnnnnnnnnnnnnnnnnnnnnnnnnnnnnnnnnnnnnnnnnnnnnnnnnnnnnnnnnnnnnnnnnnnnnnnnnnnnnnnnnnnnnnnnnnnnnnnnnnnnnnnnnnnnnnnnnnnnnnnnnnnnnnnnnnnnnnnnnnnnnnnnnnnnnnnnnnnnnnnnnnnnnnnnnnnnnnnnnnnnnnnnnnnnnnnnnnnnnnnnnnnnnnnnnnnnnnnnnnnnnnnnnnnnnnnnnnnnnnnnnnnnnnnnnnnnnnnnnnnnnnnnnnnnnnnnnnnnnnnnnnnnnnnnnnnnnnnnnnnnnnnnnnnnnnnnnnnnnnnnnnnnnnnnnnnnnnnnnnnnnnnnnnnnnnnnnnnnnnnnnnnnnnnnnnnnnnnnnnnnnnnnnnnnnnnnnnnnnnnnnnnnnnnnnnnnnnnnnnnnnnnnnnnnnnnnnnnnnnnnnnnnnnnnnnnnnnnnnnnnnnnnnnnnnnnnnnnnnnnnnnnnnnnnnnnnnnnnnnnnnnnnnnnnnnnnnnnnnnnnnnnnnnnnnnnnnnnnnnnnnnnnnnnnnnnnnnnnnnnnnnnnnnnnnnnnnnnnnnnnnnnnnnnnnnnnnnnnnnnnnnnnnnnnnnnnnnnnnnnnnnnnnnnnnnnnnnnnnnnnnnnnnnnnnnnnnnnnnnnnnnnnnnnnnnnnnnnnnnnnnnnnnnnnnnnnnnnnnnnnnnnnnnnnnnnnnnnnnnnnnnnnnnnnnnnnnnnnnnnnnnnnnnnnnnnnnnnnnnnnnnnnnnnnnnnnnnnnnnnnnnnnnnnnnnnnnnnnnnnnnnnnnnnnnnnnnnnnnnnnnnnnnnnnnnnnnnnnnnnnnnnnnnnnnnnnnnnnnnnnnnnnnnnnnnnnnnnnnnnnnnnnnnnnnnnnnnnnnnnnnnnnnnnnnnnnnnnnnnnnnnnnnnnnnnnnnnnnnnnnnnnnnnnnnnnnnnnnnnnnnnnnnnnnnnnnnnnnnnnnnnnnnnnnnnnnnnnnnnnnnnnnnnnnnnnnnnnnnnnnnnnnnnnnnnnnnnnnnnnnnnnnnnnnnnnnnnnnnnnnnnnnnnnnnnnnnnnnnnnnnnnnnnnnnnnnnnnnnnnnnnnnnnnnnnnnnnnnnnnnnnnnnnnnnnnnnnnnnnnnnnnnnnnnnnnnnnnnnnnnnnnnnnnnnnnnnnnnnnnnnnnnnnnnnnnnnnnnnnnnnnnnnnnnnnnnnnnnnnnnnnnnnnnnnnnnnnnnnnnnnnnnnnnnnnnnnnnnnnnnnnnnnnnnnnnnnnnnnnnnnnnnnnnnnnnnnnnnnnnnnnnnnnnnnnnnnnnnnnnnnnnnnnnnnnnnnnnnnnnnnnnnnnnnnnnnnnnnnnnnnnnnnnnnnnnnnnnnnnnnnnnnnnnnnnnnnnnnnnnnnnnnnnnnnnnnnnnnnnnnnnnnnnnnnnnnnnnnnnnnnnnnnnnnnnnnnnnnnnnnnnnnnnnnnnnnnnnnnnnnnnnnnnnnnnnnnnnnnnnnnnnnnnnnnnnnnnnnnnnnnnnnnnnnnnnnnnnnnnnnnnnnnnnnnnnnnnnnnnnnnnnnnnnnnnnnnnnnnnnnnnnnnnnnnnnnnnnnnnnnnnnnnnnnnnnnnnnnnnnnnnnnnnnnnnnnnnnnnnnnnnnnnnnnnnnnnnnnnnnnnnnnnnnnnnnnnnnnnnnnnnnnnnnnnnnnnnnnnnnnnnnnnnnnnnnnnnnnnnnnnnnnnnnnnnnnnnnnnnnnnnnnnnnnnnnnnnnnnnnnnnnnnnnnnnnnnnnnnnnnnnnnnnnnnnnnnnnnnnnnnnnnnnnnnnnnnnnnnnnnnnnnnnnnnnnnnnnnnnnnnnnnnnnnnnnnnnnnnnnnnnnnnnnnnnnnnnnnnnnnnnnnnnnnnnnnnnnnnnnnnnnnnnnnnnnnnnnnnnnnnnnnnnnnnnnnnnnnnnnnnnnnnnnnnnnnnnnnnnnnnnnnnnnnnnnnnnnnnnnnnnnnnnnnnnnnnnnnnnnnnnnnnnnnnnnnnnnnnnnnnnnnnnnnnnnnnnnnnnnnnnnnnnnnnnnnnnnnnnnnnnnnnnnnnnnnnnnnnnnnnnnnnnnnnnnnnnnnnnnnnnnnnnnnnnnnnnnnnnnnnnnnnnnnnnnnnnnnnnnnnnnnnnnnnnnnnnnnnnnnnnnnnnnnnnnnnnnnnnnnnnnnnnnnnnnnnnnnnnnnnnnnnnnnnnnnnnnnnnnnnnnnnnnnnnnnnnnnnnnnnnnnnnnnnnnnnnnnnnnnnnnnnnnnnnnnnnnnnnnnnnnnnnnnnnnnnnnnnnnnnnnnnnnnnnnnnnnnnnnnnnnnnnnnnnnnnnnnnnnnnnnnnnnnnnnnnnnnnnnnnnnnnnnnnnnnnnnnnnnnnnnnnnnnnnnnnnnnnnnnnnnnnnnnnnnnnnnnnnnnnnnnnnnnnnnnnnnnnnnnnnnnnnnnnnnnnnnnnnnnnnnnnnnnnnnnnnnnnnnnnnnnnnnnnnnnnnnnnnnnnnnnnnnnnnnnnnnnnnnnnnnnnnnnnnnnnnnnnnnnnnnnnnnnnnnnnnnnnnnnnnnnnnnnnnnnnnnnnnnnnnnnnnnnnnnnnnnnnnnnnnnnnnnnnnnnnnnnnnnnnnnnnnnnnnnnnnnnnnnnnnnnnnnnnnnnnnnnnnnnnnnnnnnnnnnnnnnnnnnnnnnnnnnnnnnnnnnnnnnnnnnnnnnnnnnnnnnnnnnnnnnnnnnnnnnnnnnnnnnnnnnnnnnnnnnnnnnnnnnnnnnnnnnnnnnnnnnnnnnnnnnnnnnnnnnnnnnnnnnnnnnnnnnnnnnnnnnnnnnnnnnnnnnnnnnnnnnnnnnnnnnnnnnnnnnnnnnnnnnnnnnnnnnnnnnnnnnnnnnnnnnnnnnnnnnnnnnnnnnnnnnnnnnnnnnnnnnnnnnnnnnnnnnnnnnnnnnnnnnnnnnnnnnnnnnnnnnnnnnnnnnnnnnnnnnnnnnnnnnnnnnnnnnnnnnnnnnnnnnnnnnnnnnnnnnnnnnnnnnnnnnnnnnnnnnnnnnnnnnnnnnnnnnnnnnnnnnnnnnnnnnnnnnnnnnnnnnnnnnnnnnnnnnnnnnnnnnnnnnnnnnnnnnnnnnnnnnnnnnnnnnnnnnnnnnnnnnnnnnnnnnnnnnnnnnnnnnnnnnnnnnnnnnnnnnnnnnnnnnnnnnnnnnnnnnnnnnnnnnnnnnnnnnnnnnnnnnnnnnnnnnnnnnnnnnnnnnnnnnnnnnnnnnnnnnnnnnnnnnnnnnnnnnnnnnnnnnnnnnnnnnnnnnnnnnnnnnnnnnnnnnnnnnnnnnnnnnnnnnnnnnnnnnnnnnnnnnnnnnnnnnnnnnnnnnnnnnnnnnnnnnnnnnnnnnnnnnnnnnnnnnnnnnnnnnnnnnnnnnnnnnnnnnnnnnnnnnnnnnnnnnnnnnnnnnnnnnnnnnnnnnnnnnnnnnnnnnnnnnnnnnnnnnnnnnnnnnnnnnnnnnnnnnnnnnnnnnnnnnnnnnnnnnnnnnnnnnnnnnnnnnnnnnnnnnnnnnnnnnnnnnnnnnnnnnnnnnnnnnnnnnnnnnnnnnnnnnnnnnnnnnnnnnnnnnnnnnnnnnnnnnnnnnnnnnnnnnnnnnnnnnnnnnnnnnnnnnnnnnnnnnnnnnnnnnnnnnnnnnnnnnnnnnnnnnnnnnnnnnnnnnnnnnnnnnnnnnnnnnnnnnnnnnnnnnnnnnnnnnnnnnnnnnnnnnnnnnnnnnnnnnnnnnnnnnnnnnnnnnnnnnnnnnnnnnnnnnnnnnnnnnnnnnnnnnnnnnnnnnnnnnnnnnnnnnnnnnnnnnnnnnnnnnnnnnnnnnnnnnnnnnnnnnnnnnnnnnnnnnnnnnnnnnnnnnnnnnnnnnnnnnnnnnnnnnnnnnnnnnnnnnnnnnnnnnnnnnnnnnnnnnnnnnnnnnnnnnnnnnnnnnnnnnnnnnnnnnnnnnnnnnnnnnnnnnnnnnnnnnnnnnnnnnnnnnnnnnnnnnnnnnnnnnnnnnnnnnnnnnnnnnnnnnnnnnnnnnnnnnnnnnnnnnnnnnnnnnnnnnnnnnnnnnnnnnnnnnnnnnnnnnnnnnnnnnnnnnnnnnnnnnnnnnnnnnnnnnnnnnnnnnnnnnnnnnnnnnnnnnnnnnnnnnnnnnnnnnnnnnnnnnnnnnnnnnnnnnnnnnnnnnnnnnnnnnnnnnnnnnnnnnnnnnnnnnnnnnnnnnnnnnnnnnnnnnnnnnnnnnnnnnnnnnnnnnnnnnnnnnnnnnnnnnnnnnnnnnnnnnnnnnnnnnnnnnnnnnnnnnnnnnnnnnnnnnnnnnnnnnnnnnnnnnnnnnnnnnnnnnnnnnnnnnnnnnnnnnnnnnnnnnnnnnnnnnnnnnnnnnnnnnnnnnnnnnnnnnnnnnnnnnnnnnnnnnnnnnnnnnnnnnnnnnnnnnnnnnnnnnnnnnnnnnnnnnnnnnnnnnnnnnnnnnnnnnnnnnnnnnnnnnnnnnnnnnnnnnnnnnnnnnnnnnnnnnnnnnnnnnnnnnnnnnnnnnnnnnnnnnnnnnnnnnnnnnnnnnnnnnnnnnnnnnnnnnnnnnnnnnnnnnnnnnnnnnnnnnnnnnnnnnnnnnnnnnnnnnnnnnnnnnnnnnnnnnnnnnnnnnnnnnnnnnnnnnnnnnnnnnnnnnnnnnnnnnnnnnnnnnnnnnnnnnnnnnnnnnnnnnnnnnnnnnnnnnnnnnnnnnnnnnnnnnnnnnnnnnnnnnnnnnnnnnnnnnnnnnnnnnnnnnnnnnnnnnnnnnnnnnnnnnnnnnnnnnnnnnnnnnnnnnnnnnnnnnnnnnnnnnnnnnnnnnnnnnnnnnnnnnnnnnnnnnnnnnnnnnnnnnnnnnnnnnnnnnnnnnnnnnnnnnnnnnnnnnnnnnnnnnnnnnnnnnnnnnnnnnnnnnnnnnnnnnnnnnnnnnnnnnnnnnnnnnnnnnnnnnnnnnnnnnnnnnnnnnnnnnnnnnnnnnnnnnnnnnnnnnnnnnnnnnnnnnnnnnnnnnnnnnnnnnnnnnnnnnnnnnnnnnnnnnnnnnnnnnnnnnnnnnnnnnnnnnnnnnnnnnnnnnnnnnnnnnnnnnnnnnnnnnnnnnnnnnnnnnnnnnnnnnnnnnnnnnnnnnnnnnnnnnnnnnnnnnnnnnnnnnnnnnnnnnnnnnnnnnnnnnnnnnnnnnnnnnnnnnnnnnnnnnnnnnnnnnnnnnnnnnnnnnnnnnnnnnnnnnnnnnnnnnnnnnnnnnnnnnnnnnnnnnnnnnnnnnnnnnnnnnnnnnnnnnnnnnnnnnnnnnnnnnnnnnnnnnnnnnnnnnnnnnnnnnnnnnnnnnnnnnnnnnnnnnnnnnnnnnnnnnnnnnnnnnnnnnnnnnnnnnnnnnnnnnnnnnnnnnnnnnnnnnnnnnnnnnnnnnnnnnnnnnnnnnnnnnnnnnnnnnnnnnnnnnnnnnnnnnnnnnnnnnnnnnnnnnnnnnnnnnnnnnnnnnnnnnnnnnnnnnnnnnnnnnnnnnnnnnnnnnnnnnnnnnnnnnnnnnnnnnnnnnnnnnnnnnnnnnnnnnnnnnnnnnnnnnnnnnnnnnnnnnnnnnnnnnnnnnnnnnnnnnnnnnnnnnnnnnnnnnnnnnnnnnnnnnnnnnnnnnnnnnnnnnnnnnnnnnnnnnnnnnnnnnnnnnnnnnnnnnnnnnnnnnnnnnnnnnnnnnnnnnnnnnnnnnnnnnnnnnnnnnnnnnnnnnnnnnnnnnnnnnnnnnnnnnnnnnnnnnnnnnnnnnnnnnnnnnnnnnnnnnnnnnnnnnnnnnnnnnnnnnnnnnnnnnnnnnnnnnnnnnnnnnnnnnnnnnnnnnnnnnnnnnnnnnnnnnnnnnnnnnnnnnnnnnnnnnnnnnnnnnnnnnnnnnnnnnnnnnnnnnnnnnnnnnnnnnnnnnnnnnnnnnnnnnnnnnnnnnnnnnnnnnnnnnnnnnnnnnnnnnnnnnnnnnnnnnnnnnnnnnnnnnnnnnnnnnnnnnnnnnnnnnnnnnnnnnnnnnnnnnnnnnnnnnnnnnnnnnnnnnnnnnnnnnnnnnnnnnnnnnnnnnnnnnnnnnnnnnnnnnnnnnnnnnnnnnnnnnnnnnnnnnnnnnnnnnnnnnnnnnnnnnnnnnnnnnnnnnnnnnnnnnnnnnnnnnnnnnnnnnnnnnnnnnnnnnnnnnnnnnnnnnnnnnnnnnnnnnnnnnnnnnnnnnnnnnnnnnnnnnnnnnnnnnnnnnnnnnnnnnnnnnnnnnnnnnnnnnnnnnnnnnnnnnnnnnnnnnnnnnnnnnnnnnnnnnnnnnnnnnnnnnnnnnnnnnnnnnnnnnnnnnnnnnnnnnnnnnnnnnnnnnnnnnnnnnnnnnnnnnnnnnnnnnnnnnnnnnnnnnnnnnnnnnnnnnnnnnnnnnnnnnnnnnnnnnnnnnnnnnnnnnnnnnnnnnnnnnnnnnnnnnnnnnnnnnnnnnnnnnnnnnnnnnnnnnnnnnnnnnnnnnnnnnnnnnnnnnnnnnnnnnnnnnnnnnnnnnnnnnnnnnnnnnnnnnnnnnnnnnnnnnnnnnnnnnnnnnnnnnnnnnnnnnnnnnnnnnnnnnnnnnnnnnnnnnnnnnnnnnnnnnnnnnnnnnnnnnnnnnnnnnnnnnnnnnnnnnnnnnnnnnnnnnnnnnnnnnnnnnnnnnnnnnnnnnnnnnnnnnnnnnnnnnnnnnnnnnnnnnnnnnnnnnnnnnnnnnnnnnnnnnnnnnnnnnnnnnnnnnnnnnnnnnnnnnnnnnnnnnnnnnnnnnnnnnnnnnnnnnnnnnnnnnnnnnnnnnnnnnnnnnnnnnnnnnnnnnnnnnnnnnnnnnnnnnnnnnnnnnnnnnnnnnnnnnnnnnnnnnnnnnnnnnnnnnnnnnnnnnnnnnnnnnnnnnnnnnnnnnnnnnnnnnnnnnnnnnnnnnnnnnnnnnnnnnnnnnnnnnnnnnnnnnnnnnnnnnnnnnnnnnnnnnnnnnnnnnnnnnnnnnnnnnnnnnnnnnnnnnnnnnnnnnnnnnnnnnnnnnnnnnnnnnnnnnnnnnnnnnnnnnnnnnnnnnnnnnnnnnnnnnnnnnnnnnnnnnnnnnnnnnnnnnnnnnnnnnnnnnnnnnnnnnnnnnnnnnnnnnnnnnnnnnnnnnnnnnnnnnnnnnnnnnnnnnnnnnnnnnnnnnnnnnnnnnnnnnnnnnnnnnnnnnnnnnnnnnnnnnnnnnnnnnnnnnnnnnnnnnnnnnnnnnnnnnnnnnnnnnnnnnnnnnnnnnnnnnnnnnnnnnnnnnnnnnnnnnnnnnnnnnnnnnnnnnnnnnnnnnnnnnnnnnnnnnnnnnnnnnnnnnnnnnnnnnnnnnnnnnnnnnnnnnnnnnnnnnnnnnnnnnnnnnnnnnnnnnnnnnnnnnnnnnnnnnnnnnnnnnnnnnnnnnnnnnnnnnnnnnnnnnnnnnnnnnnnnnnnnnnnnnnnnnnnnnnnnnnnnnnnnnnnnnnnnnnnnnnnnnnnnnnnnnnnnnnnnnnnnnnnnnnnnnnnnnnnnnnnnnnnnnnnnnnnnnnnnnnnnnnnnnnnnnnnnnnnnnnnnnnnnnnnnnnnnnnnnnnnnnnnnnnnnnnnnnnnnnnnnnnnnnnnnnnnnnnnnnnnnnnnnnnnnnnnnnnnnnnnnnnnnnnnnnnnnnnnnnnnnnnnnnnnnnnnnnnnnnnnnnnnnnnnnnnnnnnnnnnnnnnnnnnnnnnnnnnnnnnnnnnnnnnnnnnnnnnnnnnnnnnnnnnnnnnnnnnnnnnnnnnnnnnnnnnnnnnnnnnnnnnnnnnnnnnnnnnnnnnnnnnnnnnnnnnnnnnnnnnnnnnnnnnnnnnnnnnnnnnnnnnnnnnnnnnnnnnnnnnnnnnnnnnnnnnnnnnnnnnnnnnnnnnnnnnnnnnnnnnnnnnnnnnnnnnnnnnnnnnnnnnnnnnnnnnnnnnnnnnnnnnnnnnnnnnnnnnnnnnnnnnnnnnnnnnnnnnnnnnnnnnnnnnnnnnnnnnnnnnnnnnnnnnnnnnnnnnnnnnnnnnnnnnnnnnnnnnnnnnnnnnnnnnnnnnnnnnnnnnnnnnnnnnnnnnnnnnnnnnnnnnnnnnnnnnnnnnnnnnnnnnnnnnnnnnnnnnnnnnnnnnnnnnnnnnnnnnnnnnnnnnnnnnnnnnnnnnnnnnnnnnnnnnnnnnnnnnnnnnnnnnnnnnnnnnnnnnnnnnnnnnnnnnnnnnnnnnnnnnnnnnnnnnnnnnnnnnnnnnnnnnnnnnnnnnnnnnnnnnnnnnnnnnnnnnnnnnnnnnnnnnnnnnnnnnnnnnnnnnnnnnnnnnnnnnnnnnnnnnnnnnnnnnnnnnnnnnnnnnnnnnnnnnnnnnnnnnnnnnnnnnnnnnnnnnnnnnnnnnnnnnnnnnnnnnnnnnnnnnnnnnnnnnnnnnnnnnnnnnnnnnnnnnnnnnnnnnnnnnnnnnnnnnnnnnnnnnnnnnnnnnnnnnnnnnnnnnnnnnnnnnnnnnnnnnnnnnnnnnnnnnnnnnnnnnnnnnnnnnnnnnnnnnnnnnnnnnnnnnnnnnnnnnnnnnnnnnnnnnnnnnnnnnnnnnnnnnnnnnnnnnnnnnnnnnnnnnnnnnnnnnnnnnnnnnnnnnnnnnnnnnnnnnnnnnnnnnnnnnnnnnnnnnnnnnnnnnnnnnnnnnnnnnnnnnnnnnnnnnnnnnnnnnnnnnnnnnnnnnnnnnnnnnnnnnnnnnnnnnnnnnnnnnnnnnnnnnnnnnnnnnnnnnnnnnnnnnnnnnnnnnnnnnnnnnnnnnnnnnnnnnnnnnnnnnnnnnnnnnnnnnnnnnnnnnnnnnnnnnnnnnnnnnnnnnnnnnnnnnnnnnnnnnnnnnnnnnnnnnnnnnnnnnnnnnnnnnnnnnnnnnnnnnnnnnnnnnnnnnnnnnnnnnnnnnnnnnnnnnnnnnnnnnnnnnnnnnnnnnnnnnnnnnnnnnnnnnnnnnnnnnnnnnnnnnnnnnnnnnnnnnnnnnnnnnnnnnnnnnnnnnnnnnnnnnnnnnnnnnnnnnnnnnnnnnnnnnnnnnnnnnnnnnnnnnnnnnnnnnnnnnnnnnnnnnnnnnnnnnnnnnnnnnnnnnnnnnnnnnnnnnnnnnnnnnnnnnnnnnnnnnnnnnnnnnnnnnnnnnnnnnnnnnnnnnnnnnnnnnnnnnnnnnnnnnnnnnnnnnnnnnnnnnnnnnnnnnnnnnnnnnnnnnnnnnnnnnnnnnnnnnnnnnnnnnnnnnnnnnnnnnnnnnnnnnnnnnnnnnnnnnnnnnnnnnnnnnnnnnnnnnnnnnnnnnnnnnnnnnnnnnnnnnnnnnnnnnnnnnnnnnnnnnnnnnnnnnnnnnnnnnnnnnnnnnnnnnnnnnnnnnnnnnnnnnnnnnnnnnnnnnnnnnnnnnnnnnnnnnnnnnnnnnnnnnnnnnnnnnnnnnnnnnnnnnnnnnnnnnnnnnnnnnnnnnnnnnnnnnnnnnnnnnnnnnnnnnnnnnnnnnnnnnnnnnnnnnnnnnnnnnnnnnnnnnnnnnnnnnnnnnnnnnnnnnnnnnnnnnnnnnnnnnnnnnnnnnnnnnnnnnnnnnnnnnnnnnnnnnnnnnnnnnnnnnnnnnnnnnnnnnnnnnnnnnnnnnnnnnnnnnnnnnnnnnnnnnnnnnnnnnnnnnnnnnnnnnnnnnnnnnnnnnnnnnnnnnnnnnnnnnnnnnnnnnnnnnnnnnnnnnnnnnnnnnnnnnnnnnnnnnnnnnnnnnnnnnnnnnnnnnnnnnnnnnnnnnnnnnnnnnnnnnnnnnnnnnnnnnnnnnnnnnnnnnnnnnnnnnnnnnnnnnnnnnnnnnnnnnnnnnnnnnnnnnnnnnnnnnnnnnnnnnnnnnnnnnnnnnnnnnnnnnnnnnnnnnnnnnnnnnnnnnnnnnnnnnnnnnnnnnnnnnnnnnnnnnnnnnnnnnnnnnnnnnnnnnnnnnnnnnnnnnnnnnnnnnnnnnnnnnnnnnnnnnnnnnnnnnnnnnnnnnnnnnnnnnnnnnnnnnnnnnnnnnnnnnnnnnnnnnnnnnnnnnnnnnnnnnnnnnnnnnnnnnnnnnnnnnnnnnnnnnnnnnnnnnnnnnnnnnnnnnnnnnnnnnnnnnnnnnnnnnnnnnnnnnnnnnnnnnnnnnnnnnnnnnnnnnnnnnnnnnnnnnnnnnnnnnnnnnnnnnnnnnnnnnnnnnnnnnnnnnnnnnnnnnnnnnnnnnnnnnnnnnnnnnnnnnnnnnnnnnnnnnnnnnnnnnnnnnnnnnnnnnnnnnnnnnnnnnnnnnnnnnnnnnnnnnnnnnnnnnnnnnnnnnnnnnnnnnnnnnnnnnnnnnnnnnnnnnnnnnnnnnnnnnnnnnnnnnnnnnnnnnnnnnnnnnnnnnnnnnnnnnnnnnnnnnnnnnnnnnnnnnnnnnnnnnnnnnnnnnnnnnnnnnnnnnnnnnnnnnnnnnnnnnnnnnnnnnnnnnnnnnnnnnnnnnnnnnnnnnnnnnnnnnnnnnnnnnnnnnnnnnnnnnnnnnnnnnnnnnnnnnnnnnnnnnnnnnnnnnnnnnnnnnnnnnnnnnnnnnnnnnnnnnnnnnnnnnnnnnnnnnnnnnnnnnnnnnnnnnnnnnnnnnnnnnnnnnnnnnnnnnnnnnnnnnnnnnnnnnnnnnnnnnnnnnnnnnnnnnnnnnnnnnnnnnnnnnnnnnnnnnnnnnnnnnnnnnnnnnnnnnnnnnnnnnnnnnnnnnnnnnnnnnnnnnnnnnnnnnnnnnnnnnnnnnnnnnnnnnnnnnnnnnnnnnnnnnnnnnnnnnnnnnnnnnnnnnnnnnnnnnnnnnnnnnnnnnnnnnnnnnnnnnnnnnnnnnnnnnnnnnnnnnnnnnnnnnnnnnnnnnnnnnnnnnnnnnnnnnnnnnnnnnnnnnnnnnnnnnnnnnnnnnnnnnnnnnnnnnnnnnnnnnnnnnnnnnnnnnnnnnnnnnnnnnnnnnnnnnnnnnnnnnnnnnnnnnnnnnnnnnnnnnnnnnnnnnnnnnnnnnnnnnnnnnnnnnnnnnnnnnnnnnnnnnnnnnnnnnnnnnnnnnnnnnnnnnnnnnnnnnnnnnnnnnnnnnnnnnnnnnnnnnnnnnnnnnnnnnnnnnnnnnnnnnnnnnnnnnnnnnnnnnnnnnnnnnnnnnnnnnnnnnnnnnnnnnnnnnnnnnnnnnnnnnnnnnnnnnnnnnnnnnnnnnnnnnnnnnnnnnnnnnnnnnnnnnnnnnnnnnnnnnnnnnnnnnnnnnnnnnnnnnnnnnnnnnnnnnnnnnnnnnnnnnnnnnnnnnnnnnnnnnnnnnnnnnnnnnnnnnnnnnnnnnnnnnnnnnnnnnnnnnnnnnnnnnnnnnnnnnnnnnnnnnnnnnnnnnnnnnnnnnnnnnnnnnnnnnnnnnnnnnnnnnnnnnnnnnnnnnnnnnnnnnnnnnnnnnnnnnnnnnnnnnnnnnnnnnnnnnnnnnnnnnnnnnnnnnnnnnnnnnnnnnnnnnnnnnnnnnnnnnnnnnnnnnnnnnnnnnnnnnnnnnnnnnnnnnnnnnnnnnnnnnnnnnnnnnnnnnnnnnnnnnnnnnnnnnnnnnnnnnnnnnnnnnnnnnnnnnnnnnnnnnnnnnnnnnnnnnnnnnnnnnnnnnnnnnnnnnnnnnnnnnnnnnnnnnnnnnnnnnnnnnnnnnnnnnnnnnnnnnnnnnnnnnnnnnnnnnnnnnnnnnnnnnnnnnnnnnnnnnnnnnnnnnnnnnnnnnnnnnnnnnnnnnnnnnnnnnnnnnnnnnnnnnnnnnnnnnnnnnnnnnnnnnnnnnnnnnnnnnnnnnnnnnnnnnnnnnnnnnnnnnnnnnnnnnnnnnnnnnnnnnnnnnnnnnnnnnnnnnnnnnnnnnnnnnnnnnnnnnnnnnnnnnnnnnnnnnnnnnnnnnnnnnnnnnnnnnnnnnnnnnnnnnnnnnnnnnnnnnnnnnnnnnnnnnnnnnnnnnnnnnnnnnnnnnnnnnnnnnnnnnnnnnnnnnnnnnnnnnnnnnnnnnnnnnnnnnnnnnnnnnnnnnnnnnnnnnnnnnnnnnnnnnnnnnnnnnnnnnnnnnnnnnnnnnnnnnnnnnnnnnnnnnnnnnnnnnnnnnnnnnnnnnnnnnnnnnnnnnnnnnnnnnnnnnnnnnnnnnnnnnnnnnnnnnnnnnnnnnnnnnnnnnnnnnnnnnnnnnnnnnnnnnnnnnnnnnnnnnnnnnnnnnnnnnnnnnnnnnnnnnnnnnnnnnnnnnnnnnnnnnnnnnnnnnnnnnnnnnnnnnnnnnnnnnnnnnnnnnnnnnnnnnnnnnnnnnnnnnnnnnnnnnnnnnnnnnnnnnnnnnnnnnnnnnnnnnnnnnnnnnnnnnnnnnnnnnnnnnnnnnnnnnnnnnnnnnnnnnnnnnnnnnnnnnnnnnnnnnnnnnnnnnnnnnnnnnnnnnnnnnnnnnnnnnnnnnnnnnnnnnnnnnnnnnnnnnnnnnnnnnnnnnnnnnnnnnnnnnnnnnnnnnnnnnnnnnnnnnnnnnnnnnnnnnnnnnnnnnnnnnnnnnnnnnnnnnnnnnnnnnnnnnnnnnnnnnnnnnnnnnnnnnnnnnnnnnnnnnnnnnnnnnnnnnnnnnnnnnnnnnnnnnnnnnnnnnnnnnnnnnnnnnnnnnnnnnnnnnnnnnnnnnnnnnnnnnnnnnnnnnnnnnnnnnnnnnnnnnnnnnnnnnnnnnnnnnnnnnnnnnnnnnnnnnnnnnnnnnnnnnnnnnnnnnnnnnnnnnnnnnnnnnnnnnnnnnnnnnnnnnnnnnnnnnnnnnnnnnnnnnnnnnnnnnnnnnnnnnnnnnnnnnnnnnnnnnnnnnnnnnnnnnnnnnnnnnnnnnnnnnnnnnnnnnnnnnnnnnnnnnnnnnnnnnnnnnnnnnnnnnnnnnnnnnnnnnnnnnnnnnnnnnnnnnnnnnnnnnnnnnnnnnnnnnnnnnnnnnnnnnnnnnnnnnnnnnnnnnnnnnnnnnnnnnnnnnnnnnnnnnnnnnnnnnnnnnnnnnnnnnnnnnnnnnnnnnnnnnnnnnnnnnnnnnnnnnnnnnnnnnnnnnnnnnnnnnnnnnnnnnnnnnnnnnnnnnnnnnnnnnnnnnnnnnnnnnnnnnnnnnnnnnnnnnnnnnnnnnnnnnnnnnnnnnnnnnnnnnnnnnnnnnnnnnnnnnnnnnnnnnnnnnnnnnnnnnnnnnnnnnnnnnnnnnnnnnnnnnnnnnnnnnnnnnnnnnnnnnnnnnnnnnnnnnnnnnnnnnnnnnnnnnnnnnnnnnnnnnnnnnnnnnnnnnnnnnnnnnnnnnnnnnnnnnnnnnnnnnnnnnnnnnnnnnnnnnnnnnnnnnnnnnnnnnnnnnnnnnnnnnnnnnnnnnnnnnnnnnnnnnnnnnnnnnnnnnnnnnnnnnnnnnnnnnnnnnnnnnnnnnnnnnnnnnnnnnnnnnnnnnnnnnnnnnnnnnnnnnnnnnnnnnnnnnnnnnnnnnnnnnnnnnnnnnnnnnnnnnnnnnnnnnnnnnnnnnnnnnnnnnnnnnnnnnnnnnnnnnnnnnnnnnnnnnnnnnnnnnnnnnnnnnnnnnnnnnnnnnnnnnnnnnnnnnnnnnnnnnnnnnnnnnnnnnnnnnnnnnnnnnnnnnnnnnnnnnnnnnnnnnnnnnnnnnnnnnnnnnnnnnnnnnnnnnnnnnnnnnnnnnnnnnnnnnnnnnnnnnnnnnnnnnnnnnnnnnnnnnnnnnnnnnnnnnnnnnnnnnnnnnnnnnnnnnnnnnnnnnnnnnnnnnnnnnnnnnnnnnnnnnnnnnnnnnnnnnnnnnnnnnnnnnnnnnnnnnnnnnnnnnnnnnnnnnnnnnnnnnnnnnnnnnnnnnnnnnnnnnnnnnnnnnnnnnnnnnnnnnnnnnnnnnnnnnnnnnnnnnnnnnnnnnnnnnnnnnnnnnnnnnnnnnnnnnnnnnnnnnnnnnnnnnnnnnnnnnnnnnnnnnnnnnnnnnnnnnnnnnnnnnnnnnnnnnnnnnnnnnnnnnnnnnnnnnnnnnnnnnnnnnnnnnnnnnnnnnnnnnnnnnnnnnnnnnnnnnnnnnnnnnnnnnnnnnnnnnnnnnnnnnnnnnnnnnnnnnnnnnnnnnnnnnnnnnnnnnnnnnnnnnnnnnnnnnnnnnnnnnnnnnnnnnnnnnnnnnnnnnnnnnnnnnnnnnnnnnnnnnnnnnnnnnnnnnnnnnnnnnnnnnnnnnnnnnnnnnnnnnnnnnnnnnnnnnnnnnnnnnnnnnnnnnnnnnnnnnnnnnnnnnnnnnnnnnnnnnnnnnnnnnnnnnnnnnnnnnnnnnnnnnnnnnnnnnnnnnnnnnnnnnnnnnnnnnnnnnnnnnnnnnnnnnnnnnnnnnnnnnnnnnnnnnnnnnnnnnnnnnnnnnnnnnnnnnnnnnnnnnnnnnnnnnnnnnnnnnnnnnnnnnnnnnnnnnnnnnnnnnnnnnnnnnnnnnnnnnnnnnnnnnnnnnnnnnnnnnnnnnnnnnnnnnnnnnnnnnnnnnnnnnnnnnnnnnnnnnnnnnnnnnnnnnnnnnnnnnnnnnnnnnnnnnnnnnnnnnnnnnnnnnnnnnnnnnnnnnnnnnnnnnnnnnnnnnnnnnnnnnnnnnnnnnnnnnnnnnnnnnnnnnnnnnnnnnnnnnnnnnnnnnnnnnnnnnnnnnnnnnnnnnnnnnnnnnnnnnnnnnnnnnnnnnnnnnnnnnnnnnnnnnnnnnnnnnnnnnnnnnnnnnnnnnnnnnnnnnnnnnnnnnnnnnnnnnnnnnnnnnnnnnnnnnnnnnnnnnnnnnnnnnnnnnnnnnnnnnnnnnnnnnnnnnnnnnnnnnnnnnnnnnnnnnnnnnnnnnnnnnnnnnnnnnnnnnnnnnnnnnnnnnnnnnnnnnnnnnnnnnnnnnnnnnnnnnnnnnnnnnnnnnnnnnnnnnnnnnnnnnnnnnnnnnnnnnnnnnnnnnnnnnnnnnnnnnnnnnnnnnnnnnnnnnnnnnnnnnnnnnnnnnnnnnnnnnnnnnnnnnnnnnnnnnnnnnnnnnnnnnnnnnnnnnnnnnnnnnnnnnnnnnnnnnnnnnnnnnnnnnnnnnnnnnnnnnnnnnnnnnnnnnnnnnnnnnnnnnnnnnnnnnnnnnnnnnnnnnnnnnnnnnnnnnnnnnnnnnnnnnnnnnnnnnnnnnnnnnnnnnnnnnnnnnnnnnnnnnnnnnnnnnnnnnnnnnnnnnnnnnnnnnnnnnnnnnnnnnnnnnnnnnnnnnnnnnnnnnnnnnnnnnnnnnnnnnnnnnnnnnnnnnnnnnnnnnnnnnnnnnnnnnnnnnnnnnnnnnnnnnnnnnnnnnnnnnnnnnnnnnnnnnnnnnnnnnnnnnnnnnnnnnnnnnnnnnnnnnnnnnnnnnnnnnnnnnnnnnnnnnnnnnnnnnnnnnnnnnnnnnnnnnnnnnnnnnnnnnnnnnnnnnnnnnnnnnnnnnnnnnnnnnnnnnnnnnnnnnnnnnnnnnnnnnnnnnnnnnnnnnnnnnnnnnnnnnnnnnnnnnnnnnnnnnnnnnnnnnnnnnnnnnnnnnnnnnnnnnnnnnnnnnnnnnnnnnnnnnnnnnnnnnnnnnnnnnnnnnnnnnnnnnnnnnnnnnnnnnnnnnnnnnnnnnnnnnnnnnnnnnnnnnnnnnnnnnnnnnnnnnnnnnnnnnnnnnnnnnnnnnnnnnnnnnnnnnnnnnnnnnnnnnnnnnnnnnnnnnnnnnnnnnnnnnnnnnnnnnnnnnnnnnnnnnnnnnnnnnnnnnnnnnnnnnnnnnnnnnnnnnnnnnnnnnnnnnnnnnnnnnnnnnnnnnnnnnnnnnnnnnnnnnnnnnnnnnnnnnnnnnnnnnnnnnnnnnnnnnnnnnnnnnnnnnnnnnnnnnnnnnnnnnnnnnnnnnnnnnnnnnnnnnnnnnnnnnnnnnnnnnnnnnnnnnnnnnnnnnnnnnnnnnnnnnnnnnnnnnnnnnnnnnnnnnnnnnnnnnnnnnnnnnnnnnnnnnnnnnnnnnnnnnnnnnnnnnnnnnnnnnnnnnnnnnnnnnnnnnnnnnnnnnnnnnnnnnnnnnnnnnnnnnnnnnnnnnnnnnnnnnnnnnnnnnnnnnnnnnnnnnnnnnnnnnnnnnnnnnnnnnnnnnnnnnnnnnnnnnnnnnnnnnnnnnnnnnnnnnnnnnnnnnnnnnnnnnnnnnnnnnnnnnnnnnnnnnnnnnnnnnnnnnnnnnnnnnnnnnnnnnnnnnnnnnnnnnnnnnnnnnnnnnnnnnnnnnnnnnnnnnnnnnnnnnnnnnnnnnnnnnnnnnnnnnnnnnnnnnnnnnnnnnnnnnnnnnnnnnnnnnnnnnnnnnnnnnnnnnnnnnnnnnnnnnnnnnnnnnnnnnnnnnnnnnnnnnnnnnnnnnnnnnnnnnnnnnnnnnnnnnnnnnnnnnnnnnnnnnnnnnnnnnnnnnnnnnnnnnnnnnnnnnnnnnnnnnnnnnnnnnnnnnnnnnnnnnnnnnnnnnnnnnnnnnnnnnnnnnnnnnnnnnnnnnnnnnnnnnnnnnnnnnnnnnnnnnnnnnnnnnnnnnnnnnnnnnnnnnnnnnnnnnnnnnnnnnnnnnnnnnnnnnnnnnnnnnnnnnnnnnnnnnnnnnnnnnnnnnnnnnnnnnnnnnnnnnnnnnnnnnnnnnnnnnnnnnnnnnnnnnnnnnnnnnnnnnnnnnnnnnnnnnnnnnnnnnnnnnnnnnnnnnnnnnnnnnnnnnnnnnnnnnnnnnnnnnnnnnnnnnnnnnnnnnnnnnnnnnnnnnnnnnnnnnnnnnnnnnnnnnnnnnnnnnnnnnnnnnnnnnnnnnnnnnnnnnnnnnnnnnnnnnnnnnnnnnnnnnnnnnnnnnnnnnnnnnnnnnnnnnnnnnnnnnnnnnnnnnnnnnnnnnnnnnnnnnnnnnnnnnnnnnnnnnnnnnnnnnnnnnnnnnnnnnnnnnnnnnnnnnnnnnnnnnnnnnnnnnnnnnnnnnnnnnnnnnnnnnnnnnnnnnnnnnnnnnnnnnnnnnnnnnnnnnnnnnnnnnnnnnnnnnnnnnnnnnnnnnnnnnnnnnnnnnnnnnnnnnnnnnnnnnnnnnnnnnnnnnnnnnnnnnnnnnnnnnnnnnnnnnnnnnnnnnnnnnnnnnnnnnnnnnnnnnnnnnnnnnnnnnnnnnnnnnnnnnnnnnnnnnnnnnnnnnnnnnnnnnnnnnnnnnnnnnnnnnnnnnnnnnnnnnnnnnnnnnnnnnnnnnnnnnnnnnnnnnnnnnnnnnnnnnnnnnnnnnnnnnnnnnnnnnnnnnnnnnnnnnnnnnnnnnnnnnnnnnnnnnnnnnnnnnnnnnnnnnnnnnnnnnnnnnnnnnnnnnnnnnnnnnnnnnnnnnnnnnnnnnnnnnnnnnnnnnnnnnnnnnnnnnnnnnnnnnnnnnnnnnnnnnnnnnnnnnnnnnnnnnnnnnnnnnnnnnnnnnnnnnnnnnnnnnnnnnnnnnnnnnnnnnnnnnnnnnnnnnnnnnnnnnnnnnnnnnnnnnnnnnnnnnnnnnnnnnnnnnnnnnnnnnnnnnnnnnnnnnnnnnnnnnnnnnnnnnnnnnnnnnnnnnnnnnnnnnnnnnnnnnnnnnnnnnnnnnnnnnnnnnnnnnnnnnnnnnnnnnnnnnnnnnnnnnnnnnnnnnnnnnnnnnnnnnnnnnnnnnnnnnnnnnnnnnnnnnnnnnnnnnnnnnnnnnnnnnnnnnnnnnnnnnnnnnnnnnnnnnnnnnnnnnnnnnnnnnnnnnnnnnnnnnnnnnnnnnnnnnnnnnnnnnnnnnnnnnnnnnnnnnnnnnnnnnnnnnnnnnnnnnnnnnnnnnnnnnnnnnnnnnnnnnnnnnnnnnnnnnnnnnnnnnnnnnnnnnnnnnnnnnnnnnnnnnnnnnnnnnnnnnnnnnnnnnnnnnnnnnnnnnnnnnnnnnnnnnnnnnnnnnnnnnnnnnnnnnnnnnnnnnnnnnnnnnnnnnnnnnnnnnnnnnnnnnnnnnnnnnnnnnnnnnnnnnnnnnnnnnnnnnnnnnnnnnnnnnnnnnnnnnnnnnnnnnnnnnnnnnnnnnnnnnnnnnnnnnnnnnnnnnnnnnnnnnnnnnnnnnnnnnnnnnnnnnnnnnnnnnnnnnnnnnnnnnnnnnnnnnnnnnnnnnnnnnnnnnnnnnnnnnnnnnnnnnnnnnnnnnnnnnnnnnnnnnnnnnnnnnnnnnnnnnnnnnnnnnnnnnnnnnnnnnnnnnnnnnnnnnnnnnnnnnnnnnnnnnnnnnnnnnnnnnnnnnnnnnnnnnnnnnnnnnnnnnnnnnnnnnnnnnnnnnnnnnnnnnnnnnnnnnnnnnnnnnnnnnnnnnnnnnnnnnnnnnnnnnnnnnnnnnnnnnnnnnnnnnnnnnnnnnnnnnnnnnnnnnnnnnnnnnnnnnnnnnnnnnnnnnnnnnnnnnnnnnnnnnnnnnnnnnnnnnnnnnnnnnnnnnnnnnnnnnnnnnnnnnnnnnnnnnnnnnnnnnnnnnnnnnnnnnnnnnnnnnnnnnnnnnnnnnnnnnnnnnnnnnnnnnnnnnnnnnnnnnnnnnnnnnnnnnnnnnnnnnnnnnnnnnnnnnnnnnnnnnnnnnnnnnnnnnnnnnnnnnnnnnnnnnnnnnnnnnnnnnnnnnnnnnnnnnnnnnnnnnnnnnnnnnnnnnnnnnnnnnnnnnnnnnnnnnnnnnnnnnnnnnnnnnnnnnnnnnnnnnnnnnnnnnnnnnnnnnnnnnnnnnnnnnnnnnnnnnnnnnnnnnnnnnnnnnnnnnnnnnnnnnnnnnnnnnnnnnnnnnnnnnnnnnnnnnnnnnnnnnnnnnnnnnnnnnnnnnnnnnnnnnnnnnnnnnnnnnnnnnnnnnnnnnnnnnnnnnnnnnnnnnnnnnnnnnnnnnnnnnnnnnnnnnnnnnnnnnnnnnnnnnnnnnnnnnnnnnnnnnnnnnnnnnnnnnnnnnnnnnnnnnnnnnnnnnnnnnnnnnnnnnnnnnnnnnnnnnnnnnnnnnnnnnnnnnnnnnnnnnnnnnnnnnnnnnnnnnnnnnnnnnnnnnnnnnnnnnnnnnnnnnnnnnnnnnnnnnnnnnnnnnnnnnnnnnnnnnnnnnnnnnnnnnnnnnnnnnnnnnnnnnnnnnnnnnnnnnnnnnnnnnnnnnnnnnnnnnnnnnnnnnnnnnnnnnnnnnnnnnnnnnnnnnnnnnnnnnnnnnnnnnnnnnnnnnnnnnnnnnnnnnnnnnnnnnnnnnnnnnnnnnnnnnnnnnnnnnnnnnnnnnnnnnnnnnnnnnnnnnnnnnnnnnnnnnnnnnnnnnnnnnnnnnnnnnnnnnnnnnnnnnnnnnnnnnnnnnnnnnnnnnnnnnnnnnnnnnnnnnnnnnnnnnnnnnnnnnnnnnnnnnnnnnnnnnnnnnnnnnnnnnnnnnnnnnnnnnnnnnnnnnnnnnnnnnnnnnnnnnnnnnnnnnnnnnnnnnnnnnnnnnnnnnnnnnnnnnnnnnnnnnnnnnnnnnnnnnnnnnnnnnnnnnnnnnnnnnnnnnnnnnnnnnnnnnnnnnnnnnnnnnnnnnnnnnnnnnnnnnnnnnnnnnnnnnnnnnnnnnnnnnnnnnnnnnnnnnnnnnnnnnnnnnnnnnnnnnnnnnnnnnnnnnnnnnnnnnnnnnnnnnnnnnnnnnnnnnnnnnnnnnnnnnnnnnnnnnnnnnnnnnnnnnnnnnnnnnnnnnnnnnnnnnnnnnnnnnnnnnnnnnnnnnnnnnnnnnnnnnnnnnnnnnnnnnnnnnnnnnnnnnnnnnnnnnnnnnnnnnnnnnnnnnnnnnnnnnnnnnnnnnnnnnnnnnnnnnnnnnnnnnnnnnnnnnnnnnnnnnnnnnnnnnnnnnnnnnnnnnnnnnnnnnnnnnnnnnnnnnnnnnnnnnnnnnnnnnnnnnnnnnnnnnnnnnnnnnnnnnnnnnnnnnnnnnnnnnnnnnnnnnnnnnnnnnnnnnnnnnnnnnnnnnnnnnnnnnnnnnnnnnnnnnnnnnnnnnnnnnnnnnnnnnnnnnnnnnnnnnnnnnnnnnnnnnnnnnnnnnnnnnnnnnnnnnnnnnnnnnnnnnnnnnnnnnnnnnnnnnnnnnnnnnnnnnnnnnnnnnnnnnnnnnnnnnnnnnnnnnnnnnnnnnnnnnnnnnnnnnnnnnnnnnnnnnnnnnnnnnnnnnnnnnnnnnnnnnnnnnnnnnnnnnnnnnnnnnnnnnnnnnnnnnnnnnnnnnnnnnnnnnnnnnnnnnnnnnnnnnnnnnnnnnnnnnnnnnnnnnnnnnnnnnnnnnnnnnnnnnnnnnnnnnnnnnnnnnnnnnnnnnnnnnnnnnnnnnnnnnnnnnnnnnnnnnnnnnnnnnnnnnnnnnnnnnnnnnnnnnnnnnnnnnnnnnnnnnnnnnnnnnnnnnnnnnnnnnnnnnnnnnnnnnnnnnnnnnnnnnnnnnnnnnnnnnnnnnnnnnnnnnnnnnnnnnnnnnnnnnnnnnnnnnnnnnnnnnnnnnnnnnnnnnnnnnnnnnnnnnnnnnnnnnnnnnnnnnnnnnnnnnnnnnnnnnnnnnnnnnnnnnnnnnnnnnnnnnnnnnnnnnnnnnnnnnnnnnnnnnnnnnnnnnnnnnnnnnnnnnnnnnnnnnnnnnnnnnnnnnnnnnnnnnnnnnnnnnnnnnnnnnnnnnnnnnnnnnnnnnnnnnnnnnnnnnnnnnnnnnnnnnnnnnnnnnnnnnnnnnnnnnnnnnnnnnnnnnnnnnnnnnnnnnnnnnnnnnnnnnnnnnnnnnnnnnnnnnnnnnnnnnnnnnnnnnnnnnnnnnnnnnnnnnnnnnnnnnnnnnnnnnnnnnnnnnnnnnnnnnnnnnnnnnnnnnnnnnnnnnnnnnnnnnnnnnnnnnnnnnnnnnnnnnnnnnnnnnnnnnnnnnnnnnnnnnnnnnnnnnnnnnnnnnnnnnnnnnnnnnnnnnnnnnnnnnnnnnnnnnnnnnnnnnnnnnnnnnnnnnnnnnnnnnnnnnnnnnnnnnnnnnnnnnnnnnnnnnnnnnnnnnnnnnnnnnnnnnnnnnnnnnnnnnnnnnnnnnnnnnnnnnnnnnnnnnnnnnnnnnnnnnnnnnnnnnnnnnnnnnnnnnnnnnnnnnnnnnnnnnnnnnnnnnnnnnnnnnnnnnnnnnnnnnnnnnnnnnnnnnnnnnnnnnnnnnnnnnnnnnnnnnnnnnnnnnnnnnnnnnnnnnnnnnnnnnnnnnnnnnnnnnnnnnnnnnnnnnnnnnnnnnnnnnnnnnnnnnnnnnnnnnnnnnnnnnnnnnnnnnnnnnnnnnnnnnnnnnnnnnnnnnnnnnnnnnnnnnnnnnnnnnnnnnnnnnnnnnnnnnnnnnnnnnnnnnnnnnnnnnnnnnnnnnnnnnnnnnnnnnnnnnnnnnnnnnnnnnnnnnnnnnnnnnnnnnnnnnnnnnnnnnnnnnnnnnnnnnnnnnnnnnnnnnnnnnnnnnnnnnnnnnnnnnnnnnnnnnnnnnnnnnnnnnnnnnnnnnnnnnnnnnnnnnnnnnnnnnnnnnnnnnnnnnnnnnnnnnnnnnnnnnnnnnnnnnnnnnnnnnnnnnnnnnnnnnnnnnnnnnnnnnnnnnnnnnnnnnnnnnnnnnnnnnnnnnnnnnnnnnnnnnnnnnnnnnnnnnnnnnnnnnnnnnnnnnnnnnnnnnnnnnnnnnnnnnnnnnnnnnnnnnnnnnnnnnnnnnnnnnnnnnnnnnnnnnnnnnnnnnnnnnnnnnnnnnnnnnnnnnnnnnnnnnnnnnnnnnnnnnnnnnnnnnnnnnnnnnnnnnnnnnnnnnnnnnnnnnnnnnnnnnnnnnnnnnnnnnnnnnnnnnnnnnnnnnnnnnnnnnnnnnnnnnnnnnnnnnnnnnnnnnnnnnnnnnnnnnnnnnnnnnnnnnnnnnnnnnnnnnnnnnnnnnnnnnnnnnnnnnnnnnnnnnnnnnnnnnnnnnnnnnnnnnnnnnnnnnnnnnnnnnnnnnnnnnnnnnnnnnnnnnnnnnnnnnnnnnnnnnnnnnnnnnnnnnnnnnnnnnnnnnnnnnnnnnnnnnnnnnnnnnnnnnnnnnnnnnnnnnnnnnnnnnnnnnnnnnnnnnnnnnnnnnnnnnnnnnnnnnnnnnnnnnnnnnnnnnnnnnnnnnnnnnnnnnnnnnnnnnnnnnnnnnnnnnnnnnnnnnnnnnnnnnnnnnnnnnnnnnnnnnnnnnnnnnnnnnnnnnnnnnnnnnnnnnnnnnnnnnnnnnnnnnnnnnnnnnnnnnnnnnnnnnnnnnnnnnnnnnnnnnnnnnnnnnnnnnnnnnnnnnnnnnnnnnnnnnnnnnnnnnnnnnnnnnnnnnnnnnnnnnnnnnnnnnnnnnnnnnnnnnnnnnnnnnnnnnnnnnnnnnnnnnnnnnnnnnnnnnnnnnnnnnnnnnnnnnnnnnnnnnnnnnnnnnnnnnnnnnnnnnnnnnnnnnnnnnnnnnnnnnnnnnnnnnnnnnnnnnnnnnnnnnnnnnnnnnnnnnnnnnnnnnnnnnnnnnnnnnnnnnnnnnnnnnnnnnnnnnnnnnnnnnnnnnnnnnnnnnnnnnnnnnnnnnnnnnnnnnnnnnnnnnnnnnnnnnnnnnnnnnnnnnnnnnnnnnnnnnnnnnnnnnnnnnnnnnnnnnnnnnnnnnnnnnnnnnnnnnnnnnnnnnnnnnnnnnnnnnnnnnnnnnnnnnnnnnnnnnnnnnnnnnnnnnnnnnnnnnnnnnnnnnnnnnnnnnnnnnnnnnnnnnnnnnnnnnnnnnnnnnnnnnnnnnnnnnnnnnnnnnnnnnnnnnnnnnnnnnnnnnnnnnnnnnnnnnnnnnnnnnnnnnnnnnnnnnnnnnnnnnnnnnnnnnnnnnnnnnnnnnnnnnnnnnnnnnnnnnnnnnnnnnnnnnnnnnnnnnnnnnnnnnnnnnnnnnnnnnnnnnnnnnnnnnnnnnnnnnnnnnnnnnnnnnnnnnnnnnnnnnnnnnnnnnnnnnnnnnnnnnnnnnnnnnnnnnnnnnnnnnnnnnnnnnnnnnnnnnnnnnnnnnnnnnnnnnnnnnnnnnnnnnnnnnnnnnnnnnnnnnnnnnnnnnnnnnnnnnnnnnnnnnnnnnnnnnnnnnnnnnnnnnnnnnnnnnnnnnnnnnnnnnnnnnnnnnnnnnnnnnnnnnnnnnnnnnnnnnnnnnnnnnnnnnnnnnnnnnnnnnnnnnnnnnnnnnnnnnnnnnnnnnnnnnnnnnnnnnnnnnnnnnnnnnnnnnnnnnnnnnnnnnnnnnnnnnnnnnnnnnnnnnnnnnnnnnnnnnnnnnnnnnnnnnnnnnnnnnnnnnnnnnnnnnnnnnnnnnnnnnnnnnnnnnnnnnnnnnnnnnnnnnnnnnnnnnnnnnnnnnnnnnnnnnnnnnnnnnnnnnnnnnnnnnnnnnnnnnnnnnnnnnnnnnnnnnnnnnnnnnnnnnnnnnnnnnnnnnnnnnnnnnnnnnnnnnnnnnnnnnnnnnnnnnnnnnnnnnnnnnnnnnnnnnnnnnnnnnnnnnnnnnnnnnnnnnnnnnnnnnnnnnnnnnnnnnnnnnnnnnnnnnnnnnnnnnnnnnnnnnnnnnnnnnnnnnnnnnnnnnnnnnnnnnnnnnnnnnnnnnnnnnnnnnnnnnnnnnnnnnnnnnnnnnnnnnnnnnnnnnnnnnnnnnnnnnnnnnnnnnnnnnnnnnnnnnnnnnnnnnnnnnnnnnnnnnnnnnnnnnnnnnnnnnnnnnnnnnnnnnnnnnnnnnnnnnnnnnnnnnnnnnnnnnnnnnnnnnnnnnnnnnnnnnnnnnnnnnnnnnnnnnnnnnnnnnnnnnnnnnnnnnnnnnnnnnnnnnnnnnnnnnnnnnnnnnnnnnnnnnnnnnnnnnnnnnnnnnnnnnnnnnnnnnnnnnnnnnnnnnnnnnnnnnnnnnnnnnnnnnnnnnnnnnnnnnnnnnnnnnnnnnnnnnnnnnnnnnnnnnnnnnnnnnnnnnnnnnnnnnnnnnnnnnnnnnnnnnnnnnnnnnnnnnnnnnnnnnnnnnnnnnnnnnnnnnnnnnnnnnnnnnnnnnnnnnnnnnnnnnnnnnnnnnnnnnnnnnnnnnnnnnnnnnnnnnnnnnnnnnnnnnnnnnnnnnnnnnnnnnnnnnnnnnnnnnnnnnnnnnnnnnnnnnnnnnnnnnnnnnnnnnnnnnnnnnnnnnnnnnnnnnnnnnnnnnnnnnnnnnnnnnnnnnnnnnnnnnnnnnnnnnnnnnnnnnnnnnnnnnnnnnnnnnnnnnnnnnnnnnnnnnnnnnnnnnnnnnnnnnnnnnnnnnnnnnnnnnnnnnnnnnnnnnnnnnnnnnnnnnnnnnnnnnnnnnnnnnnnnnnnnnnnnnnnnnnnnnnnnnnnnnnnnnnnnnnnnnnnnnnnnnnnnnnnnnnnnnnnnnnnnnnnnnnnnnnnnnnnnnnnnnnnnnnnnnnnnnnnnnnnnnnnnnnnnnnnnnnnnnnnnnnnnnnnnnnnnnnnnnnnnnnnnnnnnnnnnnnnnnnnnnnnnnnnnnnnnnnnnnnnnnnnnnnnnnnnnnnnnnnnnnnnnnnnnnnnnnnnnnnnnnnnnnnnnnnnnnnnnnnnnnnnnnnnnnnnnnnnnnnnnnnnnnnnnnnnnnnnnnnnnnnnnnnnnnnnnnnnnnnnnnnnnnnnnnnnnnnnnnnnnnnnnnnnnnnnnnnnnnnnnnnnnnnnnnnnnnnnnnnnnnnnnnnnnnnnnnnnnnnnnnnnnnnnnnnnnnnnnnnnnnnnnnnnnnnnnnnnnnnnnnnnnnnnnnnnnnnnnnnnnnnnnnnnnnnnnnnnnnnnnnnnnnnnnnnnnnnnnnnnnnnnnnnnnnnnnnnnnnnnnnnnnnnnnnnnnnnnnnnnnnnnnnnnnnnnnnnnnnnnnnnnnnnnnnnnnnnnnnnnnnnnnnnnnnnnnnnnnnnnnnnnnnnnnnnnnnnnnnnnnnnnnnnnnnnnnnnnnnnnnnnnnnnnnnnnnnnnnnnnnnnnnnnnnnnnnnnnnnnnnnnnnnnnnnnnnnnnnnnnnnnnnnnnnnnnnnnnnnnnnnnnnnnnnnnnnnnnnnnnnnnnnnnnnnnnnnnnnnnnnnnnnnnnnnnnnnnnnnnnnnnnnnnnnnnnnnnnnnnnnnnnnnnnnnnnnnnnnnnnnnnnnnnnnnnnnnnnnnnnnnnnnnnnnnnnnnnnnnnnnnnnnnnnnnnnnnnnnnnnnnnnnnnnnnnnnnnnnnnnnnnnnnnnnnnnnnnnnnnnnnnnnnnnnnnnnnnnnnnnnnnnnnnnnnnnnnnnnnnnnnnnnnnnnnnnnnnnnnnnnnnnnnnnnnnnnnnnnnnnnnnnnnnnnnnnnnnnnnnnnnnnnnnnnnnnnnnnnnnnnnnnnnnnnnnnnnnnnnnnnnnnnnnnnnnnnnnnnnnnnnnnnnnnnnnnnnnnnnnnnnnnnnnnnnnnnnnnnnnnnnnnnnnnnnnnnnnnnnnnnnnnnnnnnnnnnnnnnnnnnnnnnnnnnnnnnnnnnnnnnnnnnnnnnnnnnnnnnnnnnnnnnnnnnnnnnnnnnnnnnnnnnnnnnnnnnnnnnnnnnnnnnnnnnnnnnnnnnnnnnnnnnnnnnnnnnnnnnnnnnnnnnnnnnnnnnnnnnnnnnnnnnnnnnnnnnnnnnnnnnnnnnnnnnnnnnnnnnnnnnnnnnnnnnnnnnnnnnnnnnnnnnnnnnnnnnnnnnnnnnnnnnnnnnnnnnnnnnnnnnnnnnnnnnnnnnnnnnnnnnnnnnnnnnnnnnnnnnnnnnnnnnnnnnnnnnnnnnnnnnnnnnnnnnnnnnnnnnnnnnnnnnnnnnnnnnnnnnnnnnnnnnnnnnnnnnnnnnnnnnnnnnnnnnnnnnnnnnnnnnnnnnnnnnnnnnnnnnnnnnnnnnnnnnnnnnnnnnnnnnnnnnnnnnnnnnnnnnnnnnnnnnnnnnnnnnnnnnnnnnnnnnnnnnnnnnnnnnnnnnnnnnnnnnnnnnnnnnnnnnnnnnnnnnnnnnnnnnnnnnnnnnnnnnnnnnnnnnnnnnnnnnnnnnnnnnnnnnnnnnnnnnnnnnnnnnnnnnnnnnnnnnnnnnnnnnnnnnnnnnnnnnnnnnnnnnnnnnnnnnnnnnnnnnnnnnnnnnnnnnnnnnnnnnnnnnnnnnnnnnnnnnnnnnnnnnnnnnnnnnnnnnnnnnnnnnnnnnnnnnnnnnnnnnnnnnnnnnnnnnnnnnnnnnnnnnnnnnnnnnnnnnnnnnnnnnnnnnnnnnnnnnnnnnnnnnnnnnnnnnnnnnnnnnnnnnnnnnnnnnnnnnnnnnnnnnnnnnnnnnnnnnnnnnnnnnnnnnnnnnnnnnnnnnnnnnnnnnnnnnnnnnnnnnnnnnnnnnnnnnnnnnnnnnnnnnnnnnnnnnnnnnnnnnnnnnnnnnnnnnnnnnnnnnnnnnnnnnnnnnnnnnnnnnnnnnnnnnnnnnnnnnnnnnnnnnnnnnnnnnnnnnnnnnnnnnnnnnnnnnnnnnnnnnnnnnnnnnnnnnnnnnnnnnnnnnnnnnnnnnnnnnnnnnnnnnnnnnnnnnnnnnnnnnnnnnnnnnnnnnnnnnnnnnnnnnnnnnnnnnnnnnnnnnnnnnnnnnnnnnnnnnnnnnnnnnnnnnnnnnnnnnnnnnnnnnnnnnnnnnnnnnnnnnnnnnnnnnnnnnnnnnnnnnnnnnnnnnnnnnnnnnnnnnnnnnnnnnnnnnnnnnnnnnnnnnnnnnnnnnnnnnnnnnnnnnnnnnnnnnnnnnnnnnnnnnnnnnnnnnnnnnnnnnnnnnnnnnnnnnnnnnnnnnnnnnnnnnnnnnnnnnnnnnnnnnnnnnnnnnnnnnnnnnnnnnnnnnnnnnnnnnnnnnnnnnnnnnnnnnnnnnnnnnnnnnnnnnnnnnnnnnnnnnnnnnnnnnnnnnnnnnnnnnnnnnnnnnnnnnnnnnnnnnnnnnnnnnnnnnnnnnnnnnnnnnnnnnnnnnnnnnnnnnnnnnnnnnnnnnnnnnnnnnnnnnnnnnnnnnnnnnnnnnnnnnnnnnnnnnnnnnnnnnnnnnnnnnnnnnnnnnnnnnnnnnnnnnnnnnnnnnnnnnnnnnnnnnnnnnnnnnnnnnnnnnnnnnnnnnnnnnnnnnnnnnnnnnnnnnnnnnnnnnnnnnnnnnnnnnnnnnnnnnnnnnnnnnnnnnnnnnnnnnnnnnnnnnnnnnnnnnnnnnnnnnnnnnnnnnnnnnnnnnnnnnnnnnnnnnnnnnnnnnnnnnnnnnnnnnnnnnnnnnnnnnnnnnnnnnnnnnnnnnnnnnnnnnnnnnnnnnnnnnnnnnnnnnnnnnnnnnnnnnnnnnnnnnnnnnnnnnnnnnnnnnnnnnnnnnnnnnnnnnnnnnnnnnnnnnnnnnnnnnnnnnnnnnnnnnnnnnnnnnnnnnnnnnnnnnnnnnnnnnnnnnnnnnnnnnnnnnnnnnnnnnnnnnnnnnnnnnnnnnnnnnnnnnnnnnnnnnnnnnnnnnnnnnnnnnnnnnnnnnnnnnnnnnnnnnnnnnnnnnnnnnnnnnnnnnnnnnnnnnnnnnnnnnnnnnnnnnnnnnnnnnnnnnnnnnnnnnnnnnnnnnnnnnnnnnnnnnnnnnnnnnnnnnnnnnnnnnnnnnnnnnnnnnnnnnnnnnnnnnnnnnnnnnnnnnnnnnnnnnnnnnnnnnnnnnnnnnnnnnnnnnnnnnnnnnnnnnnnnnnnnnnnnnnnnnnnnnnnnnnnnnnnnnnnnnnnnnnnnnnnnnnnnnnnnnnnnnnnnnnnnnnnnnnnnnnnnnnnnnnnnnnnnnnnnnnnnnnnnnnnnnnnnnnnnnnnnnnnnnnnnnnnnnnnnnnnnnnnnnnnnnnnnnnnnnnnnnnnnnnnnnnnnnnnnnnnnnnnnnnnnnnnnnnnnnnnnnnnnnnnnnnnnnnnnnnnnnnnnnnnnnnnnnnnnnnnnnnnnnnnnnnnnnnnnnnnnnnnnnnnnnnnnnnnnnnnnnnnnnnnnnnnnnnnnnnnnnnnnnnnnnnnnnnnnnnnnnnnnnnnnnnnnnnnnnnnnnnnnnnnnnnnnnnnnnnnnnnnnnnnnnnnnnnnnnnnnnnnnnnnnnnnnnnnnnnnnnnnnnnnnnnnnnnnnnnnnnnnnnnnnnnnnnnnnnnnnnnnnnnnnnnnnnnnnnnnnnnnnnnnnnnnnnnnnnnnnnnnnnnnnnnnnnnnnnnnnnnnnnnnnnnnnnnnnnnnnnnnnnnnnnnnnnnnnnnnnnnnnnnnnnnnnnnnnnnnnnnnnnnnnnnnnnnnnnnnnnnnnnnnnnnnnnnnnnnnnnnnnnnnnnnnnnnnnnnnnnnnnnnnnnnnnnnnnnnnnnnnnnnnnnnnnnnnnnnnnnnnnnnnnnnnnnnnnnnnnnnnnnnnnnnnnnnnnnnnnnnnnnnnnnnnnnnnnnnnnnnnnnnnnnnnnnnnnnnnnnnnnnnnnnnnnnnnnnnnnnnnnnnnnnnnnnnnnnnnnnnnnnnnnnnnnnnnnnnnnnnnnnnnnnnnnnnnnnnnnnnnnnnnnnnnnnnnnnnnnnnnnnnnnnnnnnnnnnnnnnnnnnnnnnnnnnnnnnnnnnnnnnnnnnnnnnnnnnnnnnnnnnnnnnnnnnnnnnnnnnnnnnnnnnnnnnnnnnnnnnnnnnnnnnnnnnnnnnnnnnnnnnnnnnnnnnnnnnnnnnnnnnnnnnnnnnnnnnnnnnnnnnnnnnnnnnnnnnnnnnnnnnnnnnnnnnnnnnnnnnnnnnnnnnnnnnnnnnnnnnnnnnnnnnnnnnnnnnnnnnnnnnnnnnnnnnnnnnnnnnnnnnnnnnnnnnnnnnnnnnnnnnnnnnnnnnnnnnnnnnnnnnnnnnnnnnnnnnnnnnnnnnnnnnnnnnnnnnnnnnnnnnnnnnnnnnnnnnnnnnnnnnnnnnnnnnnnnnnnnnnnnnnnnnnnnnnnnnnnnnnnnnnnnnnnnnnnnnnnnnnnnnnnnnnnnnnnnnnnnnnnnnnnnnnnnnnnnnnnnnnnnnnnnnnnnnnnnnnnnnnnnnnnnnnnnnnnnnnnnnnnnnnnnnnnnnnnnnnnnnnnnnnnnnnnnnnnnnnnnnnnnnnnnnnnnnnnnnnnnnnnnnnnnnnnnnnnnnnnnnnnnnnnnnnnnnnnnnnnnnnnnnnnnnnnnnnnnnnnnnnnnnnnnnnnnnnnnnnnnnnnnnnnnnnnnnnnnnnnnnnnnnnnnnnnnnnnnnnnnnnnnnnnnnnnnnnnnnnnnnnnnnnnnnnnnnnnnnnnnnnnnnnnnnnnnnnnnnnnnnnnnnnnnnnnnnnnnnnnnnnnnnnnnnnnnnnnnnnnnnnnnnnnnnnnnnnnnnnnnnnnnnnnnnnnnnnnnnnnnnnnnnnnnnnnnnnnnnnnnnnnnnnnnnnnnnnnnnnnnnnnnnnnnnnnnnnnnnnnnnnnnnnnnnnnnnnnnnnnnnnnnnnnnnnnnnnnnnnnnnnnnnnnnnnnnnnnnnnnnnnnnnnnnnnnnnnnnnnnnnnnnnnnnnnnnnnnnnnnnnnnnnnnnnnnnnnnnnnnnnnnnnnnnnnnnnnnnnnnnnnnnnnnnnnnnnnnnnnnnnnnnnnnnnnnnnnnnnnnnnnnnnnnnnnnnnnnnnnnnnnnnnnnnnnnnnnnnnnnnnnnnnnnnnnnnnnnnnnnnnnnnnnnnnnnnnnnnnnnnnnnnnnnnnnnnnnnnnnnnnnnnnnnnnnnnnnnnnnnnnnnnnnnnnnnnnnnnnnnnnnnnnnnnnnnnnnnnnnnnnnnnnnnnnnnnnnnnnnnnnnnnnnnnnnnnnnnnnnnnnnnnnnnnnnnnnnnnnnnnnnnnnnnnnnnnnnnnnnnnnnnnnnnnnnnnnnnnnnnnnnnnnnnnnnnnnnnnnnnnnnnnnnnnnnnnnnnnnnnnnnnnnnnnnnnnnnnnnnnnnnnnnnnnnnnnnnnnnnnnnnnnnnnnnnnnnnnnnnnnnnnnnnnnnnnnnnnnnnnnnnnnnnnnnnnnnnnnnnnnnnnnnnnnnnnnnnnnnnnnnnnnnnnnnnnnnnnnnnnnnnnnnnnnnnnnnnnnnnnnnnnnnnnnnnnnnnnnnnnnnnnnnnnnnnnnnnnnnnnnnnnnnnnnnnnnnnnnnnnnnnnnnnnnnnnnnnnnnnnnnnnnnnnnnnnnnnnnnnnnnnnnnnnnnnnnnnnnnnnnnnnnnnnnnnnnnnnnnnnnnnnnnnnnnnnnnnnnnnnnnnnnnnnnnnnnnnnnnnnnnnnnnnnnnnnnnnnnnnnnnnnnnnnnnnnnnnnnnnnnnnnnnnnnnnnnnnnnnnnnnnnnnnnnnnnnnnnnnnnnnnnnnnnnnnnnnnnnnnnnnnnnnnnnnnnnnnnnnnnnnnnnnnnnnnnnnnnnnnnnnnnnnnnnnnnnnnnnnnnnnnnnnnnnnnnnnnnnnnnnnnnnnnnnnnnnnnnnnnnnnnnnnnnnnnnnnnnnnnnnnnnnnnnnnnnnnnnnnnnnnnnnnnnnnnnnnnnnnnnnnnnnnnnnnnnnnnnnnnnnnnnnnnnnnnnnnnnnnnnnnnnnnnnnnnnnnnnnnnnnnnnnnnnnnnnnnnnnnnnnnnnnnnnnnnnnnnnnnnnnnnnnnnnnnnnnnnnnnnnnnnnnnnnnnnnnnnnnnnnnnnnnnnnnnnnnnnnnnnnnnnnnnnnnnnnnnnnnnnnnnnnnnnnnnnnnnnnnnnnnnnnnnnnnnnnnnnnnnnnnnnnnnnnnnnnnnnnnnnnnnnnnnnnnnnnnnnnnnnnnnnnnnnnnnnnnnnnnnnnnnnnnnnnnnnnnnnnnnnnnnnnnnnnnnnnnnnnnnnnnnnnnnnnnnnnnnnnnnnnnnnnnnnnnnnnnnnnnnnnnnnnnnnnnnnnnnnnnnnnnnnnnnnnnnnnnnnnnnnnnnnnnnnnnnnnnnnnnnnnnnnnnnnnnnnnnnnnnnnnnnnnnnnnnnnnnnnnnnnnnnnnnnnnnnnnnnnnnnnnnnnnnnnnnnnnnnnnnnnnnnnnnnnnnnnnnnnnnnnnnnnnnnnnnnnnnnnnnnnnnnnnnnnnnnnnnnnnnnnnnnnnnnnnnnnnnnnnnnnnnnnnnnnnnnnnnnnnnnnnnnnnnnnnnnnnnnnnnnnnnnnnnnnnnnnnnnnnnnnnnnnnnnnnnnnnnnnnnnnnnnnnnnnnnnnnnnnnnnnnnnnnnnnnnnnnnnnnnnnnnnnnnnnnnnnnnnnnnnnnnnnnnnnnnnnnnnnnnnnnnnnnnnnnnnnnnnnnnnnnnnnnnnnnnnnnnnnnnnnnnnnnnnnnnnnnnnnnnnnnnnnnnnnnnnnnnnnnnnnnnnnnnnnnnnnnnnnnnnnnnnnnnnnnnnnnnnnnnnnnnnnnnnnnnnnnnnnnnnnnnnnnnnnnnnnnnnnnnnnnnnnnnnnnnnnnnnnnnnnnnnnnnnnnnnnnnnnnnnnnnnnnnnnnnnnnnnnnnnnnnnnnnnnnnnnnnnnnnnnnnnnnnnnnnnnnnnnnnnnnnnnnnnnnnnnnnnnnnnnnnnnnnnnnnnnnnnnnnnnnnnnnnnnnnnnnnnnnnnnnnnnnnnnnnnnnnnnnnnnnnnnnnnnnnnnnnnnnnnnnnnnnnnnnnnnnnnnnnnnnnnnnnnnnnnnnnnnnnnnnnnnnnnnnnnnnnnnnnnnnnnnnnnnnnnnnnnnnnnnnnnnnnnnnnnnnnnnnnnnnnnnnnnnnnnnnnnnnnnnnnnnnnnnnnnnnnnnnnnnnnnnnnnnnnnnnnnnnnnnnnnnnnnnnnnnnnnnnnnnnnnnnnnnnnnnnnnnnnnnnnnnnnnnnnnnnnnnnnnnnnnnnnnnnnnnnnnnnnnnnnnnnnnnnnnnnnnnnnnnnnnnnnnnnnnnnnnnnnnnnnnnnnnnnnnnnnnnnnnnnnnnnnnnnnnnnnnnnnnnnnnnnnnnnnnnnnnnnnnnnnnnnnnnnnnnnnnnnnnnnnnnnnnnnnnnnnnnnnnnnnnnnnnnnnnnnnnnnnnnnnnnnnnnnnnnnnnnnnnnnnnnnnnnnnnnnnnnnnnnnnnnnnnnnnnnnnnnnnnnnnnnnnnnnnnnnnnnnnnnnnnnnnnnnnnnnnnnnnnnnnnnnnnnnnnnnnnnnnnnnnnnnnnnnnnnnnnnnnnnnnnnnnnnnnnnnnnnnnnnnnnnnnnnnnnnnnnnnnnnnnnnnnnnnnnnnnnnnnnnnnnnnnnnnnnnnnnnnnnnnnnnnnnnnnnnnnnnnnnnnnnnnnnnnnnnnnnnnnnnnnnnnnnnnnnnnnnnnnnnnnnnnnnnnnnnnnnnnnnnnnnnnnnnnnnnnnnnnnnnnnnnnnnnnnnnnnnnnnnnnnnnnnnnnnnnnnnnnnnnnnnnnnnnnnnnnnnnnnnnnnnnnnnnnnnnnnnnnnnnnnnnnnnnnnnnnnnnnnnnnnnnnnnnnnnnnnnnnnnnnnnnnnnnnnnnnnnnnnnnnnnnnnnnnnnnnnnnnnnnnnnnnnnnnnnnnnnnnnnnnnnnnnnnnnnnnnnnnnnnnnnnnnnnnnnnnnnnnnnnnnnnnnnnnnnnnnnnnnnnnnnnnnnnnnnnnnnnnnnnnnnnnnnnnnnnnnnnnnnnnnnnnnnnnnnnnnnnnnnnnnnnnnnnnnnnnnnnnnnnnnnnnnnnnnnnnnnnnnnnnnnnnnnnnnnnnnnnnnnnnnnnnnnnnnnnnnnnnnnnnnnnnnnnnnnnnnnnnnnnnnnnnnnnnnnnnnnnnnnnnnnnnnnnnnnnnnnnnnnnnnnnnnnnnnnnnnnnnnnnnnnnnnnnnnnnnnnnnnnnnnnnnnnnnnnnnnnnnnnnnnnnnnnnnnnnnnnnnnnnnnnnnnnnnnnnnnnnnnnnnnnnnnnnnnnnnnnnnnnnnnnnnnnnnnnnnnnnnnnnnnnnnnnnnnnnnnnnnnnnnnnnnnnnnnnnnnnnnnnnnnnnnnnnnnnnnnnnnnnnnnnnnnnnnnnnnnnnnnnnnnnnnnnnnnnnnnnnnnnnnnnnnnnnnnnnnnnnnnnnnnnnnnnnnnnnnnnnnnnnnnnnnnnnnnnnnnnnnnnnnnnnnnnnnnnnnnnnnnnnnnnnnnnnnnnnnnnnnnnnnnnnnnnnnnnnnnnnnnnnnnnnnnnnnnnnnnnnnnnnnnnnnnnnnnnnnnnnnnnnnnnnnnnnnnnnnnnnnnnnnnnnnnnnnnnnnnnnnnnnnnnnnnnnnnnnnnnnnnnnnnnnnnnnnnnnnnnnnnnnnnnnnnnnnnnnnnnnnnnnnnnnnnnnnnnnnnnnnnnnnnnnnnnnnnnnnnnnnnnnnnnnnnnnnnnnnnnnnnnnnnnnnnnnnnnnnnnnnnnnnnnnnnnnnnnnnnnnnnnnnnnnnnnnnnnnnnnnnnnnnnnnnnnnnnnnnnnnnnnnnnnnnnnnnnnnnnnnnnnnnnnnnnnnnnnnnnnnnnnnnnnnnnnnnnnnnnnnnnnnnnnnnnnnnnnnnnnnnnnnnnnnnnnnnnnnnnnnnnnnnnnnnnnnnnnnnnnnnnnnnnnnnnnnnnnnnnnnnnnnnnnnnnnnnnnnnnnnnnnnnnnnnnnnnnnnnnnnnnnnnnnnnnnnnnnnnnnnnnnnnnnnnnnnnnnnnnnnnnnnnnnnnnnnnnnnnnnnnnnnnnnnnnnnnnnnnnnnnnnnnnnnnnnnnnnnnnnnnnnnnnnnnnnnnnnnnnnnnnnnnnnnnnnnnnnnnnnnnnnnnnnnnnnnnnnnnnnnnnnnnnnnnnnnnnnnnnnnnnnnnnnnnnnnnnnnnnnnnnnnnnnnnnnnnnnnnnnnnnnnnnnnnnnnnnnnnnnnnnnnnnnnnnnnnnnnnnnnnnnnnnnnnnnnnnnnnnnnnnnnnnnnnnnnnnnnnnnnnnnnnnnnnnnnnnnnnnnnnnnnnnnnnnnnnnnnnnnnnnnnnnnnnnnnnnnnnnnnnnnnnnnnnnnnnnnnnnnnnnnnnnnnnnnnnnnnnnnnnnnnnnnnnnnnnnnnnnnnnnnnnnnnnnnnnnnnnnnnnnnnnnnnnnnnnnnnnnnnnnnnnnnnnnnnnnnnnnnnnnnnnnnnnnnnnnnnnnnnnnnnnnnnnnnnnnnnnnnnnnnnnnnnnnnnnnnnnnnnnnnnnnnnnnnnnnnnnnnnnnnnnnnnnnnnnnnnnnnnnnnnnnnnnnnnnnnnnnnnnnnnnnnnnnnnnnnnnnnnnnnnnnnnnnnnnnnnnnnnnnnnnnnnnnnnnnnnnnnnnnnnnnnnnnnnnnnnnnnnnnnnnnnnnnnnnnnnnnnnnnnnnnnnnnnnnnnnnnnnnnnnnnnnnnnnnnnnnnnnnnnnnnnnnnnnnnnnnnnnnnnnnnnnnnnnnnnnnnnnnnnnnnnnnnnnnnnnnnnnnnnnnnnnnnnnnnnnnnnnnnnnnnnnnnnnnnnnnnnnnnnnnnnnnnnnnnnnnnnnnnnnnnnnnnnnnnnnnnnnnnnnnnnnnnnnnnnnnnnnnnnnnnnnnnnnnnnnnnnnnnnnnnnnnnnnnnnnnnnnnnnnnnnnnnnnnnnnnnnnnnnnnnnnnnnnnnnnnnnnnnnnnnnnnnnnnnnnnnnnnnnnnnnnnnnnnnnnnnnnnnnnnnnnnnnnnnnnnnnnnnnnnnnnnnnnnnnnnnnnnnnnnnnnnnnnnnnnnnnnnnnnnnnnnnnnnnnnnnnnnnnnnnnnnnnnnnnnnnnnnnnnnnnnnnnnnnnnnnnnnnnnnnnnnnnnnnnnnnnnnnnnnnnnnnnnnnnnnnnnnnnnnnnnnnnnnnnnnnnnnnnnnnnnnnnnnnnnnnnnnnnnnnnnnnnnnnnnnnnnnnnnnnnnnnnnnnnnnnnnnnnnnnnnnnnnnnnnnnnnnnnnnnnnnnnnnnnnnnnnnnnnnnnnnnnnnnnnnnnnnnnnnnnnnnnnnnnnnnnnnnnnnnnnnnnnnnnnnnnnnnnnnnnnnnnnnnnnnnnnnnnnnnnnnnnnnnnnnnnnnnnnnnnnnnnnnnnnnnnnnnnnnnnnnnnnnnnnnnnnnnnnnnnnnnnnnnnnnnnnnnnnnnnnnnnnnnnnnnnnnnnnnnnnnnnnnnnnnnnnnnnnnnnnnnnnnnnnnnnnnnnnnnnnnnnnnnnnnnnnnnnnnnnnnnnnnnnnnnnnnnnnnnnnnnnnnnnnnnnnnnnnnnnnnnnnnnnnnnnnnnnnnnnnnnnnnnnnnnnnnnnnnnnnnnnnnnnnnnnnnnnnnnnnnnnnnnnnnnnnnnnnnnnnnnnnnnnnnnnnnnnnnnnnnnnnnnnnnnnnnnnnnnnnnnnnnnnnnnnnnnnnnnnnnnnnnnnnnnnnnnnnnnnnnnnnnnnnnnnnnnnnnnnnnnnnnnnnnnnnnnnnnnnnnnnnnnnnnnnnnnnnnnnnnnnnnnnnnnnnnnnnnnnnnnnnnnnnnnnnnnnnnnnnnnnnnnnnnnnnnnnnnnnnnnnnnnnnnnnnnnnnnnnnnnnnnnnnnnnnnnnnnnnnnnnnnnnnnnnnnnnnnnnnnnnnnnnnnnnnnnnnnnnnnnnnnnnnnnnnnnnnnnnnnnnnnnnnnnnnnnnnnnnnnnnnnnnnnnnnnnnnnnnnnnnnnnnnnnnnnnnnnnnnnnnnnnnnnnnnnnnnnnnnnnnnnnnnnnnnnnnnnnnnnnnnnnnnnnnnnnnnnnnnnnnnnnnnnnnnnnnnnnnnnnnnnnnnnnnnnnnnnnnnnnnnnnnnnnnnnnnnnnnnnnnnnnnnnnnnnnnnnnnnnnnnnnnnnnnnnnnnnnnnnnnnnnnnnnnnnnnnnnnnnnnnnnnnnnnnnnnnnnnnnnnnnnnnnnnnnnnnnnnnnnnnnnnnnnnnnnnnnnnnnnnnnnnnnnnnnnnnnnnnnnnnnnnnnnnnnnnnnnnnnnnnnnnnnnnnnnnnnnnnnnnnnnnnnnnnnnnnnnnnnnnnnnnnnnnnnnnnnnnnnnnnnnnnnnnnnnnnnnnnnnnnnnnnnnnnnnnnnnnnnnnnnnnnnnnnnnnnnnnnnnnnnnnnnnnnnnnnnnnnnnnnnnnnnnnnnnnnnnnnnnnnnnnnnnnnnnnnnnnnnnnnnnnnnnnnnnnnnnnnnnnnnnnnnnnnnnnnnnnnnnnnnnnnnnnnnnnnnnnnnnnnnnnnnnnnnnnnnnnnnnnnnnnnnnnnnnnnnnnnnnnnnnnnnnnnnnnnnnnnnnnnnnnnnnnnnnnnnnnnnnnnnnnnnnnnnnnnnnnnnnnnnnnnnnnnnnnnnnnnnnnnnnnnnnnnnnnnnnnnnnnnnnnnnnnnnnnnnnnnnnnnnnnnnnnnnnnnnnnnnnnnnnnnnnnnnnnnnnnnnnnnnnnnnnnnnnnnnnnnnnnnnnnnnnnnnnnnnnnnnnnnnnnnnnnnnnnnnnnnnnnnnnnnnnnnnnnnnnnnnnnnnnnnnnnnnnnnnnnnnnnnnnnnnnnnnnnnnnnnnnnnnnnnnnnnnnnnnnnnnnnnnnnnnnnnnnnnnnnnnnnnnnnnnnnnnnnnnnnnnnnnnnnnnnnnnnnnnnnnnnnnnnnnnnnnnnnnnnnnnnnnnnnnnnnnnnnnnnnnnnnnnnnnnnnnnnnnnnnnnnnnnnnnnnnnnnnnnnnnnnnnnnnnnnnnnnnnnnnnnnnnnnnnnnnnnnnnnnnnnnnnnnnnnnnnnnnnnnnnnnnnnnnnnnnnnnnnnnnnnnnnnnnnnnnnnnnnnnnnnnnnnnnnnnnnnnnnnnnnnnnnnnnnnnnnnnnnnnnnnnnnnnnnnnnnnnnnnnnnnnnnnnnnnnnnnnnnnnnnnnnnnnnnnnnnnnnnnnnnnnnnnnnnnnnnnnnnnnnnnnnnnnnnnnnnnnnnnnnnnnnnnnnnnnnnnnnnnnnnnnnnnnnnnnnnnnnnnnnnnnnnnnnnnnnnnnnnnnnnnnnnnnnnnnnnnnnnnnnnnnnnnnnnnnnnnnnnnnnnnnnnnnnnnnnnnnnnnnnnnnnnnnnnnnnnnnnnnnnnnnnnnnnnnnnnnnnnnnnnnnnnnnnnnnnnnnnnnnnnnnnnnnnnnnnnnnnnnnnnnnnnnnnnnnnnnnnnnnnnnnnnnnnnnnnnnnnnnnnnnnnnnnnnnnnnnnnnnnnnnnnnnnnnnnnnnnnnnnnnnnnnnnnnnnnnnnnnnnnnnnnnnnnnnnnnnnnnnnnnnnnnnnnnnnnnnnnnnnnnnnnnnnnnnnnnnnnnnnnnnnnnnnnnnnnnnnnnnnnnnnnnnnnnnnnnnnnnnnnnnnnnnnnnnnnnnnnnnnnnnnnnnnnnnnnnnnnnnnnnnnnnnnnnnnnnnnnnnnnnnnnnnnnnnnnnnnnnnnnnnnnnnnnnnnnnnnnnnnnnnnnnnnnnnnnnnnnnnnnnnnnnnnnnnnnnnnnnnnnnnnnnnnnnnnnnnnnnnnnnnnnnnnnnnnnnnnnnnnnnnnnnnnnnnnnnnnnnnnnnnnnnnnnnnnnnnnnnnnnnnnnnnnnnnnnnnnnnnnnnnnnnnnnnnnnnnnnnnnnnnnnnnnnnnnnnnnnnnnnnnnnnnnnnnnnnnnnnnnnnnnnnnnnnnnnnnnnnnnnnnnnnnnnnnnnnnnnnnnnnnnnnnnnnnnnnnnnnnnnnnnnnnnnnnnnnnnnnnnnnnnnnnnnnnnnnnnnnnnnnnnnnnnnnnnnnnnnnnnnnnnnnnnnnnnnnnnnnnnnnnnnnnnnnnnnnnnnnnnnnnnnnnnnnnnnnnnnnnnnnnnnnnnnnnnnnnnnnnnnnnnnnnnnnnnnnnnnnnnnnnnnnnnnnnnnnnnnnnnnnnnnnnnnnnnnnnnnnnnnnnnnnnnnnnnnnnnnnnnnnnnnnnnnnnnnnnnnnnnnnnnnnnnnnnnnnnnnnnnnnnnnnnnnnnnnnnnnnnnnnnnnnnnnnnnnnnnnnnnnnnnnnnnnnnnnnnnnnnnnnnnnnnnnnnnnnnnnnnnnnnnnnnnnnnnnnnnnnnnnnnnnnnnnnnnnnnnnnnnnnnnnnnnnnnnnnnnnnnnnnnnnnnnnnnnnnnnnnnnnnnnnnnnnnnnnnnnnnnnnnnnnnnnnnnnnnnnnnnnnnnnnnnnnnnnnnnnnnnnnnnnnnnnnnnnnnnnnnnnnnnnnnnnnnnnnnnnnnnnnnnnnnnnnnnnnnnnnnnnnnnnnnnnnnnnnnnnnnnnnnnnnnnnnnnnnnnnnnnnnnnnnnnnnnnnnnnnnnnnnnnnnnnnnnnnnnnnnnnnnnnnnnnnnnnnnnnnnnnnnnnnnnnnnnnnnnnnnnnnnnnnnnnnnnnnnnnnnnnnnnnnnnnnnnnnnnnnnnnnnnnnnnnnnnnnnnnnnnnnnnnnnnnnnnnnnnnnnnnnnnnnnnnnnnnnnnnnnnnnnnnnnnnnnnnnnnnnnnnnnnnnnnnnnnnnnnnnnnnnnnnnnnnnnnnnnnnnnnnnnnnnnnnnnnnnnnnnnnnnnnnnnnnnnnnnnnnnnnnnnnnnnnnnnnnnnnnnnnnnnnnnnnnnnnnnnnnnnnnnnnnnnnnnnnnnnnnnnnnnnnnnnnnnnnnnnnnnnnnnnnnnnnnnnnnnnnnnnnnnnnnnnnnnnnnnnnnnnnnnnnnnnnnnnnnnnnnnnnnnnnnnnnnnnnnnnnnnnnnnnnnnnnnnnnnnnnnnnnnnnnnnnnnnnnnnnnnnnnnnnnnnnnnnnnnnnnnnnnnnnnnnnnnnnnnnnnnnnnnnnnnnnnnnnnnnnnnnnnnnnnnnnnnnnnnnnnnnnnnnnnnnnnnnnnnnnnnnnnnnnnnnnnnnnnnnnnnnnnnnnnnnnnnnnnnnnnnnnnnnnnnnnnnnnnnnnnnnnnnnnnnnnnnnnnnnnnnnnnnnnnnnnnnnnnnnnnnnnnnnnnnnnnnnnnnnnnnnnnnnnnnnnnnnnnnnnnnnnnnnnnnnnnnnnnnnnnnnnnnnnnnnnnnnnnnnnnnnnnnnnnnnnnnnnnnnnnnnnnnnnnnnnnnnnnnnnnnnnnnnnnnnnnnnnnnnnnnnnnnnnnnnnnnnnnnnnnnnnnnnnnnnnnnnnnnnnnnnnnnnnnnnnnnnnnnnnnnnnnnnnnnnnnnnnnnnnnnnnnnnnnnnnnnnnnnnnnnnnnnnnnnnnnnnnnnnnnnnnnnnnnnnnnnnnnnnnnnnnnnnnnnnnnnnnnnnnnnnnnnnnnnnnnnnnnnnnnnnnnnnnnnnnnnnnnnnnnnnnnnnnnnnnnnnnnnnnnnnnnnnnnnnnnnnnnnnnnnnnnnnnnnnnnnnnnnnnnnnnnnnnnnnnnnnnnnnnnnnnnnnnnnnnnnnnnnnnnnnnnnnnnnnnnnnnnnnnnnnnnnnnnnnnnnnnnnnnnnnnnnnnnnnnnnnnnnnnnnnnnnnnnnnnnnnnnnnnnnnnnnnnnnnnnnnnnnnnnnnnnnnnnnnnnnnnnnnnnnnnnnnnnnnnnnnnnnnnnnnnnnnnnnnnnnnnnnnnnnnnnnnnnnnnnnnnnnnnnnnnnnnnnnnnnnnnnnnnnnnnnnnnnnnnnnnnnnnnnnnnnnnnnnnnnnnnnnnnnnnnnnnnnnnnnnnnnnnnnnnnnnnnnnnnnnnnnnnnnnnnnnnnnnnnnnnnnnnnnnnnnnnnnnnnnnnnnnnnnnnnnnnnnnnnnnnnnnnnnnnnnnnnnnnnnnnnnnnnnnnnnnnnnnnnnnnnnnnnnnnnnnnnnnnnnnnnnnnnnnnnnnnnnnnnnnnnnnnnnnnnnnnnnnnnnnnnnnnnnnnnnnnnnnnnnnnnnnnnnnnnnnnnnnnnnnnnnnnnnnnnnnnnnnnnnnnnnnnnnnnnnnnnnnnnnnnnnnnnnnnnnnnnnnnnnnnnnnnnnnnnnnnnnnnnnnnnnnnnnnnnnnnnnnnnnnnnnnnnnnnnnnnnnnnnnnnnnnnnnnnnnnnnnnnnnnnnnnnnnnnnnnnnnnnnnnnnnnnnnnnnnnnnnnnnnnnnnnnnnnnnnnnnnnnnnnnnnnnnnnnnnnnnnnnnnnnnnnnnnnnnnnnnnnnnnnnnnnnnnnnnnnnnnnnnnnnnnnnnnnnnnnnnnnnnnnnnnnnnnnnnnnnnnnnnnnnnnnnnnnnnnnnnnnnnnnnnnnnnnnnnnnnnnnnnnnnnnnnnnnnnnnnnnnnnnnnnnnnnnnnnnnnnnnnnnnnnnnnnnnnnnnnnnnnnnnnnnnnnnnnnnnnnnnnnnnnnnnnnnnnnnnnnnnnnnnnnnnnnnnnnnnnnnnnnnnnnnnnnnnnnnnnnnnnnnnnnnnnnnnnnnnnnnnnnnnnnnnnnnnnnnnnnnnnnnnnnnnnnnnnnnnnnnnnnnnnnnnnnnnnnnnnnnnnnnnnnnnnnnnnnnnnnnnnnnnnnnnnnnnnnnnnnnnnnnnnnnnnnnnnnnnnnnnnnnnnnnnnnnnnnnnnnnnnnnnnnnnnnnnnnnnnnnnnnnnnnnnnnnnnnnnnnnnnnnnnnnnnnnnnnnnnnnnnnnnnnnnnnnnnnnnnnnnnnnnnnnnnnnnnnnnnnnnnnnnnnnnnnnnnnnnnnnnnnnnnnnnnnnnnnnnnnnnnnnnnnnnnnnnnnnnnnnnnnnnnnnnnnnnnnnnnnnnnnnnnnnnnnnnnnnnnnnnnnnnnnnnnnnnnnnnnnnnnnnnnnnnnnnnnnnnnnnnnnnnnnnnnnnnnnnnnnnnnnnnnnnnnnnnnnnnnnnnnnnnnnnnnnnnnnnnnnnnnnnnnnnnnnnnnnnnnnnnnnnnnnnnnnnnnnnnnnnnnnnnnnnnnnnnnnnnnnnnnnnnnnnnnnnnnnnnnnnnnnnnnnnnnnnnnnnnnnnnnnnnnnnnnnnnnnnnnnnnnnnnnnnnnnnnnnnnnnnnnnnnnnnnnnnnnnnnnnnnnnnnnnnnnnnnnnnnnnnnnnnnnnnnnnnnnnnnnnnnnnnnnnnnnnnnnnnnnnnnnnnnnnnnnnnnnnnnnnnnnnnnnnnnnnnnnnnnnnnnnnnnnnnnnnnnnnnnnnnnnnnnnnnnnnnnnnnnnnnnnnnnnnnnnnnnnnnnnnnnnnnnnnnnnnnnnnnnnnnnnnnnnnnnnnnnnnnnnnnnnnnnnnnnnnnnnnnnnnnnnnnnnnnnnnnnnnnnnnnnnnnnnnnnnnnnnnnnnnnnnnnnnnnnnnnnnnnnnnnnnnnnnnnnnnnnnnnnnnnnnnnnnnnnnnnnnnnnnnnnnnnnnnnnnnnnnnnnnnnnnnnnnnnnnnnnnnnnnnnnnnnnnnnnnnnnnnnnnnnnnnnnnnnnnnnnnnnnnnnnnnnnnnnnnnnnnnnnnnnnnnnnnnnnnnnnnnnnnnnnnnnnnnnnnnnnnnnnnnnnnnnnnnnnnnnnnnnnnnnnnnnnnnnnnnnnnnnnnnnnnnnnnnnnnnnnnnnnnnnnnnnnnnnnnnnnnnnnnnnnnnnnnnnnnnnnnnnnnnnnnnnnnnnnnnnnnnnnnnnnnnnnnnnnnnnnnnnnnnnnnnnnnnnnnnnnnnnnnnnnnnnnnnnnnnnnnnnnnnnnnnnnnnnnnnnnnnnnnnnnnnnnnnnnnnnnnnnnnnnnnnnnnnnnnnnnnnnnnnnnnnnnnnnnnnnnnnnnnnnnnnnnnnnnnnnnnnnnnnnnnnnnnnnnnnnnnnnnnnnnnnnnnnnnnnnnnnnnnnnnnnnnnnnnnnnnnnnnnnnnnnnnnnnnnnnnnnnnnnnnnnnnnnnnnnnnnnnnnnnnnnnnnnnnnnnnnnnnnnnnnnnnnnnnnnnnnnnnnnnnnnnnnnnnnnnnnnnnnnnnnnnnnnnnnnnnnnnnnnnnnnnnnnnnnnnnnnnnnnnnnnnnnnnnnnnnnnnnnnnnnnnnnnnnnnnnnnnnnnnnnnnnnnnnnnnnnnnnnnnnnnnnnnnnnnnnnnnnnnnnnnnnnnnnnnnnnnnnnnnnnnnnnnnnnnnnnnnnnnnnnnnnnnnnnnnnnnnnnnnnnnnnnnnnnnnnnnnnnnnnnnnnnnnnnnnnnnnnnnnnnnnnnnnnnnnnnnnnnnnnnnnnnnnnnnnnnnnnnnnnnnnnnnnnnnnnnnnnnnnnnnnnnnnnnnnnnnnnnnnnnnnnnnnnnnnnnnnnnnnnnnnnnnnnnnnnnnnnnnnnnnnnnnnnnnnnnnnnnnnnnnnnnnnnnnnnnnnnnnnnnnnnnnnnnnnnnnnnnnnnnnnnnnnnnnnnnnnnnnnnnnnnnnnnnnnnnnnnnnnnnnnnnnnnnnnnnnnnnnnnnnnnnnnnnnnnnnnnnnnnnnnnnnnnnnnnnnnnnnnnnnnnnnnnnnnnnnnnnnnnnnnnnnnnnnnnnnnnnnnnnnnnnnnnnnnnnnnnnnnnnnnnnnnnnnnnnnnnnnnnnnnnnnnnnnnnnnnnnnnnnnnnnnnnnnnnnnnnnnnnnnnnnnnnnnnnnnnnnnnnnnnnnnnnnnnnnnnnnnnnnnnnnnnnnnnnnnnnnnnnnnnnnnnnnnnnnnnnnnnnnnnnnnnnnnnnnnnnnnnnnnnnnnnnnnnnnnnnnnnnnnnnnnnnnnnnnnnnnnnnnnnnnnnnnnnnnnnnnnnnnnnnnnnnnnnnnnnnnnnnnnnnnnnnnnnnnnnnnnnnnnnnnnnnnnnnnnnnnnnnnnnnnnnnnnnnnnnnnnnnnnnnnnnnnnnnnnnnnnnnnnnnnnnnnnnnnnnnnnnnnnnnnnnnnnnnnnnnnnnnnnnnnnnnnnnnnnnnnnnnnnnnnnnnnnnnnnnnnnnnnnnnnnnnnnnnnnnnnnnnnnnnnnnnnnnnnnnnnnnnnnnnnnnnnnnnnnnnnnnnnnnnnnnnnnnnnnnnnnnnnnnnnnnnnnnnnnnnnnnnnnnnnnnnnnnnnnnnnnnnnnnnnnnnnnnnnnnnnnnnnnnnnnnnnnnnnnnnnnnnnnnnnnnnnnnnnnnnnnnnnnnnnnnnnnnnnnnnnnnnnnnnnnnnnnnnnnnnnnnnnnnnnnnnnnnnnnnnnnnnnnnnnnnnnnnnnnnnnnnnnnnnnnnnnnnnnnnnnnnnnnnnnnnnnnnnnnnnnnnnnnnnnnnnnnnnnnnnnnnnnnnnnnnnnnnnnnnnnnnnnnnnnnnnnnnnnnnnnnnnnnnnnnnnnnnnnnnnnnnnnnnnnnnnnnnnnnnnnnnnnnnnnnnnnnnnnnnnnnnnnnnnnnnnnnnnnnnnnnnnnnnnnnnnnnnnnnnnnnnnnnnnnnnnnnnnnnnnnnnnnnnnnnnnnnnnnnnnnnnnnnnnnnnnnnnnnnnnnnnnnnnnnnnnnnnnnnnnnnnnnnnnnnnnnnnnnnnnnnnnnnnnnnnnnnnnnnnnnnnnnnnnnnnnnnnnnnnnnnnnnnnnnnnnnnnnnnnnnnnnnnnnnnnnnnnnnnnnnnnnnnnnnnnnnnnnnnnnnnnnnnnnnnnnnnnnnnnnnnnnnnnnnnnnnnnnnnnnnnnnnnnnnnnnnnnnnnnnnnnnnnnnnnnnnnnnnnnnnnnnnnnnnnnnnnnnnnnnnnnnnnnnnnnnnnnnnnnnnnnnnnnnnnnnnnnnnnnnnnnnnnnnnnnnnnnnnnnnnnnnnnnnnnnnnnnnnnnnnnnnnnnnnnnnnnnnnnnnnnnnnnnnnnnnnnnnnnnnnnnnnnnnnnnnnnnnnnnnnnnnnnnnnnnnnnnnnnnnnnnnnnnnnnnnnnnnnnnnnnnnnnnnnnnnnnnnnnnnnnnnnnnnnnnnnnnnnnnnnnnnnnnnnnnnnnnnnnnnnnnnnnnnnnnnnnnnnnnnnnnnnnnnnnnnnnnnnnnnnnnnnnnnnnnnnnnnnnnnnnnnnnnnnnnnnnnnnnnnnnnnnnnnnnnnnnnnnnnnnnnnnnnnnnnnnnnnnnnnnnnnnnnnnnnnnnnnnnnnnnnnnnnnnnnnnnnnnnnnnnnnnnnnnnnnnnnnnnnnnnnnnnnnnnnnnnnnnnnnnnnnnnnnnnnnnnnnnnnnnnnnnnnnnnnnnnnnnnnnnnnnnnnnnnnnnnnnnnnnnnnnnnnnnnnnnnnnnnnnnnnnnnnnnnnnnnnnnnnnnnnnnnnnnnnnnnnnnnnnnnnnnnnnnnnnnnnnnnnnnnnnnnnnnnnnnnnnnnnnnnnnnnnnnnnnnnnnnnnnnnnnnnnnnnnnnnnnnnnnnnnnnnnnnnnnnnnnnnnnnnnnnnnnnnnnnnnnnnnnnnnnnnnnnnnnnnnnnnnnnnnnnnnnnnnnnnnnnnnnnnnnnnnnnnnnnnnnnnnnnnnnnnnnnnnnnnnnnnnnnnnnnnnnnnnnnnnnnnnnnnnnnnnnnnnnnnnnnnnnnnnnnnnnnnnnnnnnnnnnnnnnnnnnnnnnnnnnnnnnnnnnnnnnnnnnnnnnnnnnnnnnnnnnnnnnnnnnnnnnnnnnnnnnnnnnnnnnnnnnnnnnnnnnnnnnnnnnnnnnnnnnnnnnnnnnnnnnnnnnnnnnnnnnnnnnnnnnnnnnnnnnnnnnnnnnnnnnnnnnnnnnnnnnnnnnnnnnnnnnnnnnnnnnnnnnnnnnnnnnnnnnnnnnnnnnnnnnnnnnnnnnnnnnnnnnnnnnnnnnnnnnnnnnnnnnnnnnnnnnnnnnnnnnnnnnnnnnnnnnnnnnnnnnnnnnnnnnnnnnnnnnnnnnnnnnnnnnnnnnnnnnnnnnnnnnnnnnnnnnnnnnnnnnnnnnnnnnnnnnnnnnnnnnnnnnnnnnnnnnnnnnnnnnnnnnnnnnnnnnnnnnnnnnnnnnnnnnnnnnnnnnnnnnnnnnnnnnnnnnnnnnnnnnnnnnnnnnnnnnnnnnnnnnnnnnnnnnnnnnnnnnnnnnnnnnnnnnnnnnnnnnnnnnnnnnnnnnnnnnnnnnnnnnnnnnnnnnnnnnnnnnnnnnnnnnnnnnnnnnnnnnnnnnnnnnnnnnnnnnnnnnnnnnnnnnnnnnnnnnnnnnnnnnnnnnnnnnnnnnnnnnnnnnnnnnnnnnnnnnnnnnnnnnnnnnnnnnnnnnnnnnnnnnnnnnnnnnnnnnnnnnnnnnnnnnnnnnnnnnnnnnnnnnnnnnnnnnnnnnnnnnnnnnnnnnnnnnnnnnnnnnnnnnnnnnnnnnnnnnnnnnnnnnnnnnnnnnnnnnnnnnnnnnnnnnnnnnnnnnnnnnnnnnnnnnnnnnnnnnnnnnnnnnnnnnnnnnnnnnnnnnnnnnnnnnnnnnnnnnnnnnnnnnnnnnnnnnnnnnnnnnnnnnnnnnnnnnnnnnnnnnnnnnnnnnnnnnnnnnnnnnnnnnnnnnnnnnnnnnnnnnnnnnnnnnnnnnnnnnnnnnnnnnnnnnnnnnnnnnnnnnnnnnnnnnnnnnnnnnnnnnnnnnnnnnnnnnnnnnnnnnnnnnnnnnnnnnnnnnnnnnnnnnnnnnnnnnnnnnnnnnnnnnnnnnnnnnnnnnnnnnnnnnnnnnnnnnnnnnnnnnnnnnnnnnnnnnnnnnnnnnnnnnnnnnnnnnnnnnnnnnnnnnnnnnnnnnnnnnnnnnnnnnnnnnnnnnnnnnnnnnnnnnnnnnnnnnnnnnnnnnnnnnnnnnnnnnnnnnnnnnnnnnnnnnnnnnnnnnnnnnnnnnnnnnnnnnnnnnnnnnnnnnnnnnnnnnnnnnnnnnnnnnnnnnnnnnnnnnnnnnnnnnnnnnnnnnnnnnnnnnnnnnnnnnnnnnnnnnnnnnnnnnnnnnnnnnnnnnnnnnnnnnnnnnnnnnnnnnnnnnnnnnnnnnnnnnnnnnnnnnnnnnnnnnnnnnnnnnnnnnnnnnnnnnnnnnnnnnnnnnnnnnnnnnnnnnnnnnnnnnnnnnnnnnnnnnnnnnnnnnnnnnnnnnnnnnnnnnnnnnnnnnnnnnnnnnnnnnnnnnnnnnnnnnnnnnnnnnnnnnnnnnnnnnnnnnnnnnnnnnnnnnnnnnnnnnnnnnnnnnnnnnnnnnnnnnnnnnnnnnnnnnnnnnnnnnnnnnnnnnnnnnnnnnnnnnnnnnnnnnnnnnnnnnnnnnnnnnnnnnnnnnnnnnnnnnnnnnnnnnnnnnnnnnnnnnnnnnnnnnnnnnnnnnnnnnnnnnnnnnnnnnnnnnnnnnnnnnnnnnnnnnnnnnnnnnnnnnnnnnnnnnnnnnnnnnnnnnnnnnnnnnnnnnnnnnnnnnnnnnnnnnnnnnnnnnnnnnnnnnnnnnnnnnnnnnnnnnnnnnnnnnnnnnnnnnnnnnnnnnnnnnnnnnnnnnnnnnnnnnnnnnnnnnnnnnnnnnnnnnnnnnnnnnnnnnnnnnnnnnnnnnnnnnnnnnnnnnnnnnnnnnnnnnnnnnnnnnnnnnnnnnnnnnnnnnnnnnnnnnnnnnnnnnnnnnnnnnnnnnnnnnnnnnnnnnnnnnnnnnnnnnnnnnnnnnnnnnnnnnnnnnnnnnnnnnnnnnnnnnnnnnnnnnnnnnnnnnnnnnnnnnnnnnnnnnnnnnnnnnnnnnnnnnnnnnnnnnnnnnnnnnnnnnnnnnnnnnnnnnnnnnnnnnnnnnnnnnnnnnnnnnnnnnnnnnnnnnnnnnnnnnnnnnnnnnnnnnnnnnnnnnnnnnnnnnnnnnnnnnnnnnnnnnnnnnnnnnnnnnnnnnnnnnnnnnnnnnnnnnnnnnnnnnnnnnnnnnnnnnnnnnnnnnnnnnnnnnnnnnnnnnnnnnnnnnnnnnnnnnnnnnnnnnnnnnnnnnnnnnnnnnnnnnnnnnnnnnnnnnnnnnnnnnnnnnnnnnnnnnnnnnnnnnnnnnnnnnnnnnnnnnnnnnnnnnnnnnnnnnnnnnnnnnnnnnnnnnnnnnnnnnnnnnnnnnnnnnnnnnnnnnnnnnnnnnnnnnnnnnnnnnnnnnnnnnnnnnnnnnnnnnnnnnnnnnnnnnnnnnnnnnnnnnnnnnnnnnnnnnnnnnnnnnnnnnnnnnnnnnnnnnnnnnnnnnnnnnnnnnnnnnnnnnnnnnnnnnnnnnnnnnnnnnnnnnnnnnnnnnnnnnnnnnnnnnnnnnnnnnnnnnnnnnnnnnnnnnnnnnnnnnnnnnnnnnnnnnnnnnnnnnnnnnnnnnnnnnnnnnnnnnnnnnnnnnnnnnnnnnnnnnnnnnnnnnnnnnnnnnnnnnnnnnnnnnnnnnnnnnnnnnnnnnnnnnnnnnnnnnnnnnnnnnnnnnnnnnnnnnnnnnnnnnnnnnnnnnnnnnnnnnnnnnnnnnnnnnnnnnnnnnnnnnnnnnnnnnnnnnnnnnnnnnnnnnnnnnnnnnnnnnnnnnnnnnnnnnnnnnnnnnnnnnnnnnnnnnnnnnnnnnnnnnnnnnnnnnnnnnnnnnnnnnnnnnnnnnnnnnnnnnnnnnnnnnnnnnnnnnnnnnnnnnnnnnnnnnnnnnnnnnnnnnnnnnnnnnnnnnnnnnnnnnnnnnnnnnnnnnnnnnnnnnnnnnnnnnnnnnnnnnnnnnnnnnnnnnnnnnnnnnnnnnnnnnnnnnnnnnnnnnnnnnnnnnnnnnnnnnnnnnnnnnnnnnnnnnnnnnnnnnnnnnnnnnnnnnnnnnnnnnnnnnnnnnnnnnnnnnnnnnnnnnnnnnnnnnnnnnnnnnnnnnnnnnnnnnnnnnnnnnnnnnnnnnnnnnnnnnnnnnnnnnnnnnnnnnnnnnnnnnnnnnnnnnnnnnnnnnnnnnnnnnnnnnnnnnnnnnnnnnnnnnnnnnnnnnnnnnnnnnnnnnnnnnnnnnnnnnnnnnnnnnnnnnnnnnnnnnnnnnnnnnnnnnnnnnnnnnnnnnnnnnnnnnnnnnnnnnnnnnnnnnnnnnnnnnnnnnnnnnnnnnnnnnnnnnnnnnnnnnnnnnnnnnnnnnnnnnnnnnnnnnnnnnnnnnnnnnnnnnnnnnnnnnnnnnnnnnnnnnnnnnnnnnnnnnnnnnnnnnnnnnnnnnnnnnnnnnnnnnnnnnnnnnnnnnnnnnnnnnnnnnnnnnnnnnnnnnnnnnnnnnnnnnnnnnnnnnnnnnnnnnnnnnnnnnnnnnnnnnnnnnnnnnnnnnnnnnnnnnnnnnnnnnnnnnnnnnnnnnnnnnnnnnnnnnnnnnnnnnnnnnnnnnnnnnnnnnnnnnnnnnnnnnnnnnnnnnnnnnnnnnnnnnnnnnnnnnnnnnnnnnnnnnnnnnnnnnnnnnnnnnnnnnnnnnnnnnnnnnnnnnnnnnnnnnnnnnnnnnnnnnnnnnnnnnnnnnnnnnnnnnnnnnnnnnnnnnnnnnnnnnnnnnnnnnnnnnnnnnnnnnnnnnnnnnnnnnnnnnnnnnnnnnnnnnnnnnnnnnnnnnnnnnnnnnnnnnnnnnnnnnnnnnnnnnnnnnnnnnnnnnnnnnnnnnnnnnnnnnnnnnnnnnnnnnnnnnnnnnnnnnnnnnnnnnnnnnnnnnnnnnnnnnnnnnnnnnnnnnnnnnnnnnnnnnnnnnnnnnnnnnnnnnnnnnnnnnnnnnnnnnnnnnnnnnnnnnnnnnnnnnnnnnnnnnnnnnnnnnnnnnnnnnnnnnnnnnnnnnnnnnnnnnnnnnnnnnnnnnnnnnnnnnnnnnnnnnnnnnnnnnnnnnnnnnnnnnnnnnnnnnnnnnnnnnnnnnnnnnnnnnnnnnnnnnnnnnnnnnnnnnnnnnnnnnnnnnnnnnnnnnnnnnnnnnnnnnnnnnnnnnnnnnnnnnnnnnnnnnnnnnnnnnnnnnnnnnnnnnnnnnnnnnnnnnnnnnnnnnnnnnnnnnnnnnnnnnnnnnnnnnnnnnnnnnnnnnnnnnnnnnnnnnnnnnnnnnnnnnnnnnnnnnnnnnnnnnnnnnnnnnnnnnnnnnnnnnnnnnnnnnnnnnnnnnnnnnnnnnnnnnnnnnnnnnnnnnnnnnnnnnnnnnnnnnnnnnnnnnnnnnnnnnnnnnnnnnnnnnnnnnnnnnnnnnnnnnnnnnnnnnnnnnnnnnnnnnnnnnnnnnnnnnnnnnnnnnnnnnnnnnnnnnnnnnnnnnnnnnnnnnnnnnnnnnnnnnnnnnnnnnnnnnnnnnnnnnnnnnnnnnnnnnnnnnnnnnnnnnnnnnnnnnnnnnnnnnnnnnnnnnnnnnnnnnnnnnnnnnnnnnnnnnnnnnnnnnnnnnnnnnnnnnnnnnnnnnnnnnnnnnnnnnnnnnnnnnnnnnnnnnnnnnnnnnnnnnnnnnnnnnnnnnnnnnnnnnnnnnnnnnnnnnnnnnnnnnnnnnnnnnnnnnnnnnnnnnnnnnnnnnnnnnnnnnnnnnnnnnnnnnnnnnnnnnnnnnnnnnnnnnnnnnnnnnnnnnnnnnnnnnnnnnnnnnnnnnnnnnnnnnnnnnnnnnnnnnnnnnnnnnnnnnnnnnnnnnnnnnnnnnnnnnnnnnnnnnnnnnnnnnnnnnnnnnnnnnnnnnnnnnnnnnnnnnnnnnnnnnnnnnnnnnnnnnnnnnnnnnnnnnnnnnnnnnnnnnnnnnnnnnnnnnnnnnnnnnnnnnnnnnnnnnnnnnnnnnnnnnnnnnnnnnnnnnnnnnnnnnnnnnnnnnnnnnnnnnnnnnnnnnnnnnnnnnnnnnnnnnnnnnnnnnnnnnnnnnnnnnnnnnnnnnnnnnnnnnnnnnnnnnnnnnnnnnnnnnnnnnnnnnnnnnnnnnnnnnnnnnnnnnnnnnnnnnnnnnnnnnnnnnnnnnnnnnnnnnnnnnnnnnnnnnnnnnnnnnnnnnnnnnnnnnnnnnnnnnnnnnnnnnnnnnnnnnnnnnnnnnnnnnnnnnnnnnnnnnnnnnnnnnnnnnnnnnnnnnnnnnnnnnnnnnnnnnnnnnnnnnnnnnnnnnnnnnnnnnnnnnnnnnnnnnnnnnnnnnnnnnnnnnnnnnnnnnnnnnnnnnnnnnnnnnnnnnnnnnnnnnnnnnnnnnnnnnnnnnnnnnnnnnnnnnnnnnnnnnnnnnnnnnnnnnnnnnnnnnnnnnnnnnnnnnnnnnnnnnnnnnnnnnnnnnnnnnnnnnnnnnnnnnnnnnnnnnnnnnnnnnnnnnnnnnnnnnnnnnnnnnnnnnnnnnnnnnnnnnnnnnnnnnnnnnnnnnnnnnnnnnnnnnnnnnnnnnnnnnnnnnnnnnnnnnnnnnnnnnnnnnnnnnnnnnnnnnnnnnnnnnnnnnnnnnnnnnnnnnnnnnnnnnnnnnnnnnnnnnnnnnnnnnnnnnnnnnnnnnnnnnnnnnnnnnnnnnnnnnnnnnnnnnnnnnnnnnnnnnnnnnnnnnnnnnnnnnnnnnnnnnnnnnnnnnnnnnnnnnnnnnnnnnnnnnnnnnnnnnnnnnnnnnnnnnnnnnnnnnnnnnnnnnnnnnnnnnnnnnnnnnnnnnnnnnnnnnnnnnnnnnnnnnnnnnnnnnnnnnnnnnnnnnnnnnnnnnnnnnnnnnnnnnnnnnnnnnnnnnnnnnnnnnnnnnnnnnnnnnnnnnnnnnnnnnnnnnnnnnnnnnnnnnnnnnnnnnnnnnnnnnnnnnnnnnnnnnnnnnnnnnnnnnnnnnnnnnnnnnnnnnnnnnnnnnnnnnnnnnnnnnnnnnnnnnnnnnnnnnnnnnnnnnnnnnnnnnnnnnnnnnnnnnnnnnnnnnnnnnnnnnnnnnnnnnnnnnnnnnnnnnnnnnnnnnnnnnnnnnnnnnnnnnnnnnnnnnnnnnnnnnnnnnnnnnnnnnnnnnnnnnnnnnnnnnnnnnnnnnnnnnnnnnnnnnnnnnnnnnnnnnnnnnnnnnnnnnnnnnnnnnnnnnnnnnnnnnnnnnnnnnnnnnnnnnnnnnnnnnnnnnnnnnnnnnnnnnnnnnnnnnnnnnnnnnnnnnnnnnnnnnnnnnnnnnnnnnnnnnnnnnnnnnnnnnnnnnnnnnnnnnnnnnnnnnnnnnnnnnnnnnnnnnnnnnnnnnnnnnnnnnnnnnnnnnnnnnnnnnnnnnnnnnnnnnnnnnnnnnnnnnnnnnnnnnnnnnnnnnnnnnnnnnnnnnnnnnnnnnnnnnnnnnnnnnnnnnnnnnnnnnnnnnnnnnnnnnnnnnnnnnnnnnnnnnnnnnnnnnnnnnnnnnnnnnnnnnnnnnnnnnnnnnnnnnnnnnnnnnnnnnnnnnnnnnnnnnnnnnnnnnnnnnnnnnnnnnnnnnnnnnnnnnnnnnnnnnnnnnnnnnnnnnnnnnnnnnnnnnnnnnnnnnnnnnnnnnnnnnnnnnnnnnnnnnnnnnnnnnnnnnnnnnnnnnnnnnnnnnnnnnnnnnnnnnnnnnnnnnnnnnnnnnnnnnnnnnnnnnnnnnnnnnnnnnnnnnnnnnnnnnnnnnnnnnnnnnnnnnnnnnnnnnnnnnnnnnnnnnnnnnnnnnnnnnnnnnnnnnnnnnnnnnnnnnnnnnnnnnnnnnnnnnnnnnnnnnnnnnnnnnnnnnnnnnnnnnnnnnnnnnnnnnnnnnnnnnnnnnnnnnnnnnnnnnnnnnnnnnnnnnnnnnnnnnnnnnnnnnnnnnnnnnnnnnnnnnnnnnnnnnnnnnnnnnnnnnnnnnnnnnnnnnnnnnnnnnnnnnnnnnnnnnnnnnnnnnnnnnnnnnnnnnnnnnnnnnnnnnnnnnnnnnnnnnnnnnnnnnnnnnnnnnnnnnnnnnnnnnnnnnnnnnnnnnnnnnnnnnnnnnnnnnnnnnnnnnnnnnnnnnnnnnnnnnnnnnnnnnnnnnnnnnnnnnnnnnnnnnnnnnnnnnnnnnnnnnnnnnnnnnnnnnnnnnnnnnnnnnnnnnnnnnnnnnnnnnnnnnnnnnnnnnnnnnnnnnnnnnnnnnnnnnnnnnnnnnnnnnnnnnnnnnnnnnnnnnnnnnnnnnnnnnnnnnnnnnnnnnnnnnnnnnnnnnnnnnnnnnnnnnnnnnnnnnnnnnnnnnnnnnnnnnnnnnnnnnnnnnnnnnnnnnnnnnnnnnnnnnnnnnnnnnnnnnnnnnnnnnnnnnnnnnnnnnnnnnnnnnnnnnnnnnnnnnnnnnnnnnnnnnnnnnnnnnnnnnnnnnnnnnnnnnnnnnnnnnnnnnnnnnnnnnnnnnnnnnnnnnnnnnnnnnnnnnnnnnnnnnnnnnnnnnnnnnnnnnnnnnnnnnnnnnnnnnnnnnnnnnnnnnnnnnnnnnnnnnnnnnnnnnnnnnnnnnnnnnnnnnnnnnnnnnnnnnnnnnnnnnnnnnnnnnnnnnnnnnnnnnnnnnnnnnnnnnnnnnnnnnnnnnnnnnnnnnnnnnnnnnnnnnnnnnnnnnnnnnnnnnnnnnnnnnnnnnnnnnnnnnnnnnnnnnnnnnnnnnnnnnnnnnnnnnnnnnnnnnnnnnnnnnnnnnnnnnnnnnnnnnnnnnnnnnnnnnnnnnnnnnnnnnnnnnnnnnnnnnnnnnnnnnnnnnnnnnnnnnnnnnnnnnnnnnnnnnnnnnnnnnnnnnnnnnnnnnnnnnnnnnnnnnnnnnnnnnnnnnnnnnnnnnnnnnnnnnnnnnnnnnnnnnnnnnnnnnnnnnnnnnnnnnnnnnnnnnnnnnnnnnnnnnnnnnnnnnnnnnnnnnnnnnnnnnnnnnnnnnnnnnnnnnnnnnnnnnnnnnnnnnnnnnnnnnnnnnnnnnnnnnnnnnnnnnnnnnnnnnnnnnnnnnnnnnnnnnnnnnnnnnnnnnnnnnnnnnnnnnnnnnnnnnnnnnnnnnnnnnnnnnnnnnnnnnnnnnnnnnnnnnnnnnnnnnnnnnnnnnnnnnnnnnnnnnnnnnnnnnnnnnnnnnnnnnnnnnnnnnnnnnnnnnnnnnnnnnnnnnnnnnnnnnnnnnnnnnnnnnnnnnnnnnnnnnnnnnnnnnnnnnnnnnnnnnnnnnnnnnnnnnnnnnnnnnnnnnnnnnnnnnnnnnnnnnnnnnnnnnnnnnnnnnnnnnnnnnnnnnnnnnnnnnnnnnnnnnnnnnnnnnnnnnnnnnnnnnnnnnnnnnnnnnnnnnnnnnnnnnnnnnnnnnnnnnnnnnnnnnnnnnnnnnnnnnnnnnnnnnnnnnnnnnnnnnnnnnnnnnnnnnnnnnnnnnnnnnnnnnnnnnnnnnnnnnnnnnnnnnnnnnnnnnnnnnnnnnnnnnnnnnnnnnnnnnnnnnnnnnnnnnnnnnnnnnnnnnnnnnnnnnnnnnnnnnnnnnnnnnnnnnnnnnnnnnnnnnnnnnnnnnnnnnnnnnnnnnnnnnnnnnnnnnnnnnnnnnnnnnnnnnnnnnnnnnnnnnnnnnnnnnnnnnnnnnnnnnnnnnnnnnnnnnnnnnnnnnnnnnnnnnnnnnnnnnnnnnnnnnnnnnnnnnnnnnnnnnnnnnnnnnnnnnnnnnnnnnnnnnnnnnnnnnnnnnnnnnnnnnnnnnnnnnnnnnnnnnnnnnnnnnnnnnnnnnnnnnnnnnnnnnnnnnnnnnnnnnnnnnnnnnnnnnnnnnnnnnnnnnnnnnnnnnnnnnnnnnnnnnnnnnnnnnnnnnnnnnnnnnnnnnnnnnnnnnnnnnnnnnnnnnnnnnnnnnnnnnnnnnnnnnnnnnnnnnnnnnnnnnnnnnnnnnnnnnnnnnnnnnnnnnnnnnnnnnnnnnnnnnnnnnnnnnnnnnnnnnnnnnnnnnnnnnnnnnnnnnnnnnnnnnnnnnnnnnnnnnnnnnnnnnnnnnnnnnnnnnnnnnnnnnnnnnnnnnnnnnnnnnnnnnnnnnnnnnnnnnnnnnnnnnnnnnnnnnnnnnnnnnnnnnnnnnnnnnnnnnnnnnnnnnnnnnnnnnnnnnnnnnnnnnnnnnnnnnnnnnnnnnnnnnnnnnnnnnnnnnnnnnnnnnnnnnnnnnnnnnnnnnnnnnnnnnnnnnnnnnnnnnnnnnnnnnnnnnnnnnnnnnnnnnnnnnnnnnnnnnnnnnnnnnnnnnnnnnnnnnnnnnnnnnnnnnnnnnnnnnnnnnnnnnnnnnnnnnnnnnnnnnnnnnnnnnnnnnnnnnnnnnnnnnnnnnnnnnnnnnnnnnnnnnnnnnnnnnnnnnnnnnnnnnnnnnnnnnnnnnnnnnnnnnnnnnnnnnnnnnnnnnnnnnnnnnnnnnnnnnnnnnnnnnnnnnnnnnnnnnnnnnnnnnnnnnnnnnnnnnnnnnnnnnnnnnnnnnnnnnnnnnnnnnnnnnnnnnnnnnnnnnnnnnnnnnnnnnnnnnnnnnnnnnnnnnnnnnnnnnnnnnnnnnnnnnnnnnnnnnnnnnnnnnnnnnnnnnnnnnnnnnnnnnnnnnnnnnnnnnnnnnnnnnnnnnnnnnnnnnnnnnnnnnnnnnnnnnnnnnnnnnnnnnnnnnnnnnnnnnnnnnnnnnnnnnnnnnnnnnnnnnnnnnnnnnnnnnnnnnnnnnnnnnnnnnnnnnnnnnnnnnnnnnnnnnnnnnnnnnnnnnnnnnnnnnnnnnnnnnnnnnnnnnnnnnnnnnnnnnnnnnnnnnnnnnnnnnnnnnnnnnnnnnnnnnnnnnnnnnnnnnnnnnnnnnnnnnnnnnnnnnnnnnnnnnnnnnnnnnnnnnnnnnnnnnnnnnnnnnnnnnnnnnnnnnnnnnnnnnnnnnnnnnnnnnnnnnnnnnnnnnnnnnnnnnnnnnnnnnnnnnnnnnnnnnnnnnnnnnnnnnnnnnnnnnnnnnnnnnnnnnnnnnnnnnnnnnnnnnnnnnnnnnnnnnnnnnnnnnnnnnnnnnnnnnnnnnnnnnnnnnnnnnnnnnnnnnnnnnnnnnnnnnnnnnnnnnnnnnnnnnnnnnnnnnnnnnnnnnnnnnnnnnnnnnnnnnnnnnnnnnnnnnnnnnnnnnnnnnnnnnnnnnnnnnnnnnnnnnnnnnnnnnnnnnnnnnnnnnnnnnnnnnnnnnnnnnnnnnnnnnnnnnnnnnnnnnnnnnnnnnnnnnnnnnnnnnnnnnnnnnnnnnnnnnnnnnnnnnnnnnnnnnnnnnnnnnnnnnnnnnnnnnnnnnnnnnnnnnnnnnnnnnnnnnnnnnnnnnnnnnnnnnnnnnnnnnnnnnnnnnnnnnnnnnnnnnnnnnnnnnnnnnnnnnnnnnnnnnnnnnnnnnnnnnnnnnnnnnnnnnnnnnnnnnnnnnnnnnnnnnnnnnnnnnnnnnnnnnnnnnnnnnnnnnnnnnnnnnnnnnnnnnnnnnnnnnnnnnnnnnnnnnnnnnnnnnnnnnnnnnnnnnnnnnnnnnnnnnnnnnnnnnnnnnnnnnnnnnnnnnnnnnnnnnnnnnnnnnnnnnnnnnnnnnnnnnnnnnnnnnnnnnnnnnnnnnnnnnnnnnnnnnnnnnnnnnnnnnnnnnnnnnnnnnnnnnnnnnnnnnnnnnnnnnnnnnnnnnnnnnnnnnnnnnnnnnnnnnnnnnnnnnnnnnnnnnnnnnnnnnnnnnnnnnnnnnnnnnnnnnnnnnnnnnnnnnnnnnnnnnnnnnnnnnnnnnnnnnnnnnnnnnnnnnnnnnnnnnnnnnnnnnnnnnnnnnnnnnnnnnnnnnnnnnnnnnnnnnnnnnnnnnnnnnnnnnnnnnnnnnnnnnnnnnnnnnnnnnnnnnnnnnnnnnnnnnnnnnnnnnnnnnnnnnnnnnnnnnnnnnnnnnnnnnnnnnnnnnnnnnnnnnnnnnnnnnnnnnnnnnnnnnnnnnnnnnnnnnnnnnnnnnnnnnnnnnnnnnnnnnnnnnnnnnnnnnnnnnnnnnnnnnnnnnnnnnnnnnnnnnnnnnnnnnnnnnnnnnnnnnnnnnnnnnnnnnnnnnnnnnnnnnnnnnnnnnnnnnnnnnnnnnnnnnnnnnnnnnnnnnnnnnnnnnnnnnnnnnnnnnnnnnnnnnnnnnnnnnnnnnnnnnnnnnnnnnnnnnnnnnnnnnnnnnnnnnnnnnnnnnnnnnnnnnnnnnnnnnnnnnnnnnnnnnnnnnnnnnnnnnnnnnnnnnnnnnnnnnnnnnnnnnnnnnnnnnnnnnnnnnnnnnnnnnnnnnnnnnnnnnnnnnnnnnnnnnnnnnnnnnnnnnnnnnnnnnnnnnnnnnnnnnnnnnnnnnnnnnnnnnnnnnnnnnnnnnnnnnnnnnnnnnnnnnnnnnnnnnnnnnnnnnnnnnnnnnnnnnnnnnnnnnnnnnnnnnnnnnnnnnnnnnnnnnnnnnnnnnnnnnnnnnnnnnnnnnnnnnnnnnnnnnnnnnnnnnnnnnnnnnnnnnnnnnnnnnnnnnnnnnnnnnnnnnnnnnnnnnnnnnnnnnnnnnnnnnnnnnnnnnnnnnnnnnnnnnnnnnnnnnnnnnnnnnnnnnnnnnnnnnnnnnnnnnnnnnnnnnnnnnnnnnnnnnnnnnnnnnnnnnnnnnnnnnnnnnnnnnnnnnnnnnnnnnnnnnnnnnnnnnnnnnnnnnnnnnnnnnnnnnnnnnnnnnnnnnnnnnnnnnnnnnnnnnnnnnnnnnnnnnnnnnnnnnnnnnnnnnnnnnnnnnnnnnnnnnnnnnnnnnnnnnnnnnnnnnnnnnnnnnnnnnnnnnnnnnnnnnnnnnnnnnnnnnnnnnnnnnnnnnnnnnnnnnnnnnnnnnnnnnnnnnnnnnnnnnnnnnnnnnnnnnnnnnnnnnnnnnnnnnnnnnnnnnnnnnnnnnnnnnnnnnnnnnnnnnnnnnnnnnnnnnnnnnnnnnnnnnnnnnnnnnnnnnnnnnnnnnnnnnnnnnnnnnnnnnnnnnnnnnnnnnnnnnnnnnnnnnnnnnnnnnnnnnnnnnnnnnnnnnnnnnnnnnnnnnnnnnnnnnnnnnnnnnnnnnnnnnnnnnnnnnnnnnnnnnnnnnnnnnnnnnnnnnnnnnnnnnnnnnnnnnnnnnnnnnnnnnnnnnnnnnnnnnnnnnnnnnnnnnnnnnnnnnnnnnnnnnnnnnnnnnnnnnnnnnnnnnnnnnnnnnnnnnnnnnnnnnnnnnnnnnnnnnnnnnnnnnnnnnnnnnnnnnnnnnnnnnnnnnnnnnnnnnnnnnnnnnnnnnnnnnnnnnnnnnnnnnnnnnnnnnnnnnnnnnnnnnnnnnnnnnnnnnnnnnnnnnnnnnnnnnnnnnnnnnnnnnnnnnnnnnnnnnnnnnnnnnnnnnnnnnnnnnnnnnnnnnnnnnnnnnnnnnnnnnnnnnnnnnnnnnnnnnnnnnnnnnnnnnnnnnnnnnnnnnnnnnnnnnnnnnnnnnnnnnnnnnnnnnnnnnnnnnnnnnnnnnnnnnnnnnnnnnnnnnnnnnnnnnnnnnnnnnnnnnnnnnnnnnnnnnnnnnnnnnnnnnnnnnnnnnnnnnnnnnnnnnnnnnnnnnnnnnnnnnnnnnnnnnnnnnnnnnnnnnnnnnnnnnnnnnnnnnnnnnnnnnnnnnnnnnnnnnnnnnnnnnnnnnnnnnnnnnnnnnnnnnnnnnnnnnnnnnnnnnnnnnnnnnnnnnnnnnnnnnnnnnnnnnnnnnnnnnnnnnnnnnnnnnnnnnnnnnnnnnnnnnnnnnnnnnnnnnnnnnnnnnnnnnnnnnnnnnnnnnnnnnnnnnnnnnnnnnnnnnnnnnnnnnnnnnnnnnnnnnnnnnnnnnnnnnnnnnnnnnnnnnnnnnnnnnnnnnnnnnnnnnnnnnnnnnnnnnnnnnnnnnnnnnnnnnnnnnnnnnnnnnnnnnnnnnnnnnnnnnnnnnnnnnnnnnnnnnnnnnnnnnnnnnnnnnnnnnnnnnnnnnnnnnnnnnnnnnnnnnnnnnnnnnnnnnnnnnnnnnnnnnnnnnnnnnnnnnnnnnnnnnnnnnnnnnnnnnnnnnnnnnnnnnnnnnnnnnnnnnnnnnnnnnnnnnnnnnnnnnnnnnnnnnnnnnnnnnnnnnnnnnnnnnnnnnnnnnnnnnnnnnnnnnnnnnnnnnnnnnnnnnnnnnnnnnnnnnnnnnnnnnnnnnnnnnnnnnnnnnnnnnnnnnnnnnnnnnnnnnnnnnnnnnnnnnnnnnnnnnnnnnnnnnnnnnnnnnnnnnnnnnnnnnnnnnnnnnnnnnnnnnnnnnnnnnnnnnnnnnnnnnnnnnnnnnnnnnnnnnnnnnnnnnnnnnnnnnnnnnnnnnnnnnnnnnnnnnnnnnnnnnnnnnnnnnnnnnnnnnnnnnnnnnnnnnnnnnnnnnnnnnnnnnnnnnnnnnnnnnnnnnnnnnnnnnnnnnnnnnnnnnnnnnnnnnnnnnnnnnnnnnnnnnnnnnnnnnnnnnnnnnnnnnnnnnnnnnnnnnnnnnnnnnnnnnnnnnnnnnnnnnnnnnnnnnnnnnnnnnnnnnnnnnnnnnnnnnnnnnnnnnnnnnnnnnnnnnnnnnnnnnnnnnnnnnnnnnnnnnnnnnnnnnnnnnnnnnnnnnnnnnnnnnnnnnnnnnnnnnnnnnnnnnnnnnnnnnnnnnnnnnnnnnnnnnnnnnnnnnnnnnnnnnnnnnnnnnnnnnnnnnnnnnnnnnnnnnnnnnnnnnnnnnnnnnnnnnnnnnnnnnnnnnnnnnnnnnnnnnnnnnnnnnnnnnnnnnnnnnnnnnnnnnnnnnnnnnnnnnnnnnnnnnnnnnnnnnnnnnnnnnnnnnnnnnnnnnnnnnnnnnnnnnnnnnnnnnnnnnnnnnnnnnnnnnnnnnnnnnnnnnnnnnnnnnnnnnnnnnnnnnnnnnnnnnnnnnnnnnnnnnnnnnnnnnnnnnnnnnnnnnnnnnnnnnnnnnnnnnnnnnnnnnnnnnnnnnnnnnnnnnnnnnnnnnnnnnnnnnnnnnnnnnnnnnnnnnnnnnnnnnnnnnnnnnnnnnnnnnnnnnnnnnnnnnnnnnnnnnnnnnnnnnnnnnnnnnnnnnnnnnnnnnnnnnnnnnnnnnnnnnnnnnnnnnnnnnnnnnnnnnnnnnnnnnnnnnnnnnnnnnnnnnnnnnnnnnnnnnnnnnnnnnnnnnnnnnnnnnnnnnnnnnnnnnnnnnnnnnnnnnnnnnnnnnnnnnnnnnnnnnnnnnnnnnnnnnnnnnnnnnnnnnnnnnnnnnnnnnnnnnnnnnnnnnnnnnnnnnnnnnnnnnnnnnnnnnnnnnnnnnnnnnnnnnnnnnnnnnnnnnnnnnnnnnnnnnnnnnnnnnnnnnnnnnnnnnnnnnnnnnnnnnnnnnnnnnnnnnnnnnnnnnnnnnnnnnnnnnnnnnnnnnnnnnnnnnnnnnnnnnnnnnnnnnnnnnnnnnnnnnnnnnnnnnnnnnnnnnnnnnnnnnnnnnnnnnnnnnnnnnnnnnnnnnnnnnnnnnnnnnnnnnnnnnnnnnnnnnnnnnnnnnnnnnnnnnnnnnnnnnnnnnnnnnnnnnnnnnnnnnnnnnnnnnnnnnnnnnnnnnnnnnnnnnnnnnnnnnnnnnnnnnnnnnnnnnnnnnnnnnnnnnnnnnnnnnnnnnnnnnnnnnnnnnnnnnnnnnnnnnnnnnnnnnnnnnnnnnnnnnnnnnnnnnnnnnnnnnnnnnnnnnnnnnnnnnnnnnnnnnnnnnnnnnnnnnnnnnnnnnnnnnnnnnnnnnnnnnnnnnnnnnnnnnnnnnnnnnnnnnnnnnnnnnnnnnnnnnnnnnnnnnnnnnnnnnnnnnnnnnnnnnnnnnnnnnnnnnnnnnnnnnnnnnnnnnnnnnnnnnnnnnnnnnnnnnnnnnnnnnnnnnnnnnnnnnnnnnnnnnnnnnnnnnnnnnnnnnnnnnnnnnnnnnnnnnnnnnnnnnnnnnnnnnnnnnnnnnnnnnnnnnnnnnnnnnnnnnnnnnnnnnnnnnnnnnnnnnnnnnnnnnnnnnnnnnnnnnnnnnnnnnnnnnnnnnnnnnnnnnnnnnnnnnnnnnnnnnnnnnnnnnnnnnnnnnnnnnnnnnnnnnnnnnnnnnnnnnnnnnnnnnnnnnnnnnnnnnnnnnnnnnnnnnnnnnnnnnnnnnnnnnnnnnnnnnnnnnnnnnnnnnnnnnnnnnnnnnnnnnnnnnnnnnnnnnnnnnnnnnnnnnnnnnnnnnnnnnnnnnnnnnnnnnnnnnnnnnnnnnnnnnnnnnnnnnnnnnnnnnnnnnnnnnnnnnnnnnnnnnnnnnnnnnnnnnnnnnnnnnnnnnnnnnnnnnnnnnnnnnnnnnnnnnnnnnnnnnnnnnnnnnnnnnnnnnnnnnnnnnnnnnnnnnnnnnnnnnnnnnnnnnnnnnnngcagcttgtgcaggagaagaagatcgagggcatcggcgacgttcgtgacgagtccgaccgcgacgggatgcgcattgtggtggagttgaagcggggcgagcagcagccggaagtcatcctgaacaacctctacaagcatacccagctacaggaaaacttcggcatgatcatgctggccatcgtcaatggccagccgcgtaccttatcgctcatcgaagccctccagctattcatcgaccaccgcgtcaatgtggtgcggcggcgcaccgcttatgagctgcgcaaggcccaggagcgcgcccacgttctggaagggttcctcaaggcgcttcggcagctcgatgccatcatcaagctgattcgcgcctccaagaccccgcccgaagctcgccaaggtctaatggccgagtttgaattcaccgagcggcaggcccaggctattctcgagttacagttgcagcgcctgaccgccctcgagcgcgagaaaatccagcaggaatatgatgaccttcagaagaagatcacgcagtaccaggaaatactcgccagcgaaaaggtgttgaagaaagttattgtgaacgagttaagggaaatccagaaggactacggcgacctgcggcgaacggagattatcgaggagcaggcggaaatcaagctcgaggaccttatcgccgtcgaagatgtggtcatcaccgtctcgcattcgggctatctcaagcgcactccggtcagcatgtatcgccagcaaggtcgtggcggcaagggccgcttggggatgaagacgcgcgacgaggatttcgtcgagcacctcttcatcgcctcgacgcacagttacatcttggttttcaccaacaccggcaagatgtattggctgaaggtctatgagatcccggatgtgggcgcggcggggaaaggcaagaatattgtcaacctggttaacctcgcttccgatgagaaagtcgcggcgatggtagctgtcagggagttgcccgacgaaccgaaggacgtgactatcgagggcgagacgtatgcggcggaaggatacgtgaccctggtgacgcgtctcggcatcatcaagaagacgcgcttggcggaattctccagccccaactcgcgcggcattatcgccatgaaggtggaggaaggcgacgcgctgatcgccgccacgctgacctcggggcgcgataccattttcctcgcctcgcacgagggcatggccattcgttttcccgagagcgacgtgcgcgacatgggccgcgcggcttacggcgtctacgccatggacctggagaaaggcgactacatcgtcggcatggagattgtgggcgagaaggagctgatcctctccgtcaccgagaaagggtacggcaagcgtacccccattaccgaataccgcttccagtcccgagccggcaagggcgtcatcaacgtcaagacggttgaacgcaacggcaaagtggtgggtgtgctgagcgtcaccgaagagtcggaggttatgctcatcagccagcaaggcaagatcacccgcctcgacgccagcaccatccgcgaatcgggccgttccgcgcagggagtcaggctgattaacctcgaagaaggcgaccaggtcgcggccgtctgcctggtgagcagcgaaaacggcgacaacgaagcccagcagccgaaactaattcagtagatgtgggtgtgggtagcgcggacccccggttttggggtccgcggctttttgttgggctttggacaagccgcggaccccaaaaccgggggtccgcgctacttaggttagcgggccagtttgcgtgtagggccttgcggcgttattctgtaattcaggtgacagggatgagtgaagtggaagcgaaagaggggagactgctggagcaactgcggcaagtgtcgtcgttggtggttgcctattccggcggggtggactctgcttacctcgcttatgcggcgcaccgggcgctgggcgagcgcatgctggcggtgacggcgctgagcgccagctactccgagcgcgaccggcaagaggcgcaggcggtggtggcgcgcttcaagctgccccacgaattcatcaccaccgacgaactctcgaaccccgcctatcgcgccaacaatcccgaccgctgctacttctgcaaggacgaactattcgacaagctcgatgaactcgtcgcccagcgcggatttgccgccgttgcttacggcgttaacgtggacgatcagggcgactggcgccccggccagcgcgccgcgcgcgagcacaaagttctaactccgctgctcgacgcgggtctcaccaaggctgatatccgcgaacttgcctgccgcgccgatgtgccggtgtggaatcgcccggcgtcggcgtgtctttcctcgcgtattgcctacggtatcgaggtgacgcccgaacgcttggcgattgtggaaaaaggggaagaggccctgcgtgcactcggtttccggcagttccgggtacgctaccacgatgaacttgcccgcatcgagatttccgctgaggaaatgccgcgtgcgctggacccgaccatggcgcgcaagttggtcgaggttctgaaaccactcggcttcaagtttgtcaccctggacctggaaggctaccgcacaggttccatgaatcctctcctcgtgaatatagggtagcgcggaccctcggttttggggtccgcggctttttcttaggcccgtggacaacccgcggaccccaaaaccgggggtccgcgctacccctcgtttttccgaatgcccggaggtcacgcatggggaccaacagtctcttcacagcatgtcttctcaccaccttctctttaccggcaggcgcgcaagatcaggctcttgctcagcggctgggctaccctggcggtgccaagctgctgatcatccacgccgatgacctggcggtggcgcacgcgcaggacatggccagcttcgaggccctgaaccgaggtgccgtgtcgtccgccagcgtcatggtcccatgcccctggctgacggaagtagcggactacgcgaagggtcaccccgatgccgacctaggtttgcacctaaccttgacgagtgaatggaaaacctacaagtggggacctaccgcgccacgcgaccaggtcccgtcgctgctcgatcctcagggttatctcttttccgataccggagaagccgtgcggcatatcaagccggaagaggcggagcgagaggtccgggcgcaggtggagactgctctgaagatgggaatccgtcccacccacctcgattcacacatggcggtgcttttcgccaaccctgccttgctggcggtcctcgtcaacgtcgcgcatgattatcacctcccatttttgatattgaagattcccggcgtgccacctgatatgtacgcagccctcaaacccaccgacgtgatcctggaccacgtgttcatggccgttccgccgatcaagccggacgagtggttgagctattacacgcatattctgaggactatgcctcccggggtttcggagctcatcgttcacctcgcctacgatgacgccgaaatgcaggctgtcaccgtcgaccatccggactacgggagcgcctggcggcagcgcgatttcaacgtggtgacgagcgcggaattccgaaaggctctcgaggaatatcacatcacggtggtgacctggcgcgagctgggcaggctgcttccgaaaccgtaacgatctgggatgggctgcgaagacctgcggccttcaaagattcacgttggaccgacccctcacccgtcccgttccggctggtgaaagcgccggcagcgggacaccctctccccagggagagggctgcttgctaatctctgccgccccgtttccggtgcaatcagcgccaacaacttcgcaaactccttggctgcgcgggtggcgcatacattgttctttatgtatgcgccaccttttgcgcgcggtgccgacccaacaggctgcggaaaaacccttgacgctgtcatcctgaggagcccgccattcttatcggcggacgacgaaggatccccgcagttgcttgattttacaactgccgagattcttctcccgcaaggcgggatcagaatgacagtgcggcggggtttttccgcagcgcgttaaaggtcggcgctactttgcaaactctttggctacgcagacggtgttggagtggatttggatcgtgtcgtcgagtcggcgagcgtagccgcccgccagcacgaccgccaccggtgtgttcttcgctcttgccttctcaaaaaccaggcggtcgcgtttttccaggcccgcgagagagagtttcaggcccccaagttggtcctcgcggtagggatcggcgccggcgacgtagaagatcaggtcggggctgaattccgccagcgctgtgtccattccctgcgtaagttcactcaagtactcttcatcgccgacgccgtcgcgcaggttgatgtcgagcgagctgggcggttttgggtagggataattgttctcctggtgaatcgacagagtgaacaccgtgtggtcgccgccaaagatcgccgccgtgccgttaccctgatggacgtcgcaatcgacggtcatggcgcgctcgatagtccgatccttttgcaggcggcgaatggccaccgcaaaatcattcaacacgcaaaagccctcgccatggtcaggatacgcatggtgaaaaccgccgcccacgttgacggccgctccatcctcgagcgccaaacgcccggccagaatcgacccgccggtgcaaagccaaaccgcccggatgagttcgggggaatagggaatctccaagcgcagcacttccaggtaggagagtttgcccgtctggagcttgcgcaagtattcccggtggtgaaccaatgcgatgtcgtcgtccgaggctggagggggctcgacgaaatctcccggctcggcaatatgctcgtgaagcaccttttctttaaccagacgatacttgatggacgggaacacgtggtcccccaggttcaagtcataacgatctgaatagacgagtttcaagacgctgcccccactgctgccaagttcctaatcgaagtctgccggccagtccggatggcgataatgttcgaagagccgcgcaatttgctccgccgtgactcgcgacagggaaagctcgggtatcgcatcctcctcgcagaaccgcgcttccgtctccgcgctcccggcgggcgcttggctcaaaagctagcaccggatgaagattttataggcgtgatatggatagggcggatgggggtgcttgttccgatcatacaaggcgagcagtttgacagcacgggtcgtgtagccggcttcctcgagcacctcccgcaccacggcttcgctaggagactcccccacgtccgcccagccaccgggcaggctccaccgcccctcatcgggctccttgacgaagagcagcgtgccctcgcgaaacaccacgcctctcacatccactttgggcgtggcgtagccctcctcacgcgcaaagaaatcacgaactgtggctgtgtcaatgtccgtatatgaagagataatttctgttgagatattgcgtattgacatatatcgctcacggtcaaatgcatcgcgcgtaaaagcgagaccgttttgcgcgatggcattcaatcggctggcccaggcggcccatctttgatccattttaagcgcctttgactgtcattccaccgtcaccgacttcgccaggtttctcggctggtctacgtcgcaaccgcgaagcaccccgatgtggtaagcgagcagttggagcgggatggcttccaggacggtcgagagcgtcccgctggtatgaggcagaaccaccaaatggtccgccatggcgcgcacttcgcggtcgccctcggtgaccagggcgatgatggtggcgccgcgcgctttggcctccttgatgttggagatggtgcgttcgtagcgttgccgggaaaaaggcgagttccaattgcaggtggcaatcaccaccaccggcagcccgtcggagatcagagcgatggggccgtgtttcatctcgcccgccgggtatgcttcggcgtgaatgtaggaaaccttcttcatcttgagcgcgccctccaaagccaccgggaagtgcacgccgcggccgaggaagagaaaatccgaagaccggtagaagcgttgagccagttcggcgatctcgtcgtcccgctggaggacggactccagttgtttcggcaactccgccagggccttcaaccaggacttgctctcttcataggagaggaagccgcgcacctgggccaggtagagggcgaagagataaagggctgccaactgggcggtaaaggttttggtggagcccacgccaatctcggggcccgcgtgggtgtaaatcgtgccatgcgcttcgcgtgagaccatgcttcccagcaggttgcagatggcgagcgtcttcgagcccttggcctgcgcctcgcgttgcgccgcgatggtgtccgccgtctcgccggactgagtgatgagcacggtcagggtttgcgagtcgaccagagggtcgcgataacgaaactccgaggcgtagtctacttccacggggatgcgcgccacccgctcgatcatgatcttgcctgccaggcctgcgtggcgtgaggtcccggccgccacgattttgatgtcgcggaaggagcggaattcttcttcgcggatttccatctcgtccagaaacacctggccggtttccagcgagaagcggcccagggcggtgtcgcgaacggcgcgcggctgctcgtagatttccttgatggtgaagtgcttgaagccgcctttttcggccaggatgggatcccaggtgatgtgctgaacgcggcgcgagacggggtggccgtcaaagccgctcagcttcacgccgttgggtgtcaacacggccaggtcgtgatcggcgagaaagaaaagatcgcgggtgtgatagagaatggcgggaacgtcactggccaccaggtattcgtctttgcccaggccgatgaccaccggcggcccttggcgcacggcgataatcttgttggggtcgcgggtggaaataatggccagggcaaagacgccccggagctggcgcacggcggcgcgcaccgcttcttcgagattattcgagttggcggcccctggcaactcggcgttgccctccaggtgtttctccaccaggtgagcgatgacctccgtatcaacctccgtggcgaacttgtgcccttcgtctaccagccccttcttgagctccaggtaattttcgatgattccattgtgaaccaccaccaccgtccccttgcaatcgcggtgcgggtgggcattctcttccgtgggggcgccgtgggtggcccagcgagtgtgccccacgccgtaagtcccgtccaccggattcaggcggaccacctcttcgaggctgtgcagtttgcccgtggcgcggcgcacttccaggttgtggccctgaatcacggcaatacccgccgagtcgtagccgcggtattgcagccgctgcaatccttccaacaaaacgggcacgacgcgtttgtttccgatatagccaataattcctgacatgaaatcctttcaggttctatacgaggcgttaatggtgatgtagtcgtgtgtcaggtcgcaggtccagatatgggcagaggcggtgccctggtggaggtcgagccggagggtcatttccttcccgtccagctccttacgcgcggcggcttcgtcgaagccggtatccaccccgtcccggcagagcagcaagtcgttgacgcggatatccactttgttggggtcgaagagtgcgccggaataacccgccgcgcaaatgatgcggccccagttgggatcgcttcccgcgagggcggttttaaccaggggtgagttggcgatggcgcgcgccacacgctccgcgtcggaaggttttctggccccttgcacctcgacgttgaccagtttcttggccccttctccgtccttggcgatcattttggccaagctctggcagagttgcgtaagtccctccaggaaccatgcccagcttgtgttgccggggcgcacgctgacgcccgaaacgccgctcgccaaggccaccacggtgtcattcgtcgatgtgtctccatccacggtgacaagattgaaagagacatccacggccgcccgcagcaagctctggagtgtgcggggagcgaaaagcgcatccgtggtcacaaaggaaagcagggtggccaggcgtggattgatcatccccgagcccttggcgactcccgccaggtacacgggttttccccctacctccgagcggaggacgcacgacttggagaaggtgtcggtggtcatgatggcgcgcgcgaccgcggaggcgccttcgacggaaaggctcgccacgagggtgggaagttgactcgtgaccaggtcgagctcgagcggcaccccgatgacccccgtggaggccggcaggacctgggcgggctggagatacatcagcttggccgctgcgcgcgcgctctctcgcgccgcctgcatgcctttgcgtcccgtgcaggcgttggcattgccggagttcaccagcaccgcgcggcaccgcccgtgggtttccgcaaggttttgccgtgataggagtaccggcgccgccgccacacggttggtggtaaacacgccggctgccgtgccggcgggcgcgtcgcagaggatcaaggccaaatcaagctcgccccgcgccttcttgattcccgccgctatagcggccccacggaagccgcaagcggaagcaaggctaccctccacgatttcccactttggcatgcttggtctccggaattgccgattgtcgattgtcgattgaaaacccacggtctcgaatcgcggtgccaatcggccatcgtccatcttcgccggttgtgccgccttgcgctcctgacggccagcttgctacttaacctttaccgccggcgagagctcgacaacgccgggtggagcggcgggcggtggctcagccccggcggccttaatgctgcgcagcgtctcgtcgcacgcctgcatgtaaagaacctcatcttccgctccaggggagcaatccgcctcaatgatcctttctcggcacatgattcttgccgtcaagtgcatgtagcggcctttgagctcgcgaatcagcatggcgtctcgattgttaatcttcgaatgctcgagatgataaagcggaaggtcttcggccacgcccttggcctcccatttcgccagagcctcttgagaaaactcccatgtctcgtcggggttgggttgtgaggtgatggtgagcgaagggccgatgctccaaaacacggagcgactgatcttcaccccgcccgggaaagcctcgacattcccgtagagtccgttcgcgatttgaatatcaattccaagggcatcattgtggtaggggcgctgctggagggtcgccacgctcacccgctgctggtgccctggataccacttcaccaggaagtattcgccccccgccaagccactgccgatgatcaggattgaaactgcgaggatcaattgaactggtatacgcttcttcatgccagccatcttaacacgtagtagaagcgattttacatcaccacgcttgacgtaccgagaccccgacactcacccaaacgcgggtagtggattcccgctttcgcgggaatgacggtattcggggcgcccatgcctggcatcgtcattcccgcgcaagcgggaatccaccagtattctgggcgcccatgcctggcatcgtcattcccgcgcaagcgggaatccaccggtgttcagggcactcatgcctggcatcgtcattcccgcgtaagcgggaatccaccggtgttcagggcactcatgcccggcatcgtcattcccgcgcaagcgggaatccaccggtgttcagggcactcaagcccggcatcgtcattcccgcgcaagcgggaatccaccggtgttcagggcactcatgcctggcatcgtcattcccgcgtaagcgggaatccaccggtgttcagggcactcatgcctggcatcgtcattcccgctcatgcgggaatccaccggtgttcagggcactcatgcccggcatcgtcattcccgcgcaagcgggaatccaccggtgttcagggcactcatgcctggcatcgtcattcccgcgcaagcgggaatccaccggcggatctcagcctaccgaaccacaataagcggacgcgtcttttcgacgacttcgccgacagcttgcgcggaggtgttgagggcctgcaaggcctcgaggagtccagcagcgtcttgagcggcgacggaaaacagcagccctcccgaggtctgggggtcgaagagcaggtttcggacctcctgcggaacgcggctggcaaactcgacgcagtcgccgacgaagtccatattccttttaaggccgcccggcagaaacccgcggcgcgaatactcctcggcctccgccaggaattcaaccttagtcgagtcaatcgccaggctcaccttgcttcccacggccatctcgcgggcgtggcccagcaagccgaagccggtgatatcggtggccgagtgaacgtcaaattgccgggccacttcgctggcggcgcgattgagcgcgcacatggattcgcttgccgccatcaccgccgcttggctagcctctcctatcttcaacgccgtgctgatgattccggtgcccaggcgcttggtcaagagcagttggtcgccgggccgcgccgcgcaattggtgagaatgcgttgcgggtgaacgaggccggtcacggcataaccgaatttgatctcctcatcgccgattgaatgaccgccaatcaccgcgcagccagcctcctgcattttggcgtgcccgccttgcaggatttcctccagcatttcgaggccctcttctttgttgggaaatcccacgatggagagcgcggagatcggccggccacccatggcgtagacgtcgctgagcgcattggccgccgcgatttggccgaaggtgtagggatcgtccacaacgggagtgaagaaatccaccgtctgaaccagcgccaggtccggggcgagttgatacactcccgcgtcgtcattggtgtcgaagcccaccaggacgttggcgtcggattgtttcggcaacttggccagcactcggtccaaaatacttggactcagtttggccgctcaacccgccgctttcaccatcgtggtcaaacgaactggaggcacggcaaaaacccctttcgacgcggcggattgagcagtgggaatcccccaatgcagttccgccacgcccaacaatgtaaccacctccgcagtatagcagagcgggtagtgggtagcgcagagtctcgctttccagagactctgcggcttttccatcaattcggcaaggtacatccccgaggtaggaagggccgcacttgaaaagtcttcctagcctcgaaccatccaatttttctcttcctaggtggtgcattgaaggcccaaaatagccccgtccaaggtcgatgaaaaccaggggtggcgcagacatgccgtagtttggcatgtctgtcgtcatgggcctccggccggcgaaagttcatgaaaaacggttatgatgaccaactctctcgccaatttgagctatcccctttattttcagcacgtggtttttcgaccctgcgcccctttcgcgagggcgcatacatcctgccaaagagcggcgggacgtatgcgccaccctggtttttccaccctgcggcttttctgatcgtactagcccgacaccgatgagccggtccccacgcgcgaggccaaaagccgcagcgcagacccgcttcttaggtctgcggctcttttgccggtataggaacggccgccacaacttcgacccatgggcaacttcaccagcgcggtgccgaggagcgagttcagccgggcgaggccaaaagccgcagacctaaaaaacaggtctgcgctacctgccctccctagcctcgaacccggtggtttttgtcttcctaaatagtgcgcagaagcccaaatatagcccctcaaaggccgaaaaggggcgttttttgcctaaaatgcgcacttttttcactctaaaaccagttcgtttttgcaaaacgaactaagttaagtcgtttatttgcaataaatcattgagttcgttccctctattttaacatctttttggcattccgggccccttgatccgtcgttgtggcctagttttcttgtcatttaatccttgcggcttggcattcctgaccattccagccgagcagcttaccacaatcctagcctcgtgtcaagagacacagtgtcgtagcctgaaacaggcacttggatcggctgcccagccaatgccgggcggttcccgtagcgcagacctgctctttaggtctgcggcttttgtaggcgtttggacgcgaccgccgcaggctcgccatgggcagcttcaccggcccggctccgatgagccggtcggaacgcggcggggccaaaggccgcggactgacaaagagccgctccccacgcggcgccactgccagtgctcggcttgcttgacccggccggccctcgcaggctggggcgaacctattccacgttctcgccgctcacaagccaaagtgtgcgctgcccgcccgatcttttgatagaattgggtgcatgccagctccaagggtaagagacagaccggtgctggccgtgggcgagcctccgcgccacgaagactgttgggcgaagacgaccaaagacggtaagcccggcatcaccgtccgtgatcactgcctcaacgtcggctgcgtcgccgaagccctcctggccttgctgccccatcctgcccagacaaggaggaagccgtgaactacaacttgctcgaagaggagtggattcccgttctctggaaagacggacatagcgatcgcgtgggtattcgtaaggcgctggcgcaagcaggcagaattcgccaaattgcggccagcaaccccatggaccgcgtggcgatcctccgcttcctgctcgcgttgctttattggtgcacgggaaatccgccggataataaggattcgatctcttcgtttcgctcggattggttcaagaagctcgatgaccacaaagaatgtttcaaccttctgggggacgggaagcgcttctatcaatgcaagaccgaatcaggcaaagagaaaaaactccccgctaattacctgattcaggaagtacccaccggcaccaactcgtggcatttccggcattcaaccgacatggaggacggattgtgtcgggcctgctgcgcgatgggtttgttgcgcctgccgttgtttgcgacgtctgccgggcgcggtaagccgccgggcgtgaaccaaaaaccaccggtttatgtcatcccagttggcgtctcgctttccgagacgctacgcctgtcctggcggaaggtatcggacccagaccttggaacgcccacatgggaaagggcagatcaaaggcttccggaatgtggcagtgttccgctgcttatggggttaacctggctgccccgacgcgtgtggctcgacaatcccgaagagcctcaagccaattgcgtctcatgcgggcgcaaagaagctttgatacgccaatgtgtgtttgcgggcataggaagcacaaaggtgaccggaggcgacgagggccgtgtctggaacgacccacacaccttggatgacggcgaggacgttctgaaacccagcaacgccctcggtgcggccgacgcggcggcgggccaatgggcaaacatagcggagggaattctcgctgggaaagaggccattcccgaaagacacctgtgggcggtcagctttgccacagtgcagaacgacaaatacctcgaggcggtcgaatacgagatccccctggtgaccgcgccgggggccgggaaggttgaggggagtctccaacaggtcgataggtggcggagtgaaggttggaagcttgccagcaaagctaagccgagggaaagctcccaaaagcgaaaacacctcgaaattcctcccgttatcgccgccattcgcccccaagcggaagcagaggtttccgagaaaatggccgaattgatcgcggcaggcggagatgcatgggagcaggcagcccgcgcatatagcccgctgatggccgccgtcgccaaatcgctttcaccgggctacacgaccgctgccctccgccggcgacgagagatcgccaacgcaaggccggacatgcgtccgaggccgggagccgatgaaaaggccggccggaaaaagggaggtgacaggtgactccaacagagcaatacgttgaggtcctaagacatctcaagtccggtgaactcgcgctgcttcgcaggcatgccgggcaaggcctcgaccaatcggttgacggctttgatctcttcgccggactctggtggcccttgcgagcaaagaaccagcgcgcgccccgtcgtgccgtggcgtggctgatcgctaaactttacgcattccggccggtcgagcactcacccggccagacgctcgcccggcagcttgggcgatgcggcaacaacgctgtagcggcggtctctgaccgccgtcgtcgatcagagatcgacgctacaatccggccagtcgcccaaaggtttgacgggctgctcacgctgccgctcgccaaaatcgagcccgccctgcgctgggcgctggacctcatagcttccaaaaacctcaaagtcgactgggtgaggctgacaaacgacctttccatttgggaacgcgagaccacccggctcaactgggccgaggaatttttgaaatcttcaaaggaggaccgtcatgttaattgagattcacgccattcaaaaccacagcccggccaacctgaaccgggacgatttgggcgcccccaagacctgttattttggcggggtcttgcgctcgcgcatttccagccagtgcctcaagcggagcatccgcatgagcgatgagttcaagttgttatgtggtggagttcgtacgcggcgcctaccgaagttactttcagagaactttcagggtaaggaaaaggacgattttttcgacttggcccaacaagtcgtccagagatgcggagtgctggcgggcgacgacggacaagaaaaggatgtcatcgtctttctatcaaaaagcgcgttgccgcgcatggcgcaataccttcgcgatctgagtggcaagtctggcgaggagcaaatcagaggggtcgcccgcaaatttgcgcaactgatcgcacgagagcgtcacatgccagacatggcgttgtcgggacgcatgttagagccctcgaagaccgcgaaggaggtgtggaaaggcttggacccccaaatagaggctgctctccaagtgggacacgccatctcgacccacgaggcgcgtccggaagtggactatttcgttgccgcagacgatgtgaagggcgaagacgtcggcggcgcccacatcggagaggccatgtacgcctcggcttgttactacaagtacttctccgtccattgggaaactttggtcacgaatctcgccgggttctcgggcaataaagagcacctggccgctcacacgctcggtgcctttgtccgcggggcggcgttgaccaaccccaccggcaagcagaacagtttcgcggcgcacaatccaccggatggcgtgctggtggagatcaggaacactcccatcagctacgccaacgcctttgcccggccggtggcagcccagggcgagcgcgacatcatctcccagagcatcgcgcaactcgcccagtacgtccacgacatcgacaatggatacggaaagccggtgaagcgcctttggttctctcccaatcttcgttttcccttagttgcacgcgagaaggttaaggaggagcaaaaggaaacaatccgtgagatcgaactgactgcggacaaccttaagtcgctcgatgagcttgtacggtccgtagtcgaagaaatcggctatgactgggaggaggttcagaaggtggttgtgaacgcggaggtggcctgatgagcgcaaacaccctgttcctccgcctcgaaggtccccttcaatcatggggcgatcagcaatcgaaatttgttgtccgccggacggcggaggcgccaaccaaatcgggcgtgttggggctgctctgcgcagccttgggcgtcagccgcgctgaggcccctgaaaaatggcttcccagactcgccacgcagcgcatgggcgtccgcatcgattcacccggggtccgctggtgggactatcacaccgtcggcgcgggaatgcagatgcgcacagccgacggcggaagcaagcccggcgccatgctcacccggcgcgaatacctctgcgacgcgtccttcctggtcgcccttcagggtgaccctggtttgatcgccgaactcgacgccgctgtcagagctcccacatggacgctctacctcggcagaaagtgctgcccgccctcccgccctctgctggagcatccaacagccgaacactcgggtttgctatccgccctcaggtcggttacttggcggaaacgtctggaggcagagccagcgccgcaaaaactggagtgtctactggactgggagccgagcgaagaacagcccgaggctcccgacgacgcgctcatctggtacgacgtcccgctcaccttcgacccgcccgcgcaccaacctcgattcgtaattcgcaagcaattgcaagttggacccgaaggtgacgtacaacttgcggctcaaccggcacagatcgaagcgccggcccctcctcgtccaagagcggattacaccaacacagaatatagaaaccggcggaaagagaggctcgaacgcgatgccggactctgcgtcttctgcaaggctccagcaaccaccgtgcagcacatcacatatcggcgcgctgggggagacgaggcgcaggatgacttgcgctctctttgccgctattgccatgatgctatcaccatgatcgagtacggcctgggcatgggcctggaccgcatcaatcccgaggagccgcgctggtgggataggatcgaacagaagcgagaggagatcatcaaattccgctcgctcgagacgcgccgccgtcgccttgcggcggaggaggtggagtagccatgtacctctcctgcctcctgatcgacaccggcgacaaccccgaccggccccgaccgggacgaacgtggctgcgaaacctctatcacgtccaccaacgcctttgcatggcgtttccctgcgcgtcgcaaaaatccgatgatcctgacttcctcacacctttcacgctagggcacttcgccagaaaccacgtccacgtaaaacgtgaagcggaccacgggtttttatatcgcgtagacccgcagccacgcggcggggtcgtgattctcgtacaatctggctctgccgttaagcctgactggaactacgcgttccataacgcccgctacctccttacggccgaacccgaggttaaggagttcgatccctctttcaccaaagagcagcgtcttcgcttccgcttggccgctaatcctacacggcggctctccaagcattcgttggagcgggatggaaagcccgccgaagcgaagtggatagggaaacgtgttcccgtgccgcatgaccggcttctggactggcttgctgaatggcggctccgccaggatgggcgcgacgagccgtcgggattccgtatccacagggatcgcacgacggtccagtcgggctatatctatttcaagaaacttaaggaggggcaggaaagccataccgaagaccgcacgggaaaggaacggcacggcggggggccccgcttgttctcggtccggtacgaagggattctcgaagtaacggagcccgacaaattccgtaacacccttctgcgcggcatcgggccggggaaggccttcggcttcggcctgctctccgtggcgccttgccgcacctcaccctcgaccgaggcgctgtagcggcggtctccgaccgccgtcacgtcgatcggagatcgacgctacaaggctggctgatggcagatcaatgggaccgccggtcggagaccggcgctacaaatgaaattcaaaccacgcttacggcgactggattggctctacaccgacaaccctatctactaccttacgctctgtacgcaggatcgaaaatgctcgttggcaaacaccgcaatccaccaggaattcacgagattctccgaacgggcaaccgattttctagtttgggtggggttcttcatgatcatgcccgaccacatccatcttttcgtcggcttttgtcgcgagtccccacctttgtggaaatgggtcaaagccctgcggggcgacctgtccaaagtccttcgccaggatgaaggtgaaggcacgcactgggaaaaggatttcttcgatcacgtcatgagatcggaagaatcctatcgggagaaatacgagtatgtccgacagaatccggtccgtgccggtttagtcaaacgtccggaagattggccgtaccaaggcgagattcatcgcttggttttgtagcggcggtctccgaccgccgtcgtcgatcggaggtcgacgctacaaggcacgtcgatcggagatcgacgcgacagcgcgtgctggctggaagccggcgttacgggggcggcgccgtctgtggaggcaatatgagaatccaagatctccacgttctaccgaaattcagcgacggatggagttacctgtacgtggagcactgccgcgtcgaccaggaggaccgggccattgcagttcacgatcaagccgggaaggtgcctgtcccctgcgccaacctggctttgctcatgttgggtccgggcgtctcgattactcacgccgccatctcggtgctggcggaccatgggtgcctggtggcgtggtgcggggaggagggagtccgcttctacgccgtgggcatgggggagacgcgcaatgctggcaatctcctgcatcaggcgcgcgtgtgggcccaccagggtttccatatggaggtcgtgcgccgcctctaccagttgcgtttttccgagaagttcgagcccgccctgactctccagcaaattcggggcatggagggcgtgcgagttcgcgatgcctacgccaaggccgcccaggaagccgggatcacgtggtcgggccgcagctataaacgggacgagtggagcaaggcggaccctgccaaccgagccttgtcgaccgctaactcctgcctgtatggaatctgccatgcggccatcgtatcggctggtttctcgcccgccctcggctttatccataccggcaagatgctgtccttcgtgtacgacctcgccgacctttacaagaccgaggttacagttccggtggcgtttcgggccgccgccgagggggtaggccaactggagcggcgcgtccgtatcacctgccgcgatcagtttgtgtccacaaggcttctggagagaatcatcccggacgtccaagccgccctgatgctgtcaaaagcgtcgccggccgacagcttcgacgtggatgccgccgcccccggcttcctctgggacgatttggaaggagtagtcgaggggggacgtatgctcgcccccgagatcgacgagacggagcccgacgatggtagtcctgattcttgagcgcgtcccgccagggctgcgcggcgaactcacacggtggtttctggaacctcaggccggtgtattcgtgggacgcgtttccgccctggtccgcgagcgcttgtgggaaaaggcgtgtgccaaggcccaagggggcggttgcctgatgctccactcgagcgataacgaacagggctttcaagtccgaacctggggtcgaacggcacggcagatcgaagacttcgagggccttttcctcgttcgtatgccgtggaatcaatgacttctctagtgttgtccccacgcgcgtgggggtgaaccggttccgggaagtgaagggttggagtccgggccgttgtccccacgcgcgtgggggtgaaccgggcgcgaacatcacgacgcagcagttgcgtcagttgtccccacgcgcgtgggggtgaaccgcttacgatggttgcctggcttcccacgagggggttgtccccacgcgcgtgggggtgaaccgtacatgccggtccccggactgccagatcccgagttgtccccacgcgcgtgggggtgaaccgatagagcgggcgcccgaatttgtccagcgtctgttgtccccacgcgcgtgggggtgaaccggctcggttcatcgaatgccaaacctcgataaggttgtccccacgcgcgtgggggtgaaccgcatttagattggccgtattcgacactaatgcggttgtccccacgcgcgtgggggtgaaccggtggttccgtcccaagtcttgatctcgtaactgttgtccccacgcgcgtgggggtgaaccgcaaggcgcgctcgacatgcagagcatgatggggttgtccccacgcgcgtgggggtgaaccgtaaaggtcggaaaacgaggagaaggataccccgttgtccccacgcgcgtgggggtgaaccgttgtaggcaaaggaggaacatggtaactgctagttgtccccacgcgcgtgggggtgaaccgcgtgtcaagggggtactcgactagatgtagtggttgtccccacgcgcgtgggggtgaaccgttggcccaagcggtttgcacgccgccggtggcgttgtccccacgcgcgtgggggtgaaccggtgacaggctgtgtgctgaaggtgacaggctggttgtccccacgcgcgtgggggtgaaccgcgattcccgcaagacgctagggtggatgttgagttgtccccacgcgcgtgggggtgaaccgaaccctgcggcgatggtcatgaccaacctgtaattgtccccacgcgcgtgggggtgaaccgccggcggagatgagggcatccctcagtttgacgttgtccccacgcgcgtgggggtgaaccgaggtttcgcgctacgccgattggcccgtaaacgttgtccccacgcgcgtgggggtgaaccgatactaccagacggaggctgtgtttatctttccgttgtccccacgcgcgtgggggtgaaccgatggcccaaatttcgcgcagaatcaacgcagggttgtccccacgcgcgtggggggggtccggggaagtggcagacacccaggggctcgattacgttctccccacgcgcgtggggacggtccgtctctgcgtctcagcgtctcagcggttcaggtgttctccccacgcgcgtggggatggtccgcgaatcgtagcggcggtagccttcactcgcactttctggacttccgaaacaccagccagtaacaatgctgcctgcggctgtggtgagccaccttccacttagggtcaacgatggggcctttacgaactttgatccagtttcaagtagtgtcctgagtcagaagtcccttgacaaagtcttcctcatgccggggggcttttcgcagccccgccaggggcgaaatactgtagcccagggcgaaagccctgggaaaaatggcccccacccccttctattccccctcccccgctgggcggggggagggggccgcactcaggacccacggttgtcgccgtgggctaaactatgccgcccgctccgcgggctgacttctttaacgaatctcggactcaggagactagctggtgttaagcggaccgcacggccagggggaggctttaactggtgtgaagctttagccgagccacagggcttgcgaagagaagtaacccctcacccgtcccgcgacggctggaaaaagcgccgtcgcgggacaccctctccccaagggagagggctgctcgctcacttggcagcgctgttctttcacctccgaccctcggtgtccagccgaagatacgggacatgctcagcccaagggggagagggccgggaaaccgcccaagcgccttgtccgtaggtttcatccagccgctgcgagagtaatgatctcgttcccctttgggggaacttcgaggctttggcgcggccctgcgcctggatgcgccgccatttactttcgcggcgaggttctgtagcatttgggctacgcggtcaggccaatcggcgaagctctggagtgcggcccgccagtcggcgggctgccgctttcagcaggcgagcttgctcgatcccgcgctgtagcgctgagcccgcatgctggggtcagcagggtggcaaagcaagagaatggcgaccccgcgaggcggggtcggcgctacaaacaggccgcggaaaaacccttgagggtgtcatcctgaggagccgcagacgacgaaggatccctgtagttgcttcacttaacaactgccgagattcttcgcttcgctcagaatgacagcctccaggcgtttttccgcagcctgtataaagccgcggcccgccgcggcgggccgcactccatagcgccgcgcaaggaggaacaatcgtgcttgcacaccctggcaagagactccaagccgctgccttcattgttttcgtgctcgtgggcgtcactgccgcgcgcggctcgttcacgctcgagcaggtgatgagctcgcccttccccaccgagctcgtggctgcaccctcgggcagcagggtggcctgggtgttcaatgcgcgcggcctgcgcaacatctgggtggctgagccaagtggtggcggaggctatgtgtcacggcagctcacccggtacacgcaagacgacggtcaggagatcgccgaactcgcgtggactcctgacggccgggcgattgtctacgtacgcgggggcgacttcgagacgggcggctcctaccccaacccggccagcgcccccgagggggtcgaacaggacgtttgggttgtctccatcgagggtggggcggcgcgcaagctggcggaggggcattcgccggcggtttctcccaagggcgatagtgtggcctacgttttcaaggaccaggtgtggctggtcaagctggcggaaggggccaagccggaacaactgatccacgacaagggcaaagacagctcgctgcggtggtcgcccgacggttcgcagctcgccttcgtcagccggcgtggcgatcacagcttcgtgggggtgtacagtgtggcgggcaagagcatccagtatctcgatccgagcgccgaccaggatttcgagccggtctggtcaacggacagccgccaagtcgccttcgtgcgtcttcctgcttcgcgcgatgggcttatgttcgggccgaaacgcaccgggccgccgtggtcgatccgcgtggccgacgctgccactggccaaggtcacgaggtttggcgcgccgaggcggggcggggcagcgtcttccgcgagattgtggctgagcaccaagtcttttggggggctggcgacaacttggttttcccctgggagcgcgacggctggacgcatctttattcggttccggttgcgggtggcgcggcaaagcttctcacgcccggcgatttcgaagtggaattcgtttccctcagtcgcgatcgtcgccagttgattctcgcctcgaacgaggacgacattgaccggcggcacctttggtccgagccagtcacggacgatcaccccacggcgctgacccggggcgaaggcatcgaatggtcacccgtgattttgagcgacggcggcgcggttgcccttttccattctgacgcccagcgtcccgcgcggccggcgattgtggcgagcgggagcggaattcgcgacctcgctcctgaaacccttcccggcgactttcctgctgctgatctcgtcaccccgcagcaggtgattctccccgctgcggacggcctgcgcgtccacgcgcagctttttctgcctaaggatgaggcctccgggcagcggcacccggcggtagtgttcatgcacggcggctcgcgccggcagatgctgcttggctggcattatatgggctactatcacaatgcctatgccctgaatcagtatctcgccagccggggctacgtggtgctatcgctcaactaccgtagcggcattggctacgggcaggagtttcgcgaggcgctcaactacggcgccagcggggcgagcgagtttaacgatgtggagggcgccgggctctatctgcgccagcgggccgatgtggactcgagccacatcggcctgtggggcgggtcttacggcgggtatttgacggccctcggcttggcccgagcctccgagctattcgcctgcggcgtggacttccacggcgtgcacgactggaaccgggaaatccagaattggacgccctcctacgatcctgccgcgcgtgctgacgcggcgcggctggcgtgggagtcttcgccgctggcctccgtcaagacgtggcgctcgcccgtgttgctggtccagggggatgatgaccgcaacgttcccttcaccgagatggtccgcctggtggaggcgctgcggaaacagggagtggaattccaacaactcgtctttccggacgagattcacgatttcttgcgccatcgcacctggctggcggcctatcatgccgcctcggatttctttgacctgcacctcagataagcagactccaggcggtttcacgcgaaggcgcagagtacgcaaagagcgcaaagggaaaaaggccgtcgcgctggccttctttgcgccctttgcgcctctgcgtgaaaccttgtcgtacacccgctggcaaaatcagactgtaccactaccgacggcgcgcgttaaaacctgacggcccttggggggggcgaaccgttcgacccctgcggggtcgggaggactgatggtggcgcggcccgtgggcggcgggcacaaaaaccgtgcccttgcccacggctactcaatttgaacccctccggggttcggacggggaccggctgaaccccttggggttccgagagccaccggaatgcacagtggcaggttactgaagaagccgagcgtggcaatgtagcggcgaaattatccgtcggccgaaggggcatttcccgaatggtttccgcttgggtgcaggatgtcagggtaactgaaatcgtggccgttgacggcgaaggacttccagcgctcgatgtcacaattgatgaaaacctgtctcgcgattcctcaaaagaatccaacatctgtgtcacagttcttgaaataatcctacgcaaacacattggtccagcttccggatggccaaccatcaggaggcactcgcgcggtcggaatctcagtgaggccaccgcaacacgttgcaacccgacggacagttgcattcgttgccggccggatgtatgctgcggagcggggttggagtccaaaatagaaattccggcttgttagtatgcggcgagcggggaggcggaaatgcccaagtttgtcatcgaacgggaaataccgggggcagggaatctcaccgacgcgcaactacaggaaatctcccgcaaatccgtgaacgttctgaaagggatggggccggagatccagtggttgcacagctacgtcaccggtgacaaggtttattgcgtttatctcgcgccggacgaggcgaccctgcgagagcacgccaagaggggtggattccccgcgaatcgcatttccgcagtgcgccggctcatcgacccgagtacggcggagtagcgccggtttcggcctgtcggaacatgggacaggaagggtttggtttcagcgcctcatcaatggctttttcaagcggcatcccccatccctccaaccaagcggccgaacccgctgtattggtcagagcttgccgcgcgggctggaggctgctttccaattcaagctgctcggcgagtttgaggggcgcgccaagggattgacggagggcggccgctgtccccgccagcgacagggaccggtcccacagcgattgagccgccgccaggcacgcgaaaccttccaggagacgggccacgccgcgtttatatcccagttgctgaaaaatcttcaaactttcacggtaattcgagtgggctgcctggtagtccctctggcctcgcgccaggtttcccagatcagccagtgagctagcgataccccattggtctccaagctcccgaaatgtatccaggccctgttcgtagagagatcgcgcggctaaggtgtcgccttgttcgcgcgcggcatccccttgatggttgagcgaccaagcggctcccgtcccatcgcccagtttgcggaagatggcgagacattcctcataaagggcgcgcgcctgcccatagtcgccctgcaacttgacgacattggccagattactgagcgaacgagagacatccagggggttgcccagctctctccacagggagagactttcttcgaagagagagcgtgaggcagcgatgtctccagagtcgcgcgcggtgaccgccagggcgttgagtgagaccgcgatgccgtgttgatcctgcaagcgccgggagatcgccaggctctcgtcaagaagcgctttggcggaggcatagtcgccctgcccccctgccagaaccgcagccgcgaaagctactcgcgcccgagccttggttggaggcgctgccccggccaaattcaatatcttctgcaatcgatcccggccttccgaaaggtattccctcgtctcccaaaaccgaaaaagggcagcgccgagtcgcaggccccactccgcgttgccggaatccgtcagatactcgagggccacgcgaagattgtcgtgctcgatctcaagacgatccagccactcgcgccggtccgcgtcgctgacctctgaagccccctcctccgctaacacgaggaaataggcggagtgggcgcgctgggtaaggccatcctccccactcgccgccagcttttcctctccatactcgcggatcgtttccaacatcacgaagcgggattcgtcccccggtgcttcgacctgccgcagaaggctcttgtccacaagcgaggccattccctcgagcaggtccaacccgagatcgcttttggtgtcgcaaactgcctccgcggattccagcgtgcatccacccacaaaaaccgaaagccttctaaagagcttctgctcagccgcgttgaggaggtcataactccagtcgacggcgccccgaagcgtttgctgtcgcgccgggaggtcccgcgcgccgccggtcagcagttggaggcggcgcgccagacgcgtttcgatggcggatggcgaaaggaacttaaggcgggcagccgccaattcaatggcgagcggcaggccatccagccgtacgcaaatctccgccactgccgcggcgttttccggtgtgatcacgaaatccggtttgacagccctggcgcgctgcatgagcagtgccacggccggatagtgtgcgagcgcttcgagaggaggcaaagcttgtggatccggcaaagccagcggcggcaccggaaactcatgttcaccataaacgtgcagcgccgcccggctggtcgcgagaaccttaagtccagggacggcagccaagagatccgaaaccaagggcgccgcggtaatcaaatgttcgaagttgtcgagcaggaggaggaatgatccgctggatgagtttctcaggtgttctttgagggtttcgacaagaggctgacctgcggtttcgcggacccccaacgtcagagcaattacggaagggatcaacccagcaccgcttactgctccaagaggcaccagatatacgccacctggaaagctttcactgcactcttccgccacttggagcgcgaggcgcgttttaccaatcccggcggggccggtcaccgtgacaaggcgcacatccttccgcagcagaagccctttggcagcggccacttctctttctcttccgataaacgcggtgcgctgaaccggcagattactcgcgtgactctctacgcgctcaggaaagggttgcaacaggcggtcgcggatggccgccagatcccgggcgaggtcgcgcgtggagctgtagcggtcttcgggctccttggccaggcaccgctcgaccgcccaacaaaggggggcaggaacctctgagttcaaagtaccgatgggctccggcgcttcgcgcaggattgccgccaaggtctcagcgttcgtgggcttatgataggcgcgcttgcccgtgagcatctcgtaaaggacagcaccaaaggaaaactggtctgatcgaaagtccagcatgcgcccgcaagcctgctcgggggacatgtatccaaccgtccccagaatcaacccaggctgactttggggggcacccaatgtgggtatttcttgaaggggcggcatcggtaggcaacatggacttcgcagggctggcacatgggtggccgtcgcagtcaacttcgccaagccaaaatccagaatcttaaccaacccatcttgagtgatcatcaagttgccaggctttaggtctctatgaataatgccggtttcatgagccttcgccaagccttcagcaacttgtgccgctatctgaatggccatccggattgggatcgggccggaggcaaggacgtcgcgcaaggtcctcccttccaccaattccatcgcgatataatgtgtggagccaacctggcttagctcataaatcgttacaatgttggggtgattgagggccgacgcggaacgcgcctccagctccaagcggccgagtagttccctatctgcggagagctttcccggcaggactttgatggcaacatcgcgccttagacggacgtcggtggcacgataaacctctcccattccgcctgatccaatcagggagagaatctcgtatggcccgaaccgtgccttgggcgtgagcgtcgtggagtcagctccagacagcgccgcgggaagtggtgctgtaggcggttcttccttcgacatttcctgagacatgcgctcgcccctggggatttacgaaatccccctcgcgtttccaacccgccctgttatcctatcctttgggtaaaagccctgcgctcttcagcttcagtatagtataccatgtttcgagcaccagtgatttgaaggagtttcccgtggacctccgatcgcttcaaaagcccttgaaggaacgatatcgcaatgaccccgactcctcgcgggtcacaatgcgtgtgaaaggcggacagagcgggtcgcccgcagcatgctccgtggatattggacgcgctatctatcaagccgaagcccacacgggggtcggtggcgccggcaccgctccgtgctccggagaccttctccttggggccctggcggcctgcgcggaaatcacttgccaaatggttgccgcagccatgggcatccagactgaacgcattgaagtgaacgtcgagggagatttggacttgcgcggcacgctggggatctccagggaagtccccgtcggtttcgaaagtatccgcgtgcgttttgatgtctccgcgcccaaggctacacccgaacaagtgcgcgccttgcgcgagaagacggaacagtattgtgtggttatgcagaccctgttgcacccgccgaaggtcgtcagtcagtggcctgaagcaggataacttatggagcgaccggctgacccaggcgcagcggcggtagggcgggccaccctctcccccaagggggtctgtgtgataaccaggctggcgggcccgaggacgccgcaggcgctttggagtgcggcggctcgccgccgctttcatgcagcgagcttgctcgcggcctgcccgcttggctactgcctgcgtgcacagggccagcaagctccccgcactccaaagcgggctccgcccgcgagattcagagttgtcacacaggtcgacgatggtgactgcggagagtgcactttcggtttctccctgcgaggcctgcacacgtaagcttttattatattcctcagagtcgaaggggagatgtgacggcgcacgttaaatcctcacggttctagcggggcgaaccgttcgacccctgcggggtcgggaggattggtggttgcgcggcccgtgggcggcgggcacaataaccgtgcccttgcccacggctactcaatttgaacccctccggggttcagaccgcgacgacagggtagcaggctgctgaacatgtaaagttggttggcgcgactttgcatcacaaagtacttgacaaagcagcaagcgccctgtataaacaccctatggcatgtgcgggtccagctcgctcacgacggtccaggccggtgcccgtgcccagccacgccatggacgatctgcgcttcatccgcgagaccatggaaagcgcagcgtcgttcactgctgtccccggatggggcggagtggtgatcgggatcacggctttagccgctgcggtggttgcttcactccgcccgcaagtggagtggtgggttggggtgtgggggctcgaagccctgtgcgcttttgcggtgggcgggtccgcgattttttggaaggcgcggaaggcgcagactcccttgctttcacagcctgggcggaaattcgtcctgggcctgtctccccccatgctggcggccgccgtgctcagcatcgtgatttaccgcgccggcgttttcaacctgctgcccggagtctggctgctgctttacggggccggggtggtgacggcgggggcgtattccgtaagagtcgtcccgatcatggggctttgcttcatgttcgcgggaattctcgcgctgctctgcccggccgcctgggccaactcgatcatggcggcgggttttggcgggcttcacatcgttttcgggacgattatcgcgaggaggtacggtggctagacaagtttcgaatgctgcggtgcgagttgccggggcaaggcggctggtgcgggaagtgccgcggctgcctgatcaggcgcgggtgtgcgcgcccgaactggaccgcctgatccacgaacgcatccggctcgggatcgtgagcgccctggcggtgaacgaatcactcagcttcaacgagctgaagaaactgctgaagactaccgatggcaacctgagcgtacacgcgcgcaagctggaggaagcggagtacatcatctgcgagaaatacttcgcaggccggctgcccagaaccgtgtaccggcttacaacgacgggccagcgggcgctcgagcgctatctggatcacatggaagcgctgatccaatccatgcgcccgcggtaatcagcgggccaaatttttttgggctggagctttgcatggtaaagtcctttggaaggcaagccgtcttaagggcgcaggcgcccgatgcttctcatcgctcggcccgcgcctcatcacttgactcgcggcggggggtcgcccataggggcggcgccaccgcccactccattcatgcggccattattatggacggaagcgggcgttgggcagccgcacgaggcctgccgcgcagcgcgggacaccgcgagggcgtggaggcggtgcgccgcgcggtgcaggctgctcccggcctggggattgggacgctgacgctgcacgccttttcctctgataactggcaacgcccttcgtgtgaagtccgggaactgatgagcatttttgaagagttcttgcgcgcctcggccggcgagtgggtagacgcgggaataaggaccagcgttatcgggcggcgggatcggctcgagcccggcctggtggccgcaatcgaggctgccgaagccgcaacgcgggagggccggcggttgcacctgcgtctggcgattgattactcggctcgcgacgccattctttgtgccgcgcgatcgctcggcaacggcgagccagccacgccggaagagtttgcccgcttgctcgccgggggcgaacacggccgagcgccggcccccgaccttgacttgctgattcgcaccggcggcgagcagcgcttgagcgacttcatgctgtgggagtgcgcttacgcagaactcgtcttcaccgaccggatgtggccggactttgacgctgccgacctcgaggcagccgtgctcgagttccgttcccgccatcggcgtttcgggcgcgttccggagaccacggtgattgccgattgacgattgccggttgcgcgggcagagaatcgaaattcgaaaatcgaaactcgaaactcggccccaattggtcgcagcagcgtcttttgcgtgtttcgaatttctaagtgacccctcacccggcccgcgccggctggtgaaagccccggccgcagtccaccctctccccttggtagagggcaaagacccaattcgacggagggccggctgacgatgttgagcgaagggcggttggaactttccgcacttggaacggcggtggtgatgggcatactcggcgatgcttttctccgcattttgccttggggcctcaatctcttcctatggatggcggcgctttccgcagccatcgcatttcacgcccgctggagagaggaaagcctttccggaggcggtcagtggttgctcgttgtggtggcggttttcgcgctggggctggcttggcacgattcccccgcattgaaaatgctgggcctttttgcgaccctcacggcgctttccctagtcatctggcgggcccaaggggggccgggttcgtcttgccggccttgctgagtatgccctgggagccgctattgccgggctcaacgcagccttcggcttgctgccagtcttattcggggaggccgagtggaagaagctactcggtgatcggtggtcgcagcgggcgatggcggtggtgcgcggaattctttttgctaccccctgcttactcgtatttggcgggctgttcatgggggcggacgcggtgttcgaccatatcgtcaggagagcgttccacgtgaacctccggcaagtattcactcacttctttgtggccgccttcttcgcctggtgtgtgggtggatacctgcgcggcatgctgtggggcaaggaggtatcgatcataagggagaagagcctcccgcgcgtctccctgggcataatcgaggttgccgtggcgctgagcgccctcgaccttctgttccttgccttcgtcctcgtgcaggtgcgttatttctttggcggctcagccctcatccaggcgaccaccggcctgacctacgcggaatatgcgcgtgcaggcttctttgagctggtggctgtagcggcattgctgctcccgcttctccttctggtgcattggctgattgcccaaaatggcccgaccggagagcgagttttcagagttctggcaggcgtccaaatccttctgctgtttgtcattgtggtatctgcattccaacgcatgcgtctttaccaagctgaatatggcctcacggaagagcgcttgtacgccaccgcgcttatgggctggcttgtggtagtcttcctctggttcgccatgaccgttttgagtgggcaccgcaagcgttttgccttcggagcaatggtggcaggtttcttcctgattattgtcctggaggcgcttaatccggacgcgctcattgctcgcaccaatctcgcgcgagccaaagcagggcgctcttttgatgccggctatgcaacccggctcagcgccgacgccgtgccggaacttgtggcagccctccctaatctgaacccacaggagcgctgcgctgtggcagccggcatcctgaagcgttgggcgttcccccaggcgtctgactggcgtgcctggagctggtctcgcgcacgagccgcgcaggcggtgcgtgagaatggggcaagcctgaagggcgtgcaatgccccgcacagaactagggtcttgtcgtaggagtctctgaacaacgagactgcgcgctacccacttcggtaaagaaaaggaggaatgctgtcatgaagaagtcttggtttaaggagtggggttgggtatattttcctgtatcctggcaggcttgggtttgtctcgcgctgactcttgcgttctgcgcgcaggtgttcgcggccgttgaccgccactcgcattcggcgagcgacacgctctacggcattttcccgtttgtagttcccgcctttgggattctgctctggattgcttccaagacgtccggttccaaatgaccgcgccggccgcgttaggtgggtgcgcgacatgaaagttgaggcctggcattctgttcgatttcctcggtccttccttgcgtagtggtacatcaggatcgtaacgcccctgtcccgcgactgcgggactactcacggggtggccccttgcggggccataatcactcgaccttctacactcccaacttctatgtcgcgcacctggggacgcttttggccgttacgtgctccgcctttcctgatatagtgtagagttcatcgcaacgaggggtttttgtgcactcaatcgtagtctccctcttcttcttgttttcatccgccttcgccccagccggtgctgccccctcttccgacgatccccaagcccgcgccctcgtgcagcaagctaccgaccttgttgggcgcgaccgccccgccgaggctgtcgctcttctccgccaagctatcgctctcgcacccgattccgtcgccgctcaccgccagtacgttcgcacccgcgcgttcttccaaggcgatttggacaccgtgaaagccgagtacgaatcccttgcctccaggaaccccacgaaccccgtctacccccttgctctgctactcgggctcggactcctcgccgagaaccagatggccgtatataagacggttgcctccttggcgccggactggtcctggggccactacgcgaaagcctgggtcaccttcggcagaacgttcttcctgatgaacgaaaagcctgacgccaaggctgaagaggccatcaccgagttcctccgcgccgccgagctcgacccatccgtccccgaattctatgaggacgccatcttctttcaggaggagttcggtcgcctcgccgaggccctggccattgcggagcgcatggccgctcgccctgaaacccgcgccgtcgccctgcccatcgtctggcgtctgcgcctcgcgcaaaccaagggcagcgccgaagcgcaagccgccctgcgtgccgagttggccaaactctccgccggcgccaccaacctcgaacttctcgccgccatttaccgcgggtactccgaggttctcaacgaccaagccgccgccgataggctggagcggcaaattgccaagctcgacccctcgtggttcccggagcgcggctgcgccgagttttcgtccttcaacaacatcagcggaatcttcgtgccggtgctggctgtcaaccgccagtgcgccatcaaccacgccatcaaacgcatcgccctccgtcgcgatcctgactggcgcgtggctgtcgccgattaccagaagctgttggaccagaatcccagcccggctttgcgaaccttgctgcacagcttgctcttccggctctcgcgcgagaacggcgacatcgacgccatggagcgccatgcggaccgcctgctggccctcgatccaaccgacctcacgccgcaggccctggtcgccctcgccctggccgatcaagggggcgacctctcccgagccctggccctcgccagccgagttgagaccgcgctaaccgagtttcacccgctcccgcgccctgccaacgtgccgtccagctacgtgccttccctggagcagcagcagaagaattacctccgccagcgcgcgcttgcgctcgacgccctgagctgggtgctgtggaagagcggaaaaggcgaagaggccgcggctaagctgcgccaggccgtcgatctcgaccgcgatacccagccactctcccatctcgccacggtcctcgatggcctcggcaagcaagaccaagccgccgcgcttcgctccgaactcgaccaggccgcggccgagtccgtcgagcgcaatcttatccgcaagcccactcctgattttgaattcgacggcctcgatggtaagaaacacaaactatcggattaccgaggcaaagtagtgttggtgagtttctggaccacctggtgcggcccttgcgtcggcgagatgcctcttttcgcacggacctacgccaagtacaaggaccggggcttcgaaatcctagccatctcctgcgacaacgcggaagaccgcgataaggtggcccgcttcatggcccagcacgctctctcctttcccgccggatacgatgccggggctggccgcctttacgaagccaacggctaccctaccaacctcgttatcgaccgccagggcgcgctccgttgccgccaaggagctttcgactccgacggccgcgaactcgatctgctgctcggaaaactgctcgccgaatagccggcggcgctgccccgggcccgaatccgtcggttgagagattcgccattgagcgccggccgcagactatctgaagagcgagagtgtgccctaccccggatcgcagggttgcccaaacccctgtatgcgggttaatctgttagtttcctgcatggttctgtcaaaagttgtatgaaaggggcatgaaaggcgggcagaaccccttaccctctcaccccatcgcctctccccaggggagaggggacagggggaggggagtcggggcgggggctgtcaaacgaggaggggttgatgacaaacgagctgaaagacaaagtcgccgtggtcaccgggggatcgcgcgggatcggttattgcattgctgagaggcttcttcaggaaggcgcaaaagtctacatctgcgcgcgcgatgcgaagattctcaagcaggcgctggaggagctgcgcaagcatggcgacggccgggttgaaggcatggtggcggacgtgggccgctatgaggagtgccgaaagctgatccaaagcgccgcccagcgttttggagggatcgatatccttgtgaataatgccggaatcggaattatgaagccggtggaccagctcacgcccgcggagtgggatgccacgatccacaccaatctgtcgggcgtcttttactgctgccgcgaggccatccccattatgcgcaagcgagggggcggatacattttcaatatttcaagtctcgccggggtgaatcctttcgccggggggagcgcctacaacgcctcgaagttcggggtcaatggattcagcgaggccatgatgcaggacgttcgctacgacggcattcgtgtaagttacatcatgcctggaagcgtggatacggactttgggggagcgccggggtctaagtcccgagcgagttggaagctttccggcgaggatatcgccaaggcggtggttgacctttactcttatccgctgtccacgctcgccagccgcatcgagatgcggccctcgcagccgccgcgcaagaagtaggccagacagacttgccattccgagcgtagcgaggaatctcgcccggctcgttcctccgcatacgcctagtcccttatcccagtgattcgtgatgtaagtcgcaccagccccggtaggggcggaagatagtagcccagggagatagccctggggaaaatggcccccgcccccttttgttccccctcccccgcccggcgggggagggggcagggggaaggggcggcactcgagacccaggggtcatgctatcgcgccgtgggctaaattctgccgcccctgccggggcttcagagtcgccatcgcgatacggtgcttcatcgcgggagagcctcacggcgcctagcggcgcagagggagattcctctcccgcaaggcgggatcggaacgacgcccacccggcgacggctcccttagccttaccttgccatgccgtcattgcacgagatcgccaatcgccaaaacgcgcaggccggcgaacttctgaaaagacgaaaaatccccgtctcgggtaaccaggggcactccgtggtcgaggcagctttgggcgatcagggtgtctgcgaccttgggccggacttggcggcgaaacattcttgctcggagcttccctgcacgctcccagtatcctggacttatttctaattgcgggatctgggtgaccaactcctccagggaaggcgcagggtcggggtcactcaggagttctgtgactgagatcggcgagacgcagagtatccgatcgctcagggcctgccgaaccaggtcaacgtcgcgaccaggttcaccacccagcagagccacaagagaactggtgtcggcacagatcattcttctcctctcatttcctgccaagtgaggctgaatttgactttcccctccaacgcgcgaagctggtcatagacatcgtgggctgccagaagctccagacccttgcgcaccgtgggagtcgcccccgccttggtcgccttctgggcccttcgcaggaggtctcgagggaccatgatagtaagctttttcatctgttcttttgccatgccttcataataccagcatgcatgccgtattgcaatacggcaaaccgactccgatttccattgcccggcacggcccgcgctagtcgagcggtacttcggcaagcacatcgtcccaatgggagagggtcaattcccagcggcgtttttctttcggcaaacaagtcgctaggttcttgattctacctgtggcaaaatctccttggggcagaccttgagtcccttcggcgctaagaatgcctatctgtcagcgcgggaccagcactacgggcacttggcctgtagcaatcggggaagggagtgagaagatgcgcactcatttgggctgttcggggcaggtggagttggggaccctcagcaaggaaacccagcagaagctcgagcatgttgatgcggcatggttggagtttgttcccgagtcggcgtcgctggaggttcgccatgttcaacctgacgaccgccccgcgcttccggagattgcgggagaactgattgagttcctcagcgaagtcacggatgacgaacgtgcccaggttcccggcggcgccctccattaccaggatgaaatcaaaggacagcatgttaggttcaaggtcggcaaagggggtttcttaacgattgcttgggcgcgacccgattatacgcatgcgagctgggaacaataccgcagccagcctg

SEQ ID NO: 973 - DNA, 103406 bp, Artificial Sequence
  Synthetic Oligonucleotide
  misc_feature (1)..(65434): n is a, c, g, or t
nnnnnnnnnnnnnnnnnnnnnnnnnnnnnnnnnnnnnnnnnnnnnnnnnnnnnnnnnnnnnnnnnnnnnnnnnnnnnnnnnnnnnnnnnnnnnnnnnnnnnnnnnnnnnnnnnnnnnnnnnnnnnnnnnnnnnnnnnnnnnnnnnnnnnnnnnnnnnnnnnnnnnnnnnnnnnnnnnnnnnnnnnnnnnnnnnnnnnnnnnnnnnnnnnnnnnnnnnnnnnnnnnnnnnnnnnnnnnnnnnnnnnnnnnnnnnnnnnnnnnnnnnnnnnnnnnnnnnnnnnnnnnnnnnnnnnnnnnnnnnnnnnnnnnnnnnnnnnnnnnnnnnnnnnnnnnnnnnnnnnnnnnnnnnnnnnnnnnnnnnnnnnnnnnnnnnnnnnnnnnnnnnnnnnnnnnnnnnnnnnnnnnnnnnnnnnnnnnnnnnnnnnnnnnnnnnnnnnnnnnnnnnnnnnnnnnnnnnnnnnnnnnnnnnnnnnnnnnnnnnnnnnnnnnnnnnnnnnnnnnnnnnnnnnnnnnnnnnnnnnnnnnnnnnnnnnnnnnnnnnnnnnnnnnnnnnnnnnnnnnnnnnnnnnnnnnnnnnnnnnnnnnnnnnnnnnnnnnnnnnnnnnnnnnnnnnnnnnnnnnnnnnnnnnnnnnnnnnnnnnnnnnnnnnnnnnnnnnnnnnnnnnnnnnnnnnnnnnnnnnnnnnnnnnnnnnnnnnnnnnnnnnnnnnnnnnnnnnnnnnnnnnnnnnnnnnnnnnnnnnnnnnnnnnnnnnnnnnnnnnnnnnnnnnnnnnnnnnnnnnnnnnnnnnnnnnnnnnnnnnnnnnnnnnnnnnnnnnnnnnnnnnnnnnnnnnnnnnnnnnnnnnnnnnnnnnnnnnnnnnnnnnnnnnnnnnnnnnnnnnnnnnnnnnnnnnnnnnnnnnnnnnnnnnnnnnnnnnnnnnnnnnnnnnnnnnnnnnnnnnnnnnnnnnnnnnnnnnnnnnnnnnnnnnnnnnnnnnnnnnnnnnnnnnnnnnnnnnnnnnnnnnnnnnnnnnnnnnnnnnnnnnnnnnnnnnnnnnnnnnnnnnnnnnnnnnnnnnnnnnnnnnnnnnnnnnnnnnnnnnnnnnnnnnnnnnnnnnnnnnnnnnnnnnnnnnnnnnnnnnnnnnnnnnnnnnnnnnnnnnnnnnnnnnnnnnnnnnnnnnnnnnnnnnnnnnnnnnnnnnnnnnnnnnnnnnnnnnnnnnnnnnnnnnnnnnnnnnnnnnnnnnnnnnnnnnnnnnnnnnnnnnnnnnnnnnnnnnnnnnnnnnnnnnnnnnnnnnnnnnnnnnnnnnnnnnnnnnnnnnnnnnnnnnnnnnnnnnnnnnnnnnnnnnnnnnnnnnnnnnnnnnnnnnnnnnnnnnnnnnnnnnnnnnnnnnnnnnnnnnnnnnnnnnnnnnnnnnnnnnnnnnnnnnnnnnnnnnnnnnnnnnnnnnnnnnnnnnnnnnnnnnnnnnnnnnnnnnnnnnnnnnnnnnnnnnnnnnnnnnnnnnnnnnnnnnnnnnnnnnnnnnnnnnnnnnnnnnnnnnnnnnnnnnnnnnnnnnnnnnnnnnnnnnnnnnnnnnnnnnnnnnnnnnnnnnnnnnnnnnnnnnnnnnnnnnnnnnnnnnnnnnnnnnnnnnnnnnnnnnnnnnnnnnnnnnnnnnnnnnnnnnnnnnnnnnnnnnnnnnnnnnnnnnnnnnnnnnnnnnnnnnnnnnnnnnnnnnnnnnnnnnnnnnnnnnnnnnnnnnnnnnnnnnnnnnnnnnnnnnnnnnnnnnnnnnnnnnnnnnnnnnnnnnnnnnnnnnnnnnnnnnnnnnnnnnnnnnnnnnnnnnnnnnnnnnnnnnnnnnnnnnnnnnnnnnnnnnnnnnnnnnnnnnnnnnnnnnnnnnnnnnnnnnnnnnnnnnnnnnnnnnnnnnnnnnnnnnnnnnnnnnnnnnnnnnnnnnnnnnnnnnnnnnnnnnnnnnnnnnnnnnnnnnnnnnnnnnnnnnnnnnnnnnnnnnnnnnnnnnnnnnnnnnnnnnnnnnnnnnnnnnnnnnnnnnnnnnnnnnnnnnnnnnnnnnnnnnnnnnnnnnnnnnnnnnnnnnnnnnnnnnnnnnnnnnnnnnnnnnnnnnnnnnnnnnnnnnnnnnnnnnnnnnnnnnnnnnnnnnnnnnnnnnnnnnnnnnnnnnnnnnnnnnnnnnnnnnnnnnnnnnnnnnnnnnnnnnnnnnnnnnnnnnnnnnnnnnnnnnnnnnnnnnnnnnnnnnnnnnnnnnnnnnnnnnnnnnnnnnnnnnnnnnnnnnnnnnnnnnnnnnnnnnnnnnnnnnnnnnnnnnnnnnnnnnnnnnnnnnnnnnnnnnnnnnnnnnnnnnnnnnnnnnnnnnnnnnnnnnnnnnnnnnnnnnnnnnnnnnnnnnnnnnnnnnnnnnnnnnnnnnnnnnnnnnnnnnnnnnnnnnnnnnnnnnnnnnnnnnnnnnnnnnnnnnnnnnnnnnnnnnnnnnnnnnnnnnnnnnnnnnnnnnnnnnnnnnnnnnnnnnnnnnnnnnnnnnnnnnnnnnnnnnnnnnnnnnnnnnnnnnnnnnnnnnnnnnnnnnnnnnnnnnnnnnnnnnnnnnnnnnnnnnnnnnnnnnnnnnnnnnnnnnnnnnnnnnnnnnnnnnnnnnnnnnnnnnnnnnnnnnnnnnnnnnnnnnnnnnnnnnnnnnnnnnnnnnnnnnnnnnnnnnnnnnnnnnnnnnnnnnnnnnnnnnnnnnnnnnnnnnnnnnnnnnnnnnnnnnnnnnnnnnnnnnnnnnnnnnnnnnnnnnnnnnnnnnnnnnnnnnnnnnnnnnnnnnnnnnnnnnnnnnnnnnnnnnnnnnnnnnnnnnnnnnnnnnnnnnnnnnnnnnnnnnnnnnnnnnnnnnnnnnnnnnnnnnnnnnnnnnnnnnnnnnnnnnnnnnnnnnnnnnnnnnnnnnnnnnnnnnnnnnnnnnnnnnnnnnnnnnnnnnnnnnnnnnnnnnnnnnnnnnnnnnnnnnnnnnnnnnnnnnnnnnnnnnnnnnnnnnnnnnnnnnnnnnnnnnnnnnnnnnnnnnnnnnnnnnnnnnnnnnnnnnnnnnnnnnnnnnnnnnnnnnnnnnnnnnnnnnnnnnnnnnnnnnnnnnnnnnnnnnnnnnnnnnnnnnnnnnnnnnnnnnnnnnnnnnnnnnnnnnnnnnnnnnnnnnnnnnnnnnnnnnnnnnnnnnnnnnnnnnnnnnnnnnnnnnnnnnnnnnnnnnnnnnnnnnnnnnnnnnnnnnnnnnnnnnnnnnnnnnnnnnnnnnnnnnnnnnnnnnnnnnnnnnnnnnnnnnnnnnnnnnnnnnnnnnnnnnnnnnnnnnnnnnnnnnnnnnnnnnnnnnnnnnnnnnnnnnnnnnnnnnnnnnnnnnnnnnnnnnnnnnnnnnnnnnnnnnnnnnnnnnnnnnnnnnnnnnnnnnnnnnnnnnnnnnnnnnnnnnnnnnnnnnnnnnnnnnnnnnnnnnnnnnnnnnnnnnnnnnnnnnnnnnnnnnnnnnnnnnnnnnnnnnnnnnnnnnnnnnnnnnnnnnnnnnnnnnnnnnnnnnnnnnnnnnnnnnnnnnnnnnnnnnnnnnnnnnnnnnnnnnnnnnnnnnnnnnnnnnnnnnnnnnnnnnnnnnnnnnnnnnnnnnnnnnnnnnnnnnnnnnnnnnnnnnnnnnnnnnnnnnnnnnnnnnnnnnnnnnnnnnnnnnnnnnnnnnnnnnnnnnnnnnnnnnnnnnnnnnnnnnnnnnnnnnnnnnnnnnnnnnnnnnnnnnnnnnnnnnnnnnnnnnnnnnnnnnnnnnnnnnnnnnnnnnnnnnnnnnnnnnnnnnnnnnnnnnnnnnnnnnnnnnnnnnnnnnnnnnnnnnnnnnnnnnnnnnnnnnnnnnnnnnnnnnnnnnnnnnnnnnnnnnnnnnnnnnnnnnnnnnnnnnnnnnnnnnnnnnnnnnnnnnnnnnnnnnnnnnnnnnnnnnnnnnnnnnnnnnnnnnnnnnnnnnnnnnnnnnnnnnnnnnnnnnnnnnnnnnnnnnnnnnnnnnnnnnnnnnnnnnnnnnnnnnnnnnnnnnnnnnnnnnnnnnnnnnnnnnnnnnnnnnnnnnnnnnnnnnnnnnnnnnnnnnnnnnnnnnnnnnnnnnnnnnnnnnnnnnnnnnnnnnnnnnnnnnnnnnnnnnnnnnnnnnnnnnnnnnnnnnnnnnnnnnnnnnnnnnnnnnnnnnnnnnnnnnnnnnnnnnnnnnnnnnnnnnnnnnnnnnnnnnnnnnnnnnnnnnnnnnnnnnnnnnnnnnnnnnnnnnnnnnnnnnnnnnnnnnnnnnnnnnnnnnnnnnnnnnnnnnnnnnnnnnnnnnnnnnnnnnnnnnnnnnnnnnnnnnnnnnnnnnnnnnnnnnnnnnnnnnnnnnnnnnnnnnnnnnnnnnnnnnnnnnnnnnnnnnnnnnnnnnnnnnnnnnnnnnnnnnnnnnnnnnnnnnnnnnnnnnnnnnnnnnnnnnnnnnnnnnnnnnnnnnnnnnnnnnnnnnnnnnnnnnnnnnnnnnnnnnnnnnnnnnnnnnnnnnnnnnnnnnnnnnnnnnnnnnnnnnnnnnnnnnnnnnnnnnnnnnnnnnnnnnnnnnnnnnnnnnnnnnnnnnnnnnnnnnnnnnnnnnnnnnnnnnnnnnnnnnnnnnnnnnnnnnnnnnnnnnnnnnnnnnnnnnnnnnnnnnnnnnnnnnnnnnnnnnnnnnnnnnnnnnnnnnnnnnnnnnnnnnnnnnnnnnnnnnnnnnnnnnnnnnnnnnnnnnnnnnnnnnnnnnnnnnnnnnnnnnnnnnnnnnnnnnnnnnnnnnnnnnnnnnnnnnnnnnnnnnnnnnnnnnnnnnnnnnnnnnnnnnnnnnnnnnnnnnnnnnnnnnnnnnnnnnnnnnnnnnnnnnnnnnnnnnnnnnnnnnnnnnnnnnnnnnnnnnnnnnnnnnnnnnnnnnnnnnnnnnnnnnnnnnnnnnnnnnnnnnnnnnnnnnnnnnnnnnnnnnnnnnnnnnnnnnnnnnnnnnnnnnnnnnnnnnnnnnnnnnnnnnnnnnnnnnnnnnnnnnnnnnnnnnnnnnnnnnnnnnnnnnnnnnnnnnnnnnnnnnnnnnnnnnnnnnnnnnnnnnnnnnnnnnnnnnnnnnnnnnnnnnnnnnnnnnnnnnnnnnnnnnnnnnnnnnnnnnnnnnnnnnnnnnnnnnnnnnnnnnnnnnnnnnnnnnnnnnnnnnnnnnnnnnnnnnnnnnnnnnnnnnnnnnnnnnnnnnnnnnnnnnnnnnnnnnnnnnnnnnnnnnnnnnnnnnnnnnnnnnnnnnnnnnnnnnnnnnnnnnnnnnnnnnnnnnnnnnnnnnnnnnnnnnnnnnnnnnnnnnnnnnnnnnnnnnnnnnnnnnnnnnnnnnnnnnnnnnnnnnnnnnnnnnnnnnnnnnnnnnnnnnnnnnnnnnnnnnnnnnnnnnnnnnnnnnnnnnnnnnnnnnnnnnnnnnnnnnnnnnnnnnnnnnnnnnnnnnnnnnnnnnnnnnnnnnnnnnnnnnnnnnnnnnnnnnnnnnnnnnnnnnnnnnnnnnnnnnnnnnnnnnnnnnnnnnnnnnnnnnnnnnnnnnnnnnnnnnnnnnnnnnnnnnnnnnnnnnnnnnnnnnnnnnnnnnnnnnnnnnnnnnnnnnnnnnnnnnnnnnnnnnnnnnnnnnnnnnnnnnnnnnnnnnnnnnnnnnnnnnnnnnnnnnnnnnnnnnnnnnnnnnnnnnnnnnnnnnnnnnnnnnnnnnnnnnnnnnnnnnnnnnnnnnnnnnnnnnnnnnnnnnnnnnnnnnnnnnnnnnnnnnnnnnnnnnnnnnnnnnnnnnnnnnnnnnnnnnnnnnnnnnnnnnnnnnnnnnnnnnnnnnnnnnnnnnnnnnnnnnnnnnnnnnnnnnnnnnnnnnnnnnnnnnnnnnnnnnnnnnnnnnnnnnnnnnnnnnnnnnnnnnnnnnnnnnnnnnnnnnnnnnnnnnnnnnnnnnnnnnnnnnnnnnnnnnnnnnnnnnnnnnnnnnnnnnnnnnnnnnnnnnnnnnnnnnnnnnnnnnnnnnnnnnnnnnnnnnnnnnnnnnnnnnnnnnnnnnnnnnnnnnnnnnnnnnnnnnnnnnnnnnnnnnnnnnnnnnnnnnnnnnnnnnnnnnnnnnnnnnnnnnnnnnnnnnnnnnnnnnnnnnnnnnnnnnnnnnnnnnnnnnnnnnnnnnnnnnnnnnnnnnnnnnnnnnnnnnnnnnnnnnnnnnnnnnnnnnnnnnnnnnnnnnnnnnnnnnnnnnnnnnnnnnnnnnnnnnnnnnnnnnnnnnnnnnnnnnnnnnnnnnnnnnnnnnnnnnnnnnnnnnnnnnnnnnnnnnnnnnnnnnnnnnnnnnnnnnnnnnnnnnnnnnnnnnnnnnnnnnnnnnnnnnnnnnnnnnnnnnnnnnnnnnnnnnnnnnnnnnnnnnnnnnnnnnnnnnnnnnnnnnnnnnnnnnnnnnnnnnnnnnnnnnnnnnnnnnnnnnnnnnnnnnnnnnnnnnnnnnnnnnnnnnnnnnnnnnnnnnnnnnnnnnnnnnnnnnnnnnnnnnnnnnnnnnnnnnnnnnnnnnnnnnnnnnnnnnnnnnnnnnnnnnnnnnnnnnnnnnnnnnnnnnnnnnnnnnnnnnnnnnnnnnnnnnnnnnnnnnnnnnnnnnnnnnnnnnnnnnnnnnnnnnnnnnnnnnnnnnnnnnnnnnnnnnnnnnnnnnnnnnnnnnnnnnnnnnnnnnnnnnnnnnnnnnnnnnnnnnnnnnnnnnnnnnnnnnnnnnnnnnnnnnnnnnnnnnnnnnnnnnnnnnnnnnnnnnnnnnnnnnnnnnnnnnnnnnnnnnnnnnnnnnnnnnnnnnnnnnnnnnnnnnnnnnnnnnnnnnnnnnnnnnnnnnnnnnnnnnnnnnnnnnnnnnnnnnnnnnnnnnnnnnnnnnnnnnnnnnnnnnnnnnnnnnnnnnnnnnnnnnnnnnnnnnnnnnnnnnnnnnnnnnnnnnnnnnnnnnnnnnnnnnnnnnnnnnnnnnnnnnnnnnnnnnnnnnnnnnnnnnnnnnnnnnnnnnnnnnnnnnnnnnnnnnnnnnnnnnnnnnnnnnnnnnnnnnnnnnnnnnnnnnnnnnnnnnnnnnnnnnnnnnnnnnnnnnnnnnnnnnnnnnnnnnnnnnnnnnnnnnnnnnnnnnnnnnnnnnnnnnnnnnnnnnnnnnnnnnnnnnnnnnnnnnnnnnnnnnnnnnnnnnnnnnnnnnnnnnnnnnnnnnnnnnnnnnnnnnnnnnnnnnnnnnnnnnnnnnnnnnnnnnnnnnnnnnnnnnnnnnnnnnnnnnnnnnnnnnnnnnnnnnnnnnnnnnnnnnnnnnnnnnnnnnnnnnnnnnnnnnnnnnnnnnnnnnnnnnnnnnnnnnnnnnnnnnnnnnnnnnnnnnnnnnnnnnnnnnnnnnnnnnnnnnnnnnnnnnnnnnnnnnnnnnnnnnnnnnnnnnnnnnnnnnnnnnnnnnnnnnnnnnnnnnnnnnnnnnnnnnnnnnnnnnnnnnnnnnnnnnnnnnnnnnnnnnnnnnnnnnnnnnnnnnnnnnnnnnnnnnnnnnnnnnnnnnnnnnnnnnnnnnnnnnnnnnnnnnnnnnnnnnnnnnnnnnnnnnnnnnnnnnnnnnnnnnnnnnnnnnnnnnnnnnnnnnnnnnnnnnnnnnnnnnnnnnnnnnnnnnnnnnnnnnnnnnnnnnnnnnnnnnnnnnnnnnnnnnnnnnnnnnnnnnnnnnnnnnnnnnnnnnnnnnnnnnnnnnnnnnnnnnnnnnnnnnnnnnnnnnnnnnnnnnnnnnnnnnnnnnnnnnnnnnnnnnnnnnnnnnnnnnnnnnnnnnnnnnnnnnnnnnnnnnnnnnnnnnnnnnnnnnnnnnnnnnnnnnnnnnnnnnnnnnnnnnnnnnnnnnnnnnnnnnnnnnnnnnnnnnnnnnnnnnnnnnnnnnnnnnnnnnnnnnnnnnnnnnnnnnnnnnnnnnnnnnnnnnnnnnnnnnnnnnnnnnnnnnnnnnnnnnnnnnnnnnnnnnnnnnnnnnnnnnnnnnnnnnnnnnnnnnnnnnnnnnnnnnnnnnnnnnnnnnnnnnnnnnnnnnnnnnnnnnnnnnnnnnnnnnnnnnnnnnnnnnnnnnnnnnnnnnnnnnnnnnnnnnnnnnnnnnnnnnnnnnnnnnnnnnnnnnnnnnnnnnnnnnnnnnnnnnnnnnnnnnnnnnnnnnnnnnnnnnnnnnnnnnnnnnnnnnnnnnnnnnnnnnnnnnnnnnnnnnnnnnnnnnnnnnnnnnnnnnnnnnnnnnnnnnnnnnnnnnnnnnnnnnnnnnnnnnnnnnnnnnnnnnnnnnnnnnnnnnnnnnnnnnnnnnnnnnnnnnnnnnnnnnnnnnnnnnnnnnnnnnnnnnnnnnnnnnnnnnnnnnnnnnnnnnnnnnnnnnnnnnnnnnnnnnnnnnnnnnnnnnnnnnnnnnnnnnnnnnnnnnnnnnnnnnnnnnnnnnnnnnnnnnnnnnnnnnnnnnnnnnnnnnnnnnnnnnnnnnnnnnnnnnnnnnnnnnnnnnnnnnnnnnnnnnnnnnnnnnnnnnnnnnnnnnnnnnnnnnnnnnnnnnnnnnnnnnnnnnnnnnnnnnnnnnnnnnnnnnnnnnnnnnnnnnnnnnnnnnnnnnnnnnnnnnnnnnnnnnnnnnnnnnnnnnnnnnnnnnnnnnnnnnnnnnnnnnnnnnnnnnnnnnnnnnnnnnnnnnnnnnnnnnnnnnnnnnnnnnnnnnnnnnnnnnnnnnnnnnnnnnnnnnnnnnnnnnnnnnnnnnnnnnnnnnnnnnnnnnnnnnnnnnnnnnnnnnnnnnnnnnnnnnnnnnnnnnnnnnnnnnnnnnnnnnnnnnnnnnnnnnnnnnnnnnnnnnnnnnnnnnnnnnnnnnnnnnnnnnnnnnnnnnnnnnnnnnnnnnnnnnnnnnnnnnnnnnnnnnnnnnnnnnnnnnnnnnnnnnnnnnnnnnnnnnnnnnnnnnnnnnnnnnnnnnnnnnnnnnnnnnnnnnnnnnnnnnnnnnnnnnnnnnnnnnnnnnnnnnnnnnnnnnnnnnnnnnnnnnnnnnnnnnnnnnnnnnnnnnnnnnnnnnnnnnnnnnnnnnnnnnnnnnnnnnnnnnnnnnnnnnnnnnnnnnnnnnnnnnnnnnnnnnnnnnnnnnnnnnnnnnnnnnnnnnnnnnnnnnnnnnnnnnnnnnnnnnnnnnnnnnnnnnnnnnnnnnnnnnnnnnnnnnnnnnnnnnnnnnnnnnnnnnnnnnnnnnnnnnnnnnnnnnnnnnnnnnnnnnnnnnnnnnnnnnnnnnnnnnnnnnnnnnnnnnnnnnnnnnnnnnnnnnnnnnnnnnnnnnnnnnnnnnnnnnnnnnnnnnnnnnnnnnnnnnnnnnnnnnnnnnnnnnnnnnnnnnnnnnnnnnnnnnnnnnnnnnnnnnnnnnnnnnnnnnnnnnnnnnnnnnnnnnnnnnnnnnnnnnnnnnnnnnnnnnnnnnnnnnnnnnnnnnnnnnnnnnnnnnnnnnnnnnnnnnnnnnnnnnnnnnnnnnnnnnnnnnnnnnnnnnnnnnnnnnnnnnnnnnnnnnnnnnnnnnnnnnnnnnnnnnnnnnnnnnnnnnnnnnnnnnnnnnnnnnnnnnnnnnnnnnnnnnnnnnnnnnnnnnnnnnnnnnnnnnnnnnnnnnnnnnnnnnnnnnnnnnnnnnnnnnnnnnnnnnnnnnnnnnnnnnnnnnnnnnnnnnnnnnnnnnnnnnnnnnnnnnnnnnnnnnnnnnnnnnnnnnnnnnnnnnnnnnnnnnnnnnnnnnnnnnnnnnnnnnnnnnnnnnnnnnnnnnnnnnnnnnnnnnnnnnnnnnnnnnnnnnnnnnnnnnnnnnnnnnnnnnnnnnnnnnnnnnnnnnnnnnnnnnnnnnnnnnnnnnnnnnnnnnnnnnnnnnnnnnnnnnnnnnnnnnnnnnnnnnnnnnnnnnnnnnnnnnnnnnnnnnnnnnnnnnnnnnnnnnnnnnnnnnnnnnnnnnnnnnnnnnnnnnnnnnnnnnnnnnnnnnnnnnnnnnnnnnnnnnnnnnnnnnnnnnnnnnnnnnnnnnnnnnnnnnnnnnnnnnnnnnnnnnnnnnnnnnnnnnnnnnnnnnnnnnnnnnnnnnnnnnnnnnnnnnnnnnnnnnnnnnnnnnnnnnnnnnnnnnnnnnnnnnnnnnnnnnnnnnnnnnnnnnnnnnnnnnnnnnnnnnnnnnnnnnnnnnnnnnnnnnnnnnnnnnnnnnnnnnnnnnnnnnnnnnnnnnnnnnnnnnnnnnnnnnnnnnnnnnnnnnnnnnnnnnnnnnnnnnnnnnnnnnnnnnnnnnnnnnnnnnnnnnnnnnnnnnnnnnnnnnnnnnnnnnnnnnnnnnnnnnnnnnnnnnnnnnnnnnnnnnnnnnnnnnnnnnnnnnnnnnnnnnnnnnnnnnnnnnnnnnnnnnnnnnnnnnnnnnnnnnnnnnnnnnnnnnnnnnnnnnnnnnnnnnnnnnnnnnnnnnnnnnnnnnnnnnnnnnnnnnnnnnnnnnnnnnnnnnnnnnnnnnnnnnnnnnnnnnnnnnnnnnnnnnnnnnnnnnnnnnnnnnnnnnnnnnnnnnnnnnnnnnnnnnnnnnnnnnnnnnnnnnnnnnnnnnnnnnnnnnnnnnnnnnnnnnnnnnnnnnnnnnnnnnnnnnnnnnnnnnnnnnnnnnnnnnnnnnnnnnnnnnnnnnnnnnnnnnnnnnnnnnnnnnnnnnnnnnnnnnnnnnnnnnnnnnnnnnnnnnnnnnnnnnnnnnnnnnnnnnnnnnnnnnnnnnnnnnnnnnnnnnnnnnnnnnnnnnnnnnnnnnnnnnnnnnnnnnnnnnnnnnnnnnnnnnnnnnnnnnnnnnnnnnnnnnnnnnnnnnnnnnnnnnnnnnnnnnnnnnnnnnnnnnnnnnnnnnnnnnnnnnnnnnnnnnnnnnnnnnnnnnnnnnnnnnnnnnnnnnnnnnnnnnnnnnnnnnnnnnnnnnnnnnnnnnnnnnnnnnnnnnnnnnnnnnnnnnnnnnnnnnnnnnnnnnnnnnnnnnnnnnnnnnnnnnnnnnnnnnnnnnnnnnnnnnnnnnnnnnnnnnnnnnnnnnnnnnnnnnnnnnnnnnnnnnnnnnnnnnnnnnnnnnnnnnnnnnnnnnnnnnnnnnnnnnnnnnnnnnnnnnnnnnnnnnnnnnnnnnnnnnnnnnnnnnnnnnnnnnnnnnnnnnnnnnnnnnnnnnnnnnnnnnnnnnnnnnnnnnnnnnnnnnnnnnnnnnnnnnnnnnnnnnnnnnnnnnnnnnnnnnnnnnnnnnnnnnnnnnnnnnnnnnnnnnnnnnnnnnnnnnnnnnnnnnnnnnnnnnnnnnnnnnnnnnnnnnnnnnnnnnnnnnnnnnnnnnnnnnnnnnnnnnnnnnnnnnnnnnnnnnnnnnnnnnnnnnnnnnnnnnnnnnnnnnnnnnnnnnnnnnnnnnnnnnnnnnnnnnnnnnnnnnnnnnnnnnnnnnnnnnnnnnnnnnnnnnnnnnnnnnnnnnnnnnnnnnnnnnnnnnnnnnnnnnnnnnnnnnnnnnnnnnnnnnnnnnnnnnnnnnnnnnnnnnnnnnnnnnnnnnnnnnnnnnnnnnnnnnnnnnnnnnnnnnnnnnnnnnnnnnnnnnnnnnnnnnnnnnnnnnnnnnnnnnnnnnnnnnnnnnnnnnnnnnnnnnnnnnnnnnnnnnnnnnnnnnnnnnnnnnnnnnnnnnnnnnnnnnnnnnnnnnnnnnnnnnnnnnnnnnnnnnnnnnnnnnnnnnnnnnnnnnnnnnnnnnnnnnnnnnnnnnnnnnnnnnnnnnnnnnnnnnnnnnnnnnnnnnnnnnnnnnnnnnnnnnnnnnnnnnnnnnnnnnnnnnnnnnnnnnnnnnnnnnnnnnnnnnnnnnnnnnnnnnnnnnnnnnnnnnnnnnnnnnnnnnnnnnnnnnnnnnnnnnnnnnnnnnnnnnnnnnnnnnnnnnnnnnnnnnnnnnnnnnnnnnnnnnnnnnnnnnnnnnnnnnnnnnnnnnnnnnnnnnnnnnnnnnnnnnnnnnnnnnnnnnnnnnnnnnnnnnnnnnnnnnnnnnnnnnnnnnnnnnnnnnnnnnnnnnnnnnnnnnnnnnnnnnnnnnnnnnnnnnnnnnnnnnnnnnnnnnnnnnnnnnnnnnnnnnnnnnnnnnnnnnnnnnnnnnnnnnnnnnnnnnnnnnnnnnnnnnnnnnnnnnnnnnnnnnnnnnnnnnnnnnnnnnnnnnnnnnnnnnnnnnnnnnnnnnnnnnnnnnnnnnnnnnnnnnnnnnnnnnnnnnnnnnnnnnnnnnnnnnnnnnnnnnnnnnnnnnnnnnnnnnnnnnnnnnnnnnnnnnnnnnnnnnnnnnnnnnnnnnnnnnnnnnnnnnnnnnnnnnnnnnnnnnnnnnnnnnnnnnnnnnnnnnnnnnnnnnnnnnnnnnnnnnnnnnnnnnnnnnnnnnnnnnnnnnnnnnnnnnnnnnnnnnnnnnnnnnnnnnnnnnnnnnnnnnnnnnnnnnnnnnnnnnnnnnnnnnnnnnnnnnnnnnnnnnnnnnnnnnnnnnnnnnnnnnnnnnnnnnnnnnnnnnnnnnnnnnnnnnnnnnnnnnnnnnnnnnnnnnnnnnnnnnnnnnnnnnnnnnnnnnnnnnnnnnnnnnnnnnnnnnnnnnnnnnnnnnnnnnnnnnnnnnnnnnnnnnnnnnnnnnnnnnnnnnnnnnnnnnnnnnnnnnnnnnnnnnnnnnnnnnnnnnnnnnnnnnnnnnnnnnnnnnnnnnnnnnnnnnnnnnnnnnnnnnnnnnnnnnnnnnnnnnnnnnnnnnnnnnnnnnnnnnnnnnnnnnnnnnnnnnnnnnnnnnnnnnnnnnnnnnnnnnnnnnnnnnnnnnnnnnnnnnnnnnnnnnnnnnnnnnnnnnnnnnnnnnnnnnnnnnnnnnnnnnnnnnnnnnnnnnnnnnnnnnnnnnnnnnnnnnnnnnnnnnnnnnnnnnnnnnnnnnnnnnnnnnnnnnnnnnnnnnnnnnnnnnnnnnnnnnnnnnnnnnnnnnnnnnnnnnnnnnnnnnnnnnnnnnnnnnnnnnnnnnnnnnnnnnnnnnnnnnnnnnnnnnnnnnnnnnnnnnnnnnnnnnnnnnnnnnnnnnnnnnnnnnnnnnnnnnnnnnnnnnnnnnnnnnnnnnnnnnnnnnnnnnnnnnnnnnnnnnnnnnnnnnnnnnnnnnnnnnnnnnnnnnnnnnnnnnnnnnnnnnnnnnnnnnnnnnnnnnnnnnnnnnnnnnnnnnnnnnnnnnnnnnnnnnnnnnnnnnnnnnnnnnnnnnnnnnnnnnnnnnnnnnnnnnnnnnnnnnnnnnnnnnnnnnnnnnnnnnnnnnnnnnnnnnnnnnnnnnnnnnnnnnnnnnnnnnnnnnnnnnnnnnnnnnnnnnnnnnnnnnnnnnnnnnnnnnnnnnnnnnnnnnnnnnnnnnnnnnnnnnnnnnnnnnnnnnnnnnnnnnnnnnnnnnnnnnnnnnnnnnnnnnnnnnnnnnnnnnnnnnnnnnnnnnnnnnnnnnnnnnnnnnnnnnnnnnnnnnnnnnnnnnnnnnnnnnnnnnnnnnnnnnnnnnnnnnnnnnnnnnnnnnnnnnnnnnnnnnnnnnnnnnnnnnnnnnnnnnnnnnnnnnnnnnnnnnnnnnnnnnnnnnnnnnnnnnnnnnnnnnnnnnnnnnnnnnnnnnnnnnnnnnnnnnnnnnnnnnnnnnnnnnnnnnnnnnnnnnnnnnnnnnnnnnnnnnnnnnnnnnnnnnnnnnnnnnnnnnnnnnnnnnnnnnnnnnnnnnnnnnnnnnnnnnnnnnnnnnnnnnnnnnnnnnnnnnnnnnnnnnnnnnnnnnnnnnnnnnnnnnnnnnnnnnnnnnnnnnnnnnnnnnnnnnnnnnnnnnnnnnnnnnnnnnnnnnnnnnnnnnnnnnnnnnnnnnnnnnnnnnnnnnnnnnnnnnnnnnnnnnnnnnnnnnnnnnnnnnnnnnnnnnnnnnnnnnnnnnnnnnnnnnnnnnnnnnnnnnnnnnnnnnnnnnnnnnnnnnnnnnnnnnnnnnnnnnnnnnnnnnnnnnnnnnnnnnnnnnnnnnnnnnnnnnnnnnnnnnnnnnnnnnnnnnnnnnnnnnnnnnnnnnnnnnnnnnnnnnnnnnnnnnnnnnnnnnnnnnnnnnnnnnnnnnnnnnnnnnnnnnnnnnnnnnnnnnnnnnnnnnnnnnnnnnnnnnnnnnnnnnnnnnnnnnnnnnnnnnnnnnnnnnnnnnnnnnnnnnnnnnnnnnnnnnnnnnnnnnnnnnnnnnnnnnnnnnnnnnnnnnnnnnnnnnnnnnnnnnnnnnnnnnnnnnnnnnnnnnnnnnnnnnnnnnnnnnnnnnnnnnnnnnnnnnnnnnnnnnnnnnnnnnnnnnnnnnnnnnnnnnnnnnnnnnnnnnnnnnnnnnnnnnnnnnnnnnnnnnnnnnnnnnnnnnnnnnnnnnnnnnnnnnnnnnnnnnnnnnnnnnnnnnnnnnnnnnnnnnnnnnnnnnnnnnnnnnnnnnnnnnnnnnnnnnnnnnnnnnnnnnnnnnnnnnnnnnnnnnnnnnnnnnnnnnnnnnnnnnnnnnnnnnnnnnnnnnnnnnnnnnnnnnnnnnnnnnnnnnnnnnnnnnnnnnnnnnnnnnnnnnnnnnnnnnnnnnnnnnnnnnnnnnnnnnnnnnnnnnnnnnnnnnnnnnnnnnnnnnnnnnnnnnnnnnnnnnnnnnnnnnnnnnnnnnnnnnnnnnnnnnnnnnnnnnnnnnnnnnnnnnnnnnnnnnnnnnnnnnnnnnnnnnnnnnnnnnnnnnnnnnnnnnnnnnnnnnnnnnnnnnnnnnnnnnnnnnnnnnnnnnnnnnnnnnnnnnnnnnnnnnnnnnnnnnnnnnnnnnnnnnnnnnnnnnnnnnnnnnnnnnnnnnnnnnnnnnnnnnnnnnnnnnnnnnnnnnnnnnnnnnnnnnnnnnnnnnnnnnnnnnnnnnnnnnnnnnnnnnnnnnnnnnnnnnnnnnnnnnnnnnnnnnnnnnnnnnnnnnnnnnnnnnnnnnnnnnnnnnnnnnnnnnnnnnnnnnnnnnnnnnnnnnnnnnnnnnnnnnnnnnnnnnnnnnnnnnnnnnnnnnnnnnnnnnnnnnnnnnnnnnnnnnnnnnnnnnnnnnnnnnnnnnnnnnnnnnnnnnnnnnnnnnnnnnnnnnnnnnnnnnnnnnnnnnnnnnnnnnnnnnnnnnnnnnnnnnnnnnnnnnnnnnnnnnnnnnnnnnnnnnnnnnnnnnnnnnnnnnnnnnnnnnnnnnnnnnnnnnnnnnnnnnnnnnnnnnnnnnnnnnnnnnnnnnnnnnnnnnnnnnnnnnnnnnnnnnnnnnnnnnnnnnnnnnnnnnnnnnnnnnnnnnnnnnnnnnnnnnnnnnnnnnnnnnnnnnnnnnnnnnnnnnnnnnnnnnnnnnnnnnnnnnnnnnnnnnnnnnnnnnnnnnnnnnnnnnnnnnnnnnnnnnnnnnnnnnnnnnnnnnnnnnnnnnnnnnnnnnnnnnnnnnnnnnnnnnnnnnnnnnnnnnnnnnnnnnnnnnnnnnnnnnnnnnnnnnnnnnnnnnnnnnnnnnnnnnnnnnnnnnnnnnnnnnnnnnnnnnnnnnnnnnnnnnnnnnnnnnnnnnnnnnnnnnnnnnnnnnnnnnnnnnnnnnnnnnnnnnnnnnnnnnnnnnnnnnnnnnnnnnnnnnnnnnnnnnnnnnnnnnnnnnnnnnnnnnnnnnnnnnnnnnnnnnnnnnnnnnnnnnnnnnnnnnnnnnnnnnnnnnnnnnnnnnnnnnnnnnnnnnnnnnnnnnnnnnnnnnnnnnnnnnnnnnnnnnnnnnnnnnnnnnnnnnnnnnnnnnnnnnnnnnnnnnnnnnnnnnnnnnnnnnnnnnnnnnnnnnnnnnnnnnnnnnnnnnnnnnnnnnnnnnnnnnnnnnnnnnnnnnnnnnnnnnnnnnnnnnnnnnnnnnnnnnnnnnnnnnnnnnnnnnnnnnnnnnnnnnnnnnnnnnnnnnnnnnnnnnnnnnnnnnnnnnnnnnnnnnnnnnnnnnnnnnnnnnnnnnnnnnnnnnnnnnnnnnnnnnnnnnnnnnnnnnnnnnnnnnnnnnnnnnnnnnnnnnnnnnnnnnnnnnnnnnnnnnnnnnnnnnnnnnnnnnnnnnnnnnnnnnnnnnnnnnnnnnnnnnnnnnnnnnnnnnnnnnnnnnnnnnnnnnnnnnnnnnnnnnnnnnnnnnnnnnnnnnnnnnnnnnnnnnnnnnnnnnnnnnnnnnnnnnnnnnnnnnnnnnnnnnnnnnnnnnnnnnnnnnnnnnnnnnnnnnnnnnnnnnnnnnnnnnnnnnnnnnnnnnnnnnnnnnnnnnnnnnnnnnnnnnnnnnnnnnnnnnnnnnnnnnnnnnnnnnnnnnnnnnnnnnnnnnnnnnnnnnnnnnnnnnnnnnnnnnnnnnnnnnnnnnnnnnnnnnnnnnnnnnnnnnnnnnnnnnnnnnnnnnnnnnnnnnnnnnnnnnnnnnnnnnnnnnnnnnnnnnnnnnnnnnnnnnnnnnnnnnnnnnnnnnnnnnnnnnnnnnnnnnnnnnnnnnnnnnnnnnnnnnnnnnnnnnnnnnnnnnnnnnnnnnnnnnnnnnnnnnnnnnnnnnnnnnnnnnnnnnnnnnnnnnnnnnnnnnnnnnnnnnnnnnnnnnnnnnnnnnnnnnnnnnnnnnnnnnnnnnnnnnnnnnnnnnnnnnnnnnnnnnnnnnnnnnnnnnnnnnnnnnnnnnnnnnnnnnnnnnnnnnnnnnnnnnnnnnnnnnnnnnnnnnnnnnnnnnnnnnnnnnnnnnnnnnnnnnnnnnnnnnnnnnnnnnnnnnnnnnnnnnnnnnnnnnnnnnnnnnnnnnnnnnnnnnnnnnnnnnnnnnnnnnnnnnnnnnnnnnnnnnnnnnnnnnnnnnnnnnnnnnnnnnnnnnnnnnnnnnnnnnnnnnnnnnnnnnnnnnnnnnnnnnnnnnnnnnnnnnnnnnnnnnnnnnnnnnnnnnnnnnnnnnnnnnnnnnnnnnnnnnnnnnnnnnnnnnnnnnnnnnnnnnnnnnnnnnnnnnnnnnnnnnnnnnnnnnnnnnnnnnnnnnnnnnnnnnnnnnnnnnnnnnnnnnnnnnnnnnnnnnnnnnnnnnnnnnnnnnnnnnnnnnnnnnnnnnnnnnnnnnnnnnnnnnnnnnnnnnnnnnnnnnnnnnnnnnnnnnnnnnnnnnnnnnnnnnnnnnnnnnnnnnnnnnnnnnnnnnnnnnnnnnnnnnnnnnnnnnnnnnnnnnnnnnnnnnnnnnnnnnnnnnnnnnnnnnnnnnnnnnnnnnnnnnnnnnnnnnnnnnnnnnnnnnnnnnnnnnnnnnnnnnnnnnnnnnnnnnnnnnnnnnnnnnnnnnnnnnnnnnnnnnnnnnnnnnnnnnnnnnnnnnnnnnnnnnnnnnnnnnnnnnnnnnnnnnnnnnnnnnnnnnnnnnnnnnnnnnnnnnnnnnnnnnnnnnnnnnnnnnnnnnnnnnnnnnnnnnnnnnnnnnnnnnnnnnnnnnnnnnnnnnnnnnnnnnnnnnnnnnnnnnnnnnnnnnnnnnnnnnnnnnnnnnnnnnnnnnnnnnnnnnnnnnnnnnnnnnnnnnnnnnnnnnnnnnnnnnnnnnnnnnnnnnnnnnnnnnnnnnnnnnnnnnnnnnnnnnnnnnnnnnnnnnnnnnnnnnnnnnnnnnnnnnnnnnnnnnnnnnnnnnnnnnnnnnnnnnnnnnnnnnnnnnnnnnnnnnnnnnnnnnnnnnnnnnnnnnnnnnnnnnnnnnnnnnnnnnnnnnnnnnnnnnnnnnnnnnnnnnnnnnnnnnnnnnnnnnnnnnnnnnnnnnnnnnnnnnnnnnnnnnnnnnnnnnnnnnnnnnnnnnnnnnnnnnnnnnnnnnnnnnnnnnnnnnnnnnnnnnnnnnnnnnnnnnnnnnnnnnnnnnnnnnnnnnnnnnnnnnnnnnnnnnnnnnnnnnnnnnnnnnnnnnnnnnnnnnnnnnnnnnnnnnnnnnnnnnnnnnnnnnnnnnnnnnnnnnnnnnnnnnnnnnnnnnnnnnnnnnnnnnnnnnnnnnnnnnnnnnnnnnnnnnnnnnnnnnnnnnnnnnnnnnnnnnnnnnnnnnnnnnnnnnnnnnnnnnnnnnnnnnnnnnnnnnnnnnnnnnnnnnnnnnnnnnnnnnnnnnnnnnnnnnnnnnnnnnnnnnnnnnnnnnnnnnnnnnnnnnnnnnnnnnnnnnnnnnnnnnnnnnnnnnnnnnnnnnnnnnnnnnnnnnnnnnnnnnnnnnnnnnnnnnnnnnnnnnnnnnnnnnnnnnnnnnnnnnnnnnnnnnnnnnnnnnnnnnnnnnnnnnnnnnnnnnnnnnnnnnnnnnnnnnnnnnnnnnnnnnnnnnnnnnnnnnnnnnnnnnnnnnnnnnnnnnnnnnnnnnnnnnnnnnnnnnnnnnnnnnnnnnnnnnnnnnnnnnnnnnnnnnnnnnnnnnnnnnnnnnnnnnnnnnnnnnnnnnnnnnnnnnnnnnnnnnnnnnnnnnnnnnnnnnnnnnnnnnnnnnnnnnnnnnnnnnnnnnnnnnnnnnnnnnnnnnnnnnnnnnnnnnnnnnnnnnnnnnnnnnnnnnnnnnnnnnnnnnnnnnnnnnnnnnnnnnnnnnnnnnnnnnnnnnnnnnnnnnnnnnnnnnnnnnnnnnnnnnnnnnnnnnnnnnnnnnnnnnnnnnnnnnnnnnnnnnnnnnnnnnnnnnnnnnnnnnnnnnnnnnnnnnnnnnnnnnnnnnnnnnnnnnnnnnnnnnnnnnnnnnnnnnnnnnnnnnnnnnnnnnnnnnnnnnnnnnnnnnnnnnnnnnnnnnnnnnnnnnnnnnnnnnnnnnnnnnnnnnnnnnnnnnnnnnnnnnnnnnnnnnnnnnnnnnnnnnnnnnnnnnnnnnnnnnnnnnnnnnnnnnnnnnnnnnnnnnnnnnnnnnnnnnnnnnnnnnnnnnnnnnnnnnnnnnnnnnnnnnnnnnnnnnnnnnnnnnnnnnnnnnnnnnnnnnnnnnnnnnnnnnnnnnnnnnnnnnnnnnnnnnnnnnnnnnnnnnnnnnnnnnnnnnnnnnnnnnnnnnnnnnnnnnnnnnnnnnnnnnnnnnnnnnnnnnnnnnnnnnnnnnnnnnnnnnnnnnnnnnnnnnnnnnnnnnnnnnnnnnnnnnnnnnnnnnnnnnnnnnnnnnnnnnnnnnnnnnnnnnnnnnnnnnnnnnnnnnnnnnnnnnnnnnnnnnnnnnnnnnnnnnnnnnnnnnnnnnnnnnnnnnnnnnnnnnnnnnnnnnnnnnnnnnnnnnnnnnnnnnnnnnnnnnnnnnnnnnnnnnnnnnnnnnnnnnnnnnnnnnnnnnnnnnnnnnnnnnnnnnnnnnnnnnnnnnnnnnnnnnnnnnnnnnnnnnnnnnnnnnnnnnnnnnnnnnnnnnnnnnnnnnnnnnnnnnnnnnnnnnnnnnnnnnnnnnnnnnnnnnnnnnnnnnnnnnnnnnnnnnnnnnnnnnnnnnnnnnnnnnnnnnnnnnnnnnnnnnnnnnnnnnnnnnnnnnnnnnnnnnnnnnnnnnnnnnnnnnnnnnnnnnnnnnnnnnnnnnnnnnnnnnnnnnnnnnnnnnnnnnnnnnnnnnnnnnnnnnnnnnnnnnnnnnnnnnnnnnnnnnnnnnnnnnnnnnnnnnnnnnnnnnnnnnnnnnnnnnnnnnnnnnnnnnnnnnnnnnnnnnnnnnnnnnnnnnnnnnnnnnnnnnnnnnnnnnnnnnnnnnnnnnnnnnnnnnnnnnnnnnnnnnnnnnnnnnnnnnnnnnnnnnnnnnnnnnnnnnnnnnnnnnnnnnnnnnnnnnnnnnnnnnnnnnnnnnnnnnnnnnnnnnnnnnnnnnnnnnnnnnnnnnnnnnnnnnnnnnnnnnnnnnnnnnnnnnnnnnnnnnnnnnnnnnnnnnnnnnnnnnnnnnnnnnnnnnnnnnnnnnnnnnnnnnnnnnnnnnnnnnnnnnnnnnnnnnnnnnnnnnnnnnnnnnnnnnnnnnnnnnnnnnnnnnnnnnnnnnnnnnnnnnnnnnnnnnnnnnnnnnnnnnnnnnnnnnnnnnnnnnnnnnnnnnnnnnnnnnnnnnnnnnnnnnnnnnnnnnnnnnnnnnnnnnnnnnnnnnnnnnnnnnnnnnnnnnnnnnnnnnnnnnnnnnnnnnnnnnnnnnnnnnnnnnnnnnnnnnnnnnnnnnnnnnnnnnnnnnnnnnnnnnnnnnnnnnnnnnnnnnnnnnnnnnnnnnnnnnnnnnnnnnnnnnnnnnnnnnnnnnnnnnnnnnnnnnnnnnnnnnnnnnnnnnnnnnnnnnnnnnnnnnnnnnnnnnnnnnnnnnnnnnnnnnnnnnnnnnnnnnnnnnnnnnnnnnnnnnnnnnnnnnnnnnnnnnnnnnnnnnnnnnnnnnnnnnnnnnnnnnnnnnnnnnnnnnnnnnnnnnnnnnnnnnnnnnnnnnnnnnnnnnnnnnnnnnnnnnnnnnnnnnnnnnnnnnnnnnnnnnnnnnnnnnnnnnnnnnnnnnnnnnnnnnnnnnnnnnnnnnnnnnnnnnnnnnnnnnnnnnnnnnnnnnnnnnnnnnnnnnnnnnnnnnnnnnnnnnnnnnnnnnnnnnnnnnnnnnnnnnnnnnnnnnnnnnnnnnnnnnnnnnnnnnnnnnnnnnnnnnnnnnnnnnnnnnnnnnnnnnnnnnnnnnnnnnnnnnnnnnnnnnnnnnnnnnnnnnnnnnnnnnnnnnnnnnnnnnnnnnnnnnnnnnnnnnnnnnnnnnnnnnnnnnnnnnnnnnnnnnnnnnnnnnnnnnnnnnnnnnnnnnnnnnnnnnnnnnnnnnnnnnnnnnnnnnnnnnnnnnnnnnnnnnnnnnnnnnnnnnnnnnnnnnnnnnnnnnnnnnnnnnnnnnnnnnnnnnnnnnnnnnnnnnnnnnnnnnnnnnnnnnnnnnnnnnnnnnnnnnnnnnnnnnnnnnnnnnnnnnnnnnnnnnnnnnnnnnnnnnnnnnnnnnnnnnnnnnnnnnnnnnnnnnnnnnnnnnnnnnnnnnnnnnnnnnnnnnnnnnnnnnnnnnnnnnnnnnnnnnnnnnnnnnnnnnnnnnnnnnnnnnnnnnnnnnnnnnnnnnnnnnnnnnnnnnnnnnnnnnnnnnnnnnnnnnnnnnnnnnnnnnnnnnnnnnnnnnnnnnnnnnnnnnnnnnnnnnnnnnnnnnnnnnnnnnnnnnnnnnnnnnnnnnnnnnnnnnnnnnnnnnnnnnnnnnnnnnnnnnnnnnnnnnnnnnnnnnnnnnnnnnnnnnnnnnnnnnnnnnnnnnnnnnnnnnnnnnnnnnnnnnnnnnnnnnnnnnnnnnnnnnnnnnnnnnnnnnnnnnnnnnnnnnnnnnnnnnnnnnnnnnnnnnnnnnnnnnnnnnnnnnnnnnnnnnnnnnnnnnnnnnnnnnnnnnnnnnnnnnnnnnnnnnnnnnnnnnnnnnnnnnnnnnnnnnnnnnnnnnnnnnnnnnnnnnnnnnnnnnnnnnnnnnnnnnnnnnnnnnnnnnnnnnnnnnnnnnnnnnnnnnnnnnnnnnnnnnnnnnnnnnnnnnnnnnnnnnnnnnnnnnnnnnnnnnnnnnnnnnnnnnnnnnnnnnnnnnnnnnnnnnnnnnnnnnnnnnnnnnnnnnnnnnnnnnnnnnnnnnnnnnnnnnnnnnnnnnnnnnnnnnnnnnnnnnnnnnnnnnnnnnnnnnnnnnnnnnnnnnnnnnnnnnnnnnnnnnnnnnnnnnnnnnnnnnnnnnnnnnnnnnnnnnnnnnnnnnnnnnnnnnnnnnnnnnnnnnnnnnnnnnnnnnnnnnnnnnnnnnnnnnnnnnnnnnnnnnnnnnnnnnnnnnnnnnnnnnnnnnnnnnnnnnnnnnnnnnnnnnnnnnnnnnnnnnnnnnnnnnnnnnnnnnnnnnnnnnnnnnnnnnnnnnnnnnnnnnnnnnnnnnnnnnnnnnnnnnnnnnnnnnnnnnnnnnnnnnnnnnnnnnnnnnnnnnnnnnnnnnnnnnnnnnnnnnnnnnnnnnnnnnnnnnnnnnnnnnnnnnnnnnnnnnnnnnnnnnnnnnnnnnnnnnnnnnnnnnnnnnnnnnnnnnnnnnnnnnnnnnnnnnnnnnnnnnnnnnnnnnnnnnnnnnnnnnnnnnnnnnnnnnnnnnnnnnnnnnnnnnnnnnnnnnnnnnnnnnnnnnnnnnnnnnnnnnnnnnnnnnnnnnnnnnnnnnnnnnnnnnnnnnnnnnnnnnnnnnnnnnnnnnnnnnnnnnnnnnnnnnnnnnnnnnnnnnnnnnnnnnnnnnnnnnnnnnnnnnnnnnnnnnnnnnnnnnnnnnnnnnnnnnnnnnnnnnnnnnnnnnnnnnnnnnnnnnnnnnnnnnnnnnnnnnnnnnnnnnnnnnnnnnnnnnnnnnnnnnnnnnnnnnnnnnnnnnnnnnnnnnnnnnnnnnnnnnnnnnnnnnnnnnnnnnnnnnnnnnnnnnnnnnnnnnnnnnnnnnnnnnnnnnnnnnnnnnnnnnnnnnnnnnnnnnnnnnnnnnnnnnnnnnnnnnnnnnnnnnnnnnnnnnnnnnnnnnnnnnnnnnnnnnnnnnnnnnnnnnnnnnnnnnnnnnnnnnnnnnnnnnnnnnnnnnnnnnnnnnnnnnnnnnnnnnnnnnnnnnnnnnnnnnnnnnnnnnnnnnnnnnnnnnnnnnnnnnnnnnnnnnnnnnnnnnnnnnnnnnnnnnnnnnnnnnnnnnnnnnnnnnnnnnnnnnnnnnnnnnnnnnnnnnnnnnnnnnnnnnnnnnnnnnnnnnnnnnnnnnnnnnnnnnnnnnnnnnnnnnnnnnnnnnnnnnnnnnnnnnnnnnnnnnnnnnnnnnnnnnnnnnnnnnnnnnnnnnnnnnnnnnnnnnnnnnnnnnnnnnnnnnnnnnnnnnnnnnnnnnnnnnnnnnnnnnnnnnnnnnnnnnnnnnnnnnnnnnnnnnnnnnnnnnnnnnnnnnnnnnnnnnnnnnnnnnnnnnnnnnnnnnnnnnnnnnnnnnnnnnnnnnnnnnnnnnnnnnnnnnnnnnnnnnnnnnnnnnnnnnnnnnnnnnnnnnnnnnnnnnnnnnnnnnnnnnnnnnnnnnnnnnnnnnnnnnnnnnnnnnnnnnnnnnnnnnnnnnnnnnnnnnnnnnnnnnnnnnnnnnnnnnnnnnnnnnnnnnnnnnnnnnnnnnnnnnnnnnnnnnnnnnnnnnnnnnnnnnnnnnnnnnnnnnnnnnnnnnnnnnnnnnnnnnnnnnnnnnnnnnnnnnnnnnnnnnnnnnnnnnnnnnnnnnnnnnnnnnnnnnnnnnnnnnnnnnnnnnnnnnnnnnnnnnnnnnnnnnnnnnnnnnnnnnnnnnnnnnnnnnnnnnnnnnnnnnnnnnnnnnnnnnnnnnnnnnnnnnnnnnnnnnnnnnnnnnnnnnnnnnnnnnnnnnnnnnnnnnnnnnnnnnnnnnnnnnnnnnnnnnnnnnnnnnnnnnnnnnnnnnnnnnnnnnnnnnnnnnnnnnnnnnnnnnnnnnnnnnnnnnnnnnnnnnnnnnnnnnnnnnnnnnnnnnnnnnnnnnnnnnnnnnnnnnnnnnnnnnnnnnnnnnnnnnnnnnnnnnnnnnnnnnnnnnnnnnnnnnnnnnnnnnnnnnnnnnnnnnnnnnnnnnnnnnnnnnnnnnnnnnnnnnnnnnnnnnnnnnnnnnnnnnnnnnnnnnnnnnnnnnnnnnnnnnnnnnnnnnnnnnnnnnnnnnnnnnnnnnnnnnnnnnnnnnnnnnnnnnnnnnnnnnnnnnnnnnnnnnnnnnnnnnnnnnnnnnnnnnnnnnnnnnnnnnnnnnnnnnnnnnnnnnnnnnnnnnnnnnnnnnnnnnnnnnnnnnnnnnnnnnnnnnnnnnnnnnnnnnnnnnnnnnnnnnnnnnnnnnnnnnnnnnnnnnnnnnnnnnnnnnnnnnnnnnnnnnnnnnnnnnnnnnnnnnnnnnnnnnnnnnnnnnnnnnnnnnnnnnnnnnnnnnnnnnnnnnnnnnnnnnnnnnnnnnnnnnnnnnnnnnnnnnnnnnnnnnnnnnnnnnnnnnnnnnnnnnnnnnnnnnnnnnnnnnnnnnnnnnnnnnnnnnnnnnnnnnnnnnnnnnnnnnnnnnnnnnnnnnnnnnnnnnnnnnnnnnnnnnnnnnnnnnnnnnnnnnnnnnnnnnnnnnnnnnnnnnnnnnnnnnnnnnnnnnnnnnnnnnnnnnnnnnnnnnnnnnnnnnnnnnnnnnnnnnnnnnnnnnnnnnnnnnnnnnnnnnnnnnnnnnnnnnnnnnnnnnnnnnnnnnnnnnnnnnnnnnnnnnnnnnnnnnnnnnnnnnnnnnnnnnnnnnnnnnnnnnnnnnnnnnnnnnnnnnnnnnnnnnnnnnnnnnnnnnnnnnnnnnnnnnnnnnnnnnnnnnnnnnnnnnnnnnnnnnnnnnnnnnnnnnnnnnnnnnnnnnnnnnnnnnnnnnnnnnnnnnnnnnnnnnnnnnnnnnnnnnnnnnnnnnnnnnnnnnnnnnnnnnnnnnnnnnnnnnnnnnnnnnnnnnnnnnnnnnnnnnnnnnnnnnnnnnnnnnnnnnnnnnnnnnnnnnnnnnnnnnnnnnnnnnnnnnnnnnnnnnnnnnnnnnnnnnnnnnnnnnnnnnnnnnnnnnnnnnnnnnnnnnnnnnnnnnnnnnnnnnnnnnnnnnnnnnnnnnnnnnnnnnnnnnnnnnnnnnnnnnnnnnnnnnnnnnnnnnnnnnnnnnnnnnnnnnnnnnnnnnnnnnnnnnnnnnnnnnnnnnnnnnnnnnnnnnnnnnnnnnnnnnnnnnnnnnnnnnnnnnnnnnnnnnnnnnnnnnnnnnnnnnnnnnnnnnnnnnnnnnnnnnnnnnnnnnnnnnnnnnnnnnnnnnnnnnnnnnnnnnnnnnnnnnnnnnnnnnnnnnnnnnnnnnnnnnnnnnnnnnnnnnnnnnnnnnnnnnnnnnnnnnnnnnnnnnnnnnnnnnnnnnnnnnnnnnnnnnnnnnnnnnnnnnnnnnnnnnnnnnnnnnnnnnnnnnnnnnnnnnnnnnnnnnnnnnnnnnnnnnnnnnnnnnnnnnnnnnnnnnnnnnnnnnnnnnnnnnnnnnnnnnnnnnnnnnnnnnnnnnnnnnnnnnnnnnnnnnnnnnnnnnnnnnnnnnnnnnnnnnnnnnnnnnnnnnnnnnnnnnnnnnnnnnnnnnnnnnnnnnnnnnnnnnnnnnnnnnnnnnnnnnnnnnnnnnnnnnnnnnnnnnnnnnnnnnnnnnnnnnnnnnnnnnnnnnnnnnnnnnnnnnnnnnnnnnnnnnnnnnnnnnnnnnnnnnnnnnnnnnnnnnnnnnnnnnnnnnnnnnnnnnnnnnnnnnnnnnnnnnnnnnnnnnnnnnnnnnnnnnnnnnnnnnnnnnnnnnnnnnnnnnnnnnnnnnnnnnnnnnnnnnnnnnnnnnnnnnnnnnnnnnnnnnnnnnnnnnnnnnnnnnnnnnnnnnnnnnnnnnnnnnnnnnnnnnnnnnnnnnnnnnnnnnnnnnnnnnnnnnnnnnnnnnnnnnnnnnnnnnnnnnnnnnnnnnnnnnnnnnnnnnnnnnnnnnnnnnnnnnnnnnnnnnnnnnnnnnnnnnnnnnnnnnnnnnnnnnnnnnnnnnnnnnnnnnnnnnnnnnnnnnnnnnnnnnnnnnnnnnnnnnnnnnnnnnnnnnnnnnnnnnnnnnnnnnnnnnnnnnnnnnnnnnnnnnnnnnnnnnnnnnnnnnnnnnnnnnnnnnnnnnnnnnnnnnnnnnnnnnnnnnnnnnnnnnnnnnnnnnnnnnnnnnnnnnnnnnnnnnnnnnnnnnnnnnnnnnnnnnnnnnnnnnnnnnnnnnnnnnnnnnnnnnnnnnnnnnnnnnnnnnnnnnnnnnnnnnnnnnnnnnnnnnnnnnnnnnnnnnnnnnnnnnnnnnnnnnnnnnnnnnnnnnnnnnnnnnnnnnnnnnnnnnnnnnnnnnnnnnnnnnnnnnnnnnnnnnnnnnnnnnnnnnnnnnnnnnnnnnnnnnnnnnnnnnnnnnnnnnnnnnnnnnnnnnnnnnnnnnnnnnnnnnnnnnnnnnnnnnnnnnnnnnnnnnnnnnnnnnnnnnnnnnnnnnnnnnnnnnnnnnnnnnnnnnnnnnnnnnnnnnnnnnnnnnnnnnnnnnnnnnnnnnnnnnnnnnnnnnnnnnnnnnnnnnnnnnnnnnnnnnnnnnnnnnnnnnnnnnnnnnnnnnnnnnnnnnnnnnnnnnnnnnnnnnnnnnnnnnnnnnnnnnnnnnnnnnnnnnnnnnnnnnnnnnnnnnnnnnnnnnnnnnnnnnnnnnnnnnnnnnnnnnnnnnnnnnnnnnnnnnnnnnnnnnnnnnnnnnnnnnnnnnnnnnnnnnnnnnnnnnnnnnnnnnnnnnnnnnnnnnnnnnnnnnnnnnnnnnnnnnnnnnnnnnnnnnnnnnnnnnnnnnnnnnnnnnnnnnnnnnnnnnnnnnnnnnnnnnnnnnnnnnnnnnnnnnnnnnnnnnnnnnnnnnnnnnnnnnnnnnnnnnnnnnnnnnnnnnnnnnnnnnnnnnnnnnnnnnnnnnnnnnnnnnnnnnnnnnnnnnnnnnnnnnnnnnnnnnnnnnnnnnnnnnnnnnnnnnnnnnnnnnnnnnnnnnnnnnnnnnnnnnnnnnnnnnnnnnnnnnnnnnnnnnnnnnnnnnnnnnnnnnnnnnnnnnnnnnnnnnnnnnnnnnnnnnnnnnnnnnnnnnnnnnnnnnnnnnnnnnnnnnnnnnnnnnnnnnnnnnnnnnnnnnnnnnnnnnnnnnnnnnnnnnnnnnnnnnnnnnnnnnnnnnnnnnnnnnnnnnnnnnnnnnnnnnnnnnnnnnnnnnnnnnnnnnnnnnnnnnnnnnnnnnnnnnnnnnnnnnnnnnnnnnnnnnnnnnnnnnnnnnnnnnnnnnnnnnnnnnnnnnnnnnnnnnnnnnnnnnnnnnnnnnnnnnnnnnnnnnnnnnnnnnnnnnnnnnnnnnnnnnnnnnnnnnnnnnnnnnnnnnnnnnnnnnnnnnnnnnnnnnnnnnnnnnnnnnnnnnnnnnnnnnnnnnnnnnnnnnnnnnnnnnnnnnnnnnnnnnnnnnnnnnnnnnnnnnnnnnnnnnnnnnnnnnnnnnnnnnnnnnnnnnnnnnnnnnnnnnnnnnnnnnnnnnnnnnnnnnnnnnnnnnnnnnnnnnnnnnnnnnnnnnnnnnnnnnnnnnnnnnnnnnnnnnnnnnnnnnnnnnnnnnnnnnnnnnnnnnnnnnnnnnnnnnnnnnnnnnnnnnnnnnnnnnnnnnnnnnnnnnnnnnnnnnnnnnnnnnnnnnnnnnnnnnnnnnnnnnnnnnnnnnnnnnnnnnnnnnnnnnnnnnnnnnnnnnnnnnnnnnnnnnnnnnnnnnnnnnnnnnnnnnnnnnnnnnnnnnnnnnnnnnnnnnnnnnnnnnnnnnnnnnnnnnnnnnnnnnnnnnnnnnnnnnnnnnnnnnnnnnnnnnnnnnnnnnnnnnnnnnnnnnnnnnnnnnnnnnnnnnnnnnnnnnnnnnnnnnnnnnnnnnnnnnnnnnnnnnnnnnnnnnnnnnnnnnnnnnnnnnnnnnnnnnnnnnnnnnnnnnnnnnnnnnnnnnnnnnnnnnnnnnnnnnnnnnnnnnnnnnnnnnnnnnnnnnnnnnnnnnnnnnnnnnnnnnnnnnnnnnnnnnnnnnnnnnnnnnnnnnnnnnnnnnnnnnnnnnnnnnnnnnnnnnnnnnnnnnnnnnnnnnnnnnnnnnnnnnnnnnnnnnnnnnnnnnnnnnnnnnnnnnnnnnnnnnnnnnnnnnnnnnnnnnnnnnnnnnnnnnnnnnnnnnnnnnnnnnnnnnnnnnnnnnnnnnnnnnnnnnnnnnnnnnnnnnnnnnnnnnnnnnnnnnnnnnnnnnnnnnnnnnnnnnnnnnnnnnnnnnnnnnnnnnnnnnnnnnnnnnnnnnnnnnnnnnnnnnnnnnnnnnnnnnnnnnnnnnnnnnnnnnnnnnnnnnnnnnnnnnnnnnnnnnnnnnnnnnnnnnnnnnnnnnnnnnnnnnnnnnnnnnnnnnnnnnnnnnnnnnnnnnnnnnnnnnnnnnnnnnnnnnnnnnnnnnnnnnnnnnnnnnnnnnnnnnnnnnnnnnnnnnnnnnnnnnnnnnnnnnnnnnnnnnnnnnnnnnnnnnnnnnnnnnnnnnnnnnnnnnnnnnnnnnnnnnnnnnnnnnnnnnnnnnnnnnnnnnnnnnnnnnnnnnnnnnnnnnnnnnnnnnnnnnnnnnnnnnnnnnnnnnnnnnnnnnnnnnnnnnnnnnnnnnnnnnnnnnnnnnnnnnnnnnnnnnnnnnnnnnnnnnnnnnnnnnnnnnnnnnnnnnnnnnnnnnnnnnnnnnnnnnnnnnnnnnnnnnnnnnnnnnnnnnnnnnnnnnnnnnnnnnnnnnnnnnnnnnnnnnnnnnnnnnnnnnnnnnnnnnnnnnnnnnnnnnnnnnnnnnnnnnnnnnnnnnnnnnnnnnnnnnnnnnnnnnnnnnnnnnnnnnnnnnnnnnnnnnnnnnnnnnnnnnnnnnnnnnnnnnnnnnnnnnnnnnnnnnnnnnnnnnnnnnnnnnnnnnnnnnnnnnnnnnnnnnnnnnnnnnnnnnnnnnnnnnnnnnnnnnnnnnnnnnnnnnnnnnnnnnnnnnnnnnnnnnnnnnnnnnnnnnnnnnnnnnnnnnnnnnnnnnnnnnnnnnnnnnnnnnnnnnnnnnnnnnnnnnnnnnnnnnnnnnnnnnnnnnnnnnnnnnnnnnnnnnnnnnnnnnnnnnnnnnnnnnnnnnnnnnnnnnnnnnnnnnnnnnnnnnnnnnnnnnnnnnnnnnnnnnnnnnnnnnnnnnnnnnnnnnnnnnnnnnnnnnnnnnnnnnnnnnnnnnnnnnnnnnnnnnnnnnnnnnnnnnnnnnnnnnnnnnnnnnnnnnnnnnnnnnnnnnnnnnnnnnnnnnnnnnnnnnnnnnnnnnnnnnnnnnnnnnnnnnnnnnnnnnnnnnnnnnnnnnnnnnnnnnnnnnnnnnnnnnnnnnnnnnnnnnnnnnnnnnnnnnnnnnnnnnnnnnnnnnnnnnnnnnnnnnnnnnnnnnnnnnnnnnnnnnnnnnnnnnnnnnnnnnnnnnnnnnnnnnnnnnnnnnnnnnnnnnnnnnnnnnnnnnnnnnnnnnnnnnnnnnnnnnnnnnnnnnnnnnnnnnnnnnnnnnnnnnnnnnnnnnnnnnnnnnnnnnnnnnnnnnnnnnnnnnnnnnnnnnnnnnnnnnnnnnnnnnnnnnnnnnnnnnnnnnnnnnnnnnnnnnnnnnnnnnnnnnnnnnnnnnnnnnnnnnnnnnnnnnnnnnnnnnnnnnnnnnnnnnnnnnnnnnnnnnnnnnnnnnnnnnnnnnnnnnnnnnnnnnnnnnnnnnnnnnnnnnnnnnnnnnnnnnnnnnnnnnnnnnnnnnnnnnnnnnnnnnnnnnnnnnnnnnnnnnnnnnnnnnnnnnnnnnnnnnnnnnnnnnnnnnnnnnnnnnnnnnnnnnnnnnnnnnnnnnnnnnnnnnnnnnnnnnnnnnnnnnnnnnnnnnnnnnnnnnnnnnnnnnnnnnnnnnnnnnnnnnnnnnnnnnnnnnnnnnnnnnnnnnnnnnnnnnnnnnnnnnnnnnnnnnnnnnnnnnnnnnnnnnnnnnnnnnnnnnnnnnnnnnnnnnnnnnnnnnnnnnnnnnnnnnnnnnnnnnnnnnnnnnnnnnnnnnnnnnnnnnnnnnnnnnnnnnnnnnnnnnnnnnnnnnnnnnnnnnnnnnnnnnnnnnnnnnnnnnnnnnnnnnnnnnnnnnnnnnnnnnnnnnnnnnnnnnnnnnnnnnnnnnnnnnnnnnnnnnnnnnnnnnnnnnnnnnnnnnnnnnnnnnnnnnnnnnnnnnnnnnnnnnnnnnnnnnnnnnnnnnnnnnnnnnnnnnnnnnnnnnnnnnnnnnnnnnnnnnnnnnnnnnnnnnnnnnnnnnnnnnnnnnnnnnnnnnnnnnnnnnnnnnnnnnnnnnnnnnnnnnnnnnnnnnnnnnnnnnnnnnnnnnnnnnnnnnnnnnnnnnnnnnnnnnnnnnnnnnnnnnnnnnnnnnnnnnnnnnnnnnnnnnnnnnnnnnnnnnnnnnnnnnnnnnnnnnnnnnnnnnnnnnnnnnnnnnnnnnnnnnnnnnnnnnnnnnnnnnnnnnnnnnnnnnnnnnnnnnnnnnnnnnnnnnnnnnnnnnnnnnnnnnnnnnnnnnnnnnnnnnnnnnnnnnnnnnnnnnnnnnnnnnnnnnnnnnnnnnnnnnnnnnnnnnnnnnnnnnnnnnnnnnnnnnnnnnnnnnnnnnnnnnnnnnnnnnnnnnnnnnnnnnnnnnnnnnnnnnnnnnnnnnnnnnnnnnnnnnnnnnnnnnnnnnnnnnnnnnnnnnnnnnnnnnnnnnnnnnnnnnnnnnnnnnnnnnnnnnnnnnnnnnnnnnnnnnnnnnnnnnnnnnnnnnnnnnnnnnnnnnnnnnnnnnnnnnnnnnnnnnnnnnnnnnnnnnnnnnnnnnnnnnnnnnnnnnnnnnnnnnnnnnnnnnnnnnnnnnnnnnnnnnnnnnnnnnnnnnnnnnnnnnnnnnnnnnnnnnnnnnnnnnnnnnnnnnnnnnnnnnnnnnnnnnnnnnnnnnnnnnnnnnnnnnnnnnnnnnnnnnnnnnnnnnnnnnnnnnnnnnnnnnnnnnnnnnnnnnnnnnnnnnnnnnnnnnnnnnnnnnnnnnnnnnnnnnnnnnnnnnnnnnnnnnnnnnnnnnnnnnnnnnnnnnnnnnnnnnnnnnnnnnnnnnnnnnnnnnnnnnnnnnnnnnnnnnnnnnnnnnnnnnnnnnnnnnnnnnnnnnnnnnnnnnnnnnnnnnnnnnnnnnnnnnnnnnnnnnnnnnnnnnnnnnnnnnnnnnnnnnnnnnnnnnnnnnnnnnnnnnnnnnnnnnnnnnnnnnnnnnnnnnnnnnnnnnnnnnnnnnnnnnnnnnnnnnnnnnnnnnnnnnnnnnnnnnnnnnnnnnnnnnnnnnnnnnnnnnnnnnnnnnnnnnnnnnnnnnnnnnnnnnnnnnnnnnnnnnnnnnnnnnnnnnnnnnnnnnnnnnnnnnnnnnnnnnnnnnnnnnnnnnnnnnnnnnnnnnnnnnnnnnnnnnnnnnnnnnnnnnnnnnnnnnnnnnnnnnnnnnnnnnnnnnnnnnnnnnnnnnnnnnnnnnnnnnnnnnnnnnnnnnnnnnnnnnnnnnnnnnnnnnnnnnnnnnnnnnnnnnnnnnnnnnnnnnnnnnnnnnnnnnnnnnnnnnnnnnnnnnnnnnnnnnnnnnnnnnnnnnnnnnnnnnnnnnnnnnnnnnnnnnnnnnnnnnnnnnnnnnnnnnnnnnnnnnnnnnnnnnnnnnnnnnnnnnnnnnnnnnnnnnnnnnnnnnnnnnnnnnnnnnnnnnnnnnnnnnnnnnnnnnnnnnnnnnnnnnnnnnnnnnnnnnnnnnnnnnnnnnnnnnnnnnnnnnnnnnnnnnnnnnnnnnnnnnnnnnnnnnnnnnnnnnnnnnnnnnnnnnnnnnnnnnnnnnnnnnnnnnnnnnnnnnnnnnnnnnnnnnnnnnnnnnnnnnnnnnnnnnnnnnnnnnnnnnnnnnnnnnnnnnnnnnnnnnnnnnnnnnnnnnnnnnnnnnnnnnnnnnnnnnnnnnnnnnnnnnnnnnnnnnnnnnnnnnnnnnnnnnnnnnnnnnnnnnnnnnnnnnnnnnnnnnnnnnnnnnnnnnnnnnnnnnnnnnnnnnnnnnnnnnnnnnnnnnnnnnnnnnnnnnnnnnnnnnnnnnnnnnnnnnnnnnnnnnnnnnnnnnnnnnnnnnnnnnnnnnnnnnnnnnnnnnnnnnnnnnnnnnnnnnnnnnnnnnnnnnnnnnnnnnnnnnnnnnnnnnnnnnnnnnnnnnnnnnnnnnnnnnnnnnnnnnnnnnnnnnnnnnnnnnnnnnnnnnnnnnnnnnnnnnnnnnnnnnnnnnnnnnnnnnnnnnnnnnnnnnnnnnnnnnnnnnnnnnnnnnnnnnnnnnnnnnnnnnnnnnnnnnnnnnnnnnnnnnnnnnnnnnnnnnnnnnnnnnnnnnnnnnnnnnnnnnnnnnnnnnnnnnnnnnnnnnnnnnnnnnnnnnnnnnnnnnnnnnnnnnnnnnnnnnnnnnnnnnnnnnnnnnnnnnnnnnnnnnnnnnnnnnnnnnnnnnnnnnnnnnnnnnnnnnnnnnnnnnnnnnnnnnnnnnnnnnnnnnnnnnnnnnnnnnnnnnnnnnnnnnnnnnnnnnnnnnnnnnnnnnnnnnnnnnnnnnnnnnnnnnnnnnnnnnnnnnnnnnnnnnnnnnnnnnnnnnnnnnnnnnnnnnnnnnnnnnnnnnnnnnnnnnnnnnnnnnnnnnnnnnnnnnnnnnnnnnnnnnnnnnnnnnnnnnnnnnnnnnnnnnnnnnnnnnnnnnnnnnnnnnnnnnnnnnnnnnnnnnnnnnnnnnnnnnnnnnnnnnnnnnnnnnnnnnnnnnnnnnnnnnnnnnnnnnnnnnnnnnnnnnnnnnnnnnnnnnnnnnnnnnnnnnnnnnnnnnnnnnnnnnnnnnnnnnnnnnnnnnnnnnnnnnnnnnnnnnnnnnnnnnnnnnnnnnnnnnnnnnnnnnnnnnnnnnnnnnnnnnnnnnnnnnnnnnnnnnnnnnnnnnnnnnnnnnnnnnnnnnnnnnnnnnnnnnnnnnnnnnnnnnnnnnnnnnnnnnnnnnnnnnnnnnnnnnnnnnnnnnnnnnnnnnnnnnnnnnnnnnnnnnnnnnnnnnnnnnnnnnnnnnnnnnnnnnnnnnnnnnnnnnnnnnnnnnnnnnnnnnnnnnnnnnnnnnnnnnnnnnnnnnnnnnnnnnnnnnnnnnnnnnnnnnnnnnnnnnnnnnnnnnnnnnnnnnnnnnnnnnnnnnnnnnnnnnnnnnnnnnnnnnnnnnnnnnnnnnnnnnnnnnnnnnnnnnnnnnnnnnnnnnnnnnnnnnnnnnnnnnnnnnnnnnnnnnnnnnnnnnnnnnnnnnnnnnnnnnnnnnnnnnnnnnnnnnnnnnnnnnnnnnnnnnnnnnnnnnnnnnnnnnnnnnnnnnnnnnnnnnnnnnnnnnnnnnnnnnnnnnnnnnnnnnnnnnnnnnnnnnnnnnnnnnnnnnnnnnnnnnnnnnnnnnnnnnnnnnnnnnnnnnnnnnnnnnnnnnnnnnnnnnnnnnnnnnnnnnnnnnnnnnnnnnnnnnnnnnnnnnnnnnnnnnnnnnnnnnnnnnnnnnnnnnnnnnnnnnnnnnnnnnnnnnnnnnnnnnnnnnnnnnnnnnnnnnnnnnnnnnnnnnnnnnnnnnnnnnnnnnnnnnnnnnnnnnnnnnnnnnnnnnnnnnnnnnnnnnnnnnnnnnnnnnnnnnnnnnnnnnnnnnnnnnnnnnnnnnnnnnnnnnnnnnnnnnnnnnnnnnnnnnnnnnnnnnnnnnnnnnnnnnnnnnnnnnnnnnnnnnnnnnnnnnnnnnnnnnnnnnnnnnnnnnnnnnnnnnnnnnnnnnnnnnnnnnnnnnnnnnnnnnnnnnnnnnnnnnnnnnnnnnnnnnnnnnnnnnnnnnnnnnnnnnnnnnnnnnnnnnnnnnnnnnnnnnnnnnnnnnnnnnnnnnnnnnnnnnnnnnnnnnnnnnnnnnnnnnnnnnnnnnnnnnnnnnnnnnnnnnnnnnnnnnnnnnnnnnnnnnnnnnnnnnnnnnnnnnnnnnnnnnnnnnnnnnnnnnnnnnnnnnnnnnnnnnnnnnnnnnnnnnnnnnnnnnnnnnnnnnnnnnnnnnnnnnnnnnnnnnnnnnnnnnnnnnnnnnnnnnnnnnnnnnnnnnnnnnnnnnnnnnnnnnnnnnnnnnnnnnnnnnnnnnnnnnnnnnnnnnnnnnnnnnnnnnnnnnnnnnnnnnnnnnnnnnnnnnnnnnnnnnnnnnnnnnnnnnnnnnnnnnnnnnnnnnnnnnnnnnnnnnnnnnnnnnnnnnnnnnnnnnnnnnnnnnnnnnnnnnnnnnnnnnnnnnnnnnnnnnnnnnnnnnnnnnnnnnnnnnnnnnnnnnnnnnnnnnnnnnnnnnnnnnnnnnnnnnnnnnnnnnnnnnnnnnnnnnnnnnnnnnnnnnnnnnnnnnnnnnnnnnnnnnnnnnnnnnnnnnnnnnnnnnnnnnnnnnnnnnnnnnnnnnnnnnnnnnnnnnnnnnnnnnnnnnnnnnnnnnnnnnnnnnnnnnnnnnnnnnnnnnnnnnnnnnnnnnnnnnnnnnnnnnnnnnnnnnnnnnnnnnnnnnnnnnnnnnnnnnnnnnnnnnnnnnnnnnnnnnnnnnnnnnnnnnnnnnnnnnnnnnnnnnnnnnnnnnnnnnnnnnnnnnnnnnnnnnnnnnnnnnnnnnnnnnnnnnnnnnnnnnnnnnnnnnnnnnnnnnnnnnnnnnnnnnnnnnnnnnnnnnnnnnnnnnnnnnnnnnnnnnnnnnnnnnnnnnnnnnnnnnnnnnnnnnnnnnnnnnnnnnnnnnnnnnnnnnnnnnnnnnnnnnnnnnnnnnnnnnnnnnnnnnnnnnnnnnnnnnnnnnnnnnnnnnnnnnnnnnnnnnnnnnnnnnnnnnnnnnnnnnnnnnnnnnnnnnnnnnnnnnnnnnnnnnnnnnnnnnnnnnnnnnnnnnnnnnnnnnnnnnnnnnnnnnnnnnnnnnnnnnnnnnnnnnnnnnnnnnnnnnnnnnnnnnnnnnnnnnnnnnnnnnnnnnnnnnnnnnnnnnnnnnnnnnnnnnnnnnnnnnnnnnnnnnnnnnnnnnnnnnnnnnnnnnnnnnnnnnnnnnnnnnnnnnnnnnnnnnnnnnnnnnnnnnnnnnnnnnnnnnnnnnnnnnnnnnnnnnnnnnnnnnnnnnnnnnnnnnnnnnnnnnnnnnnnnnnnnnnnnnnnnnnnnnnnnnnnnnnnnnnnnnnnnnnnnnnnnnnnnnnnnnnnnnnnnnnnnnnnnnnnnnnnnnnnnnnnnnnnnnnnnnnnnnnnnnnnnnnnnnnnnnnnnnnnnnnnnnnnnnnnnnnnnnnnnnnnnnnnnnnnnnnnnnnnnnnnnnnnnnnnnnnnnnnnnnnnnnnnnnnnnnnnnnnnnnnnnnnnnnnnnnnnnnnnnnnnnnnnnnnnnnnnnnnnnnnnnnnnnnnnnnnnnnnnnnnnnnnnnnnnnnnnnnnnnnnnnnnnnnnnnnnnnnnnnnnnnnnnnnnnnnnnnnnnnnnnnnnnnnnnnnnnnnnnnnnnnnnnnnnnnnnnnnnnnnnnnnnnnnnnnnnnnnnnnnnnnnnnnnnnnnnnnnnnnnnnnnnnnnnnnnnnnnnnnnnnnnnnnnnnnnnnnnnnnnnnnnnnnnnnnnnnnnnnnnnnnnnnnnnnnnnnnnnnnnnnnnnnnnnnnnnnnnnnnnnnnnnnnnnnnnnnnnnnnnnnnnnnnnnnnnnnnnnnnnnnnnnnnnnnnnnnnnnnnnnnnnnnnnnnnnnnnnnnnnnnnnnnnnnnnnnnnnnnnnnnnnnnnnnnnnnnnnnnnnnnnnnnnnnnnnnnnnnnnnnnnnnnnnnnnnnnnnnnnnnnnnnnnnnnnnnnnnnnnnnnnnnnnnnnnnnnnnnnnnnnnnnnnnnnnnnnnnnnnnnnnnnnnnnnnnnnnnnnnnnnnnnnnnnnnnnnnnnnnnnnnnnnnnnnnnnnnnnnnnnnnnnnnnnnnnnnnnnnnnnnnnnnnnnnnnnnnnnnnnnnnnnnnnnnnnnnnnnnnnnnnnnnnnnnnnnnnnnnnnnnnnnnnnnnnnnnnnnnnnnnnnnnnnnnnnnnnnnnnnnnnnnnnnnnnnnnnnnnnnnnnnnnnnnnnnnnnnnnnnnnnnnnnnnnnnnnnnnnnnnnnnnnnnnnnnnnnnnnnnnnnnnnnnnnnnnnnnnnnnnnnnnnnnnnnnnnnnnnnnnnnnnnnnnnnnnnnnnnnnnnnnnnnnnnnnnnnnnnnnnnnnnnnnnnnnnnnnnnnnnnnnnnnnnnnnnnnnnnnnnnnnnnnnnnnnnnnnnnnnnnnnnnnnnnnnnnnnnnnnnnnnnnnnnnnnnnnnnnnnnnnnnnnnnnnnnnnnnnnnnnnnnnnnnnnnnnnnnnnnnnnnnnnnnnnnnnnnnnnnnnnnnnnnnnnnnnnnnnnnnnnnnnnnnnnnnnnnnnnnnnnnnnnnnnnnnnnnnnnnnnnnnnnnnnnnnnnnnnnnnnnnnnnnnnnnnnnnnnnnnnnnnnnnnnnnnnnnnnnnnnnnnnnnnnnnnnnnnnnnnnnnnnnnnnnnnnnnnnnnnnnnnnnnnnnnnnnnnnnnnnnnnnnnnnnnnnnnnnnnnnnnnnnnnnnnnnnnnnnnnnnnnnnnnnnnnnnnnnnnnnnnnnnnnnnnnnnnnnnnnnnnnnnnnnnnnnnnnnnnnnnnnnnnnnnnnnnnnnnnnnnnnnnnnnnnnnnnnnnnnnnnnnnnnnnnnnnnnnnnnnnnnnnnnnnnnnnnnnnnnnnnnnnnnnnnnnnnnnnnnnnnnnnnnnnnnnnnnnnnnnnnnnnnnnnnnnnnnnnnnnnnnnnnnnnnnnnnnnnnnnnnnnnnnnnnnnnnnnnnnnnnnnnnnnnnnnnnnnnnnnnnnnnnnnnnnnnnnnnnnnnnnnnnnnnnnnnnnnnnnnnnnnnnnnnnnnnnnnnnnnnnnnnnnnnnnnnnnnnnnnnnnnnnnnnnnnnnnnnnnnnnnnnnnnnnnnnnnnnnnnnnnnnnnnnnnnnnnnnnnnnnnnnnnnnnnnnnnnnnnnnnnnnnnnnnnnnnnnnnnnnnnnnnnnnnnnnnnnnnnnnnnnnnnnnnnnnnnnnnnnnnnnnnnnnnnnnnnnnnnnnnnnnnnnnnnnnnnnnnnnnnnnnnnnnnnnnnnnnnnnnnnnnnnnnnnnnnnnnnnnnnnnnnnnnnnnnnnnnnnnnnnnnnnnnnnnnnnnnnnnnnnnnnnnnnnnnnnnnnnnnnnnnnnnnnnnnnnnnnnnnnnnnnnnnnnnnnnnnnnnnnnnnnnnnnnnnnnnnnnnnnnnnnnnnnnnnnnnnnnnnnnnnnnnnnnnnnnnnnnnnnnnnnnnnnnnnnnnnnnnnnnnnnnnnnnnnnnnnnnnnnnnnnnnnnnnnnnnnnnnnnnnnnnnnnnnnnnnnnnnnnnnnnnnnnnnnnnnnnnnnnnnnnnnnnnnnnnnnnnnnnnnnnnnnnnnnnnnnnnnnnnnnnnnnnnnnnnnnnnnnnnnnnnnnnnnnnnnnnnnnnnnnnnnnnnnnnnnnnnnnnnnnnnnnnnnnnnnnnnnnnnnnnnnnnnnnnnnnnnnnnnnnnnnnnnnnnnnnnnnnnnnnnnnnnnnnnnnnnnnnnnnnnnnnnnnnnnnnnnnnnnnnnnnnnnnnnnnnnnnnnnnnnnnnnnnnnnnnnnnnnnnnnnnnnnnnnnnnnnnnnnnnnnnnnnnnnnnnnnnnnnnnnnnnnnnnnnnnnnnnnnnnnnnnnnnnnnnnnnnnnnnnnnnnnnnnnnnnnnnnnnnnnnnnnnnnnnnnnnnnnnnnnnnnnnnnnnnnnnnnnnnnnnnnnnnnnnnnnnnnnnnnnnnnnnnnnnnnnnnnnnnnnnnnnnnnnnnnnnnnnnnnnnnnnnnnnnnnnnnnnnnnnnnnnnnnnnnnnnnnnnnnnnnnnnnnnnnnnnnnnnnnnnnnnnnnnnnnnnnnnnnnnnnnnnnnnnnnnnnnnnnnnnnnnnnnnnnnnnnnnnnnnnnnnnnnnnnnnnnnnnnnnnnnnnnnnnnnnnnnnnnnnnnnnnnnnnnnnnnnnnnnnnnnnnnnnnnnnnnnnnnnnnnnnnnnnnnnnnnnnnnnnnnnnnnnnnnnnnnnnnnnnnnnnnnnnnnnnnnnnnnnnnnnnnnnnnnnnnnnnnnnnnnnnnnnnnnnnnnnnnnnnnnnnnnnnnnnnnnnnnnnnnnnnnnnnnnnnnnnnnnnnnnnnnnnnnnnnnnnnnnnnnnnnnnnnnnnnnnnnnnnnnnnnnnnnnnnnnnnnnnnnnnnnnnnnnnnnnnnnnnnnnnnnnnnnnnnnnnnnnnnnnnnnnnnnnnnnnnnnnnnnnnnnnnnnnnnnnnnnnnnnnnnnnnnnnnnnnnnnnnnnnnnnnnnnnnnnnnnnnnnnnnnnnnnnnnnnnnnnnnnnnnnnnnnnnnnnnnnnnnnnnnnnnnnnnnnnnnnnnnnnnnnnnnnnnnnnnnnnnnnnnnnnnnnnnnnnnnnnnnnnnnnnnnnnnnnnnnnnnnnnnnnnnnnnnnnnnnnnnnnnnnnnnnnnnnnnnnnnnnnnnnnnnnnnnnnnnnnnnnnnnnnnnnnnnnnnnnnnnnnnnnnnnnnnnnnnnnnnnnnnnnnnnnnnnnnnnnnnnnnnnnnnnnnnnnnnnnnnnnnnnnnnnnnnnnnnnnnnnnnnnnnnnnnnnnnnnnnnnnnnnnnnnnnnnnnnnnnnnnnnnnnnnnnnnnnnnnnnnnnnnnnnnnnnnnnnnnnnnnnnnnnnnnnnnnnnnnnnnnnnnnnnnnnnnnnnnnnnnnnnnnnnnnnnnnnnnnnnnnnnnnnnnnnnnnnnnnnnnnnnnnnnnnnnnnnnnnnnnnnnnnnnnnnnnnnnnnnnnnnnnnnnnnnnnnnnnnnnnnnnnnnnnnnnnnnnnnnnnnnnnnnnnnnnnnnnnnnnnnnnnnnnnnnnnnnnnnnnnnnnnnnnnnnnnnnnnnnnnnnnnnnnnnnnnnnnnnnnnnnnnnnnnnnnnnnnnnnnnnnnnnnnnnnnnnnnnnnnnnnnnnnnnnnnnnnnnnnnnnnnnnnnnnnnnnnnnnnnnnnnnnnnnnnnnnnnnnnnnnnnnnnnnnnnnnnnnnnnnnnnnnnnnnnnnnnnnnnnnnnnnnnnnnnnnnnnnnnnnnnnnnnnnnnnnnnnnnnnnnnnnnnnnnnnnnnnnnnnnnnnnnnnnnnnnnnnnnnnnnnnnnnnnnnnnnnnnnnnnnnnnnnnnnnnnnnnnnnnnnnnnnnnnnnnnnnnnnnnnnnnnnnnnnnnnnnnnnnnnnnnnnnnnnnnnnnnnnnnnnnnnnnnnnnnnnnnnnnnnnnnnnnnnnnnnnnnnnnnnnnnnnnnnnnnnnnnnnnnnnnnnnnnnnnnnnnnnnnnnnnnnnnnnnnnnnnnnnnnnnnnnnnnnnnnnnnnnnnnnnnnnnnnnnnnnnnnnnnnnnnnnnnnnnnnnnnnnnnnnnnnnnnnnnnnnnnnnnnnnnnnnnnnnnnnnnnnnnnnnnnnnnnnnnnnnnnnnnnnnnnnnnnnnnnnnnnnnnnnnnnnnnnnnnnnnnnnnnnnnnnnnnnnnnnnnnnnnnnnnnnnnnnnnnnnnnnnnnnnnnnnnnnnnnnnnnnnnnnnnnnnnnnnnnnnnnnnnnnnnnnnnnnnnnnnnnnnnnnnnnnnnnnnnnnnnnnnnnnnnnnnnnnnnnnnnnnnnnnnnnnnnnnnnnnnnnnnnnnnnnnnnnnnnnnnnnnnnnnnnnnnnnnnnnnnnnnnnnnnnnnnnnnnnnnnnnnnnnnnnnnnnnnnnnnnnnnnnnnnnnnnnnnnnnnnnnnnnnnnnnnnnnnnnnnnnnnnnnnnnnnnnnnnnnnnnnnnnnnnnnnnnnnnnnnnnnnnnnnnnnnnnnnnnnnnnnnnnnnnnnnnnnnnnnnnnnnnnnnnnnnnnnnnnnnnnnnnnnnnnnnnnnnnnnnnnnnnnnnnnnnnnnnnnnnnnnnnnnnnnnnnnnnnnnnnnnnnnnnnnnnnnnnnnnnnnnnnnnnnnnnnnnnnnnnnnnnnnnnnnnnnnnnnnnnnnnnnnnnnnnnnnnnnnnnnnnnnnnnnnnnnnnnnnnnnnnnnnnnnnnnnnnnnnnnnnnnnnnnnnnnnnnnnnnnnnnnnnnnnnnnnnnnnnnnnnnnnnnnnnnnnnnnnnnnnnnnnnnnnnnnnnnnnnnnnnnnnnnnnnnnnnnnnnnnnnnnnnnnnnnnnnnnnnnnnnnnnnnnnnnnnnnnnnnnnnnnnnnnnnnnnnnnnnnnnnnnnnnnnnnnnnnnnnnnnnnnnnnnnnnnnnnnnnnnnnnnnnnnnnnnnnnnnnnnnnnnnnnnnnnnnnnnnnnnnnnnnnnnnnnnnnnnnnnnnnnnnnnnnnnnnnnnnnnnnnnnnnnnnnnnnnnnnnnnnnnnnnnnnnnnnnnnnnnnnnnnnnnnnnnnnnnnnnnnnnnnnnnnnnnnnnnnnnnnnnnnnnnnnnnnnnnnnnnnnnnnnnnnnnnnnnnnnnnnnnnnnnnnnnnnnnnnnnnnnnnnnnnnnnnnnnnnnnnnnnnnnnnnnnnnnnnnnnnnnnnnnnnnnnnnnnnnnnnnnnnnnnnnnnnnnnnnnnnnnnnnnnnnnnnnnnnnnnnnnnnnnnnnnnnnnnnnnnnnnnnnnnnnnnnnnnnnnnnnnnnnnnnnnnnnnnnnnnnnnnnnnnnnnnnnnnnnnnnnnnnnnnnnnnnnnnnnnnnnnnnnnnnnnnnnnnnnnnnnnnnnnnnnnnnnnnnnnnnnnnnnnnnnnnnnnnnnnnnnnnnnnnnnnnnnnnnnnnnnnnnnnnnnnnnnnnnnnnnnnnnnnnnnnnnnnnnnnnnnnnnnnnnnnnnnnnnnnnnnnnnnnnnnnnnnnnnnnnnnnnnnnnnnnnnnnnnnnnnnnnnnnnnnnnnnnnnnnnnnnnnnnnnnnnnnnnnnnnnnnnnnnnnnnnnnnnnnnnnnnnnnnnnnnnnnnnnnnnnnnnnnnnnnnnnnnnnnnnnnnnnnnnnnnnnnnnnnnnnnnnnnnnnnnnnnnnnnnnnnnnnnnnnnnnnnnnnnnnnnnnnnnnnnnnnnnnnnnnnnnnnnnnnnnnnnnnnnnnnnnnnnnnnnnnnnnnnnnnnnnnnnnnnnnnnnnnnnnnnnnnnnnnnnnnnnnnnnnnnnnnnnnnnnnnnnnnnnnnnnnnnnnnnnnnnnnnnnnnnnnnnnnnnnnnnnnnnnnnnnnnnnnnnnnnnnnnnnnnnnnnnnnnnnnnnnnnnnnnnnnnnnnnnnnnnnnnnnnnnnnnnnnnnnnnnnnnnnnnnnnnnnnnnnnnnnnnnnnnnnnnnnnnnnnnnnnnnnnnnnnnnnnnnnnnnnnnnnnnnnnnnnnnnnnnnnnnnnnnnnnnnnnnnnnnnnnnnnnnnnnnnnnnnnnnnnnnnnnnnnnnnnnnnnnnnnnnnnnnnnnnnnnnnnnnnnnnnnnnnnnnnnnnnnnnnnnnnnnnnnnnnnnnnnnnnnnnnnnnnnnnnnnnnnnnnnnnnnnnnnnnnnnnnnnnnnnnnnnnnnnnnnnnnnnnnnnnnnnnnnnnnnnnnnnnnnnnnnnnnnnnnnnnnnnnnnnnnnnnnnnnnnnnnnnnnnnnnnnnnnnnnnnnnnnnnnnnnnnnnnnnnnnnnnnnnnnnnnnnnnnnnnnnnnnnnnnnnnnnnnnnnnnnnnnnnnnnnnnnnnnnnnnnnnnnnnnnnnnnnnnnnnnnnnnnnnnnnnnnnnnnnnnnnnnnnnnnnnnnnnnnnnnnnnnnnnnnnnnnnnnnnnnnnnnnnnnnnnnnnnnnnnnnnnnnnnnnnnnnnnnnnnnnnnnnnnnnnnnnnnnnnnnnnnnnnnnnnnnnnnnnnnnnnnnnnnnnnnnnnnnnnnnnnnnnnnnnnnnnnnnnnnnnnnnnnnnnnnnnnnnnnnnnnnnnnnnnnnnnnnnnnnnnnnnnnnnnnnnnnnnnnnnnnnnnnnnnnnnnnnnnnnnnnnnnnnnnnnnnnnnnnnnnnnnnnnnnnnnnnnnnnnnnnnnnnnnnnnnnnnnnnnnnnnnnnnnnnnnnnnnnnnnnnnnnnnnnnnnnnnnnnnnnnnnnnnnnnnnnnnnnnnnnnnnnnnnnnnnnnnnnnnnnnnnnnnnnnnnnnnnnnnnnnnnnnnnnnnnnnnnnnnnnnnnnnnnnnnnnnnnnnnnnnnnnnnnnnnnnnnnnnnnnnnnnnnnnnnnnnnnnnnnnnnnnnnnnnnnnnnnnnnnnnnnnnnnnnnnnnnnnnnnnnnnnnnnnnnnnnnnnnnnnnnnnnnnnnnnnnnnnnnnnnnnnnnnnnnnnnnnnnnnnnnnnnnnnnnnnnnnnnnnnnnnnnnnnnnnnnnnnnnnnnnnnnnnnnnnnnnnnnnnnnnnnnnnnnnnnnnnnnnnnnnnnnnnnnnnnnnnnnnnnnnnnnnnnnnnnnnnnnnnnnnnnnnnnnnnnnnnnnnnnnnnnnnnnnnnnnnnnnnnnnnnnnnnnnnnnnnnnnnnnnnnnnnnnnnnnnnnnnnnnnnnnnnnnnnnnnnnnnnnnnnnnnnnnnnnnnnnnnnnnnnnnnnnnnnnnnnnnnnnnnnnnnnnnnnnnnnnnnnnnnnnnnnnnnnnnnnnnnnnnnnnnnnnnnnnnnnnnnnnnnnnnnnnnnnnnnnnnnnnnnnnnnnnnnnnnnnnnnnnnnnnnnnnnnnnnnnnnnnnnnnnnnnnnnnnnnnnnnnnnnnnnnnnnnnnnnnnnnnnnnnnnnnnnnnnnnnnnnnnnnnnnnnnnnnnnnnnnnnnnnnnnnnnnnnnnnnnnnnnnnnnnnnnnnnnnnnnnnnnnnnnnnnnnnnnnnnnnnnnnnnnnnnnnnnnnnnnnnnnnnnnnnnnnnnnnnnnnnnnnnnnnnnnnnnnnnnnnnnnnnnnnnnnnnnnnnnnnnnnnnnnnnnnnnnnnnnnnnnnnnnnnnnnnnnnnnnnnnnnnnnnnnnnnnnnnnnnnnnnnnnnnnnnnnnnnnnnnnnnnnnnnnnnnnnnnnnnnnnnnnnnnnnnnnnnnnnnnnnnnnnnnnnnnnnnnnnnnnnnnnnnnnnnnnnnnnnnnnnnnnnnnnnnnnnnnnnnnnnnnnnnnnnnnnnnnnnnnnnnnnnnnnnnnnnnnnnnnnnnnnnnnnnnnnnnnnnnnnnnnnnnnnnnnnnnnnnnnnnnnnnnnnnnnnnnnnnnnnnnnnnnnnnnnnnnnnnnnnnnnnnnnnnnnnnnnnnnnnnnnnnnnnnnnnnnnnnnnnnnnnnnnnnnnnnnnnnnnnnnnnnnnnnnnnnnnnnnnnnnnnnnnnnnnnnnnnnnnnnnnnnnnnnnnnnnnnnnnnnnnnnnnnnnnnnnnnnnnnnnnnnnnnnnnnnnnnnnnnnnnnnnnnnnnnnnnnnnnnnnnnnnnnnnnnnnnnnnnnnnnnnnnnnnnnnnnnnnnnnnnnnnnnnnnnnnnnnnnnnnnnnnnnnnnnnnnnnnnnnnnnnnnnnnnnnnnnnnnnnnnnnnnnnnnnnnnnnnnnnnnnnnnnnnnnnnnnnnnnnnnnnnnnnnnnnnnnnnnnnnnnnnnnnnnnnnnnnnnnnnnnnnnnnnnnnnnnnnnnnnnnnnnnnnnnnnnnnnnnnnnnnnnnnnnnnnnnnnnnnnnnnnnnnnnnnnnnnnnnnnnnnnnnnnnnnnnnnnnnnnnnnnnnnnnnnnnnnnnnnnnnnnnnnnnnnnnnnnnnnnnnnnnnnnnnnnnnnnnnnnnnnnnnnnnnnnnnnnnnnnnnnnnnnnnnnnnnnnnnnnnnnnnnnnnnnnnnnnnnnnnnnnnnnnnnnnnnnnnnnnnnnnnnnnnnnnnnnnnnnnnnnnnnnnnnnnnnnnnnnnnnnnnnnnnnnnnnnnnnnnnnnnnnnnnnnnnnnnnnnnnnnnnnnnnnnnnnnnnnnnnnnnnnnnnnnnnnnnnnnnnnnnnnnnnnnnnnnnnnnnnnnnnnnnnnnnnnnnnnnnnnnnnnnnnnnnnnnnnnnnnnnnnnnnnnnnnnnnnnnnnnnnnnnnnnnnnnnnnnnnnnnnnnnnnnnnnnnnnnnnnnnnnnnnnnnnnnnnnnnnnnnnnnnnnnnnnnnnnnnnnnnnnnnnnnnnnnnnnnnnnnnnnnnnnnnnnnnnnnnnnnnnnnnnnnnnnnnnnnnnnnnnnnnnnnnnnnnnnnnnnnnnnnnnnnnnnnnnnnnnnnnnnnnnnnnnnnnnnnnnnnnnnnnnnnnnnnnnnnnnnnnnnnnnnnnnnnnnnnnnnnnnnnnnnnnnnnnnnnnnnnnnnnnnnnnnnnnnnnnnnnnnnnnnnnnnnnnnnnnnnnnnnnnnnnnnnnnnnnnnnnnnnnnnnnnnnnnnnnnnnnnnnnnnnnnnnnnnnnnnnnnnnnnnnnnnnnnnnnnnnnnnnnnnnnnnnnnnnnnnnnnnnnnnnnnnnnnnnnnnnnnnnnnnnnnnnnnnnnnnnnnnnnnnnnnnnnnnnnnnnnnnnnnnnnnnnnnnnnnnnnnnnnnnnnnnnnnnnnnnnnnnnnnnnnnnnnnnnnnnnnnnnnnnnnnnnnnnnnnnnnnnnnnnnnnnnnnnnnnnnnnnnnnnnnnnnnnnnnnnnnnnnnnnnnnnnnnnnnnnnnnnnnnnnnnnnnnnnnnnnnnnnnnnnnnnnnnnnnnnnnnnnnnnnnnnnnnnnnnnnnnnnnnnnnnnnnnnnnnnnnnnnnnnnnnnnnnnnnnnnnnnnnnnnnnnnnnnnnnnnnnnnnnnnnnnnnnnnnnnnnnnnnnnnnnnnnnnnnnnnnnnnnnnnnnnnnnnnnnnnnnnnnnnnnnnnnnnnnnnnnnnnnnnnnnnnnnnnnnnnnnnnnnnnnnnnnnnnnnnnnnnnnnnnnnnnnnnnnnnnnnnnnnnnnnnnnnnnnnnnnnnnnnnnnnnnnnnnnnnnnnnnnnnnnnnnnnnnnnnnnnnnnnnnnnnnnnnnnnnnnnnnnnnnnnnnnnnnnnnnnnnnnnnnnnnnnnnnnnnnnnnnnnnnnnnnnnnnnnnnnnnnnnnnnnnnnnnnnnnnnnnnnnnnnnnnnnnnnnnnnnnnnnnnnnnnnnnnnnnnnnnnnnnnnnnnnnnnnnnnnnnnnnnnnnnnnnnnnnnnnnnnnnnnnnnnnnnnnnnnnnnnnnnnnnnnnnnnnnnnnnnnnnnnnnnnnnnnnnnnnnnnnnnnnnnnnnnnnnnnnnnnnnnnnnnnnnnnnnnnnnnnnnnnnnnnnnnnnnnnnnnnnnnnnnnnnnnnnnnnnnnnnnnnnnnnnnnnnnnnnnnnnnnnnnnnnnnnnnnnnnnnnnnnnnnnnnnnnnnnnnnnnnnnnnnnnnnnnnnnnnnnnnnnnnnnnnnnnnnnnnnnnnnnnnnnnnnnnnnnnnnnnnnnnnnnnnnnnnnnnnnnnnnnnnnnnnnnnnnnnnnnnnnnnnnnnnnnnnnnnnnnnnnnnnnnnnnnnnnnnnnnnnnnnnnnnnnnnnnnnnnnnnnnnnnnnnnnnnnnnnnnnnnnnnnnnnnnnnnnnnnnnnnnnnnnnnnnnnnnnnnnnnnnnnnnnnnnnnnnnnnnnnnnnnnnnnnnnnnnnnnnnnnnnnnnnnnnnnnnnnnnnnnnnnnnnnnnnnnnnnnnnnnnnnnnnnnnnnnnnnnnnnnnnnnnnnnnnnnnnnnnnnnnnnnnnnnnnnnnnnnnnnnnnnnnnnnnnnnnnnnnnnnnnnnnnnnnnnnnnnnnnnnnnnnnnnnnnnnnnnnnnnnnnnnnnnnnnnnnnnnnnnnnnnnnnnnnnnnnnnnnnnnnnnnnnnnnnnnnnnnnnnnnnnnnnnnnnnnnnnnnnnnnnnnnnnnnnnnnnnnnnnnnnnnnnnnnnnnnnnnnnnnnnnnnnnnnnnnnnnnnnnnnnnnnnnnnnnnnnnnnnnnnnnnnnnnnnnnnnnnnnnnnnnnnnnnnnnnnnnnnnnnnnnnnnnnnnnnnnnnnnnnnnnnnnnnnnnnnnnnnnnnnnnnnnnnnnnnnnnnnnnnnnnnnnnnnnnnnnnnnnnnnnnnnnnnnnnnnnnnnnnnnnnnnnnnnnnnnnnnnnnnnnnnnnnnnnnnnnnnnnnnnnnnnnnnnnnnnnnnnnnnnnnnnnnnnnnnnnnnnnnnnnnnnnnnnnnnnnnnnnnnnnnnnnnnnnnnnnnnnnnnnnnnnnnnnnnnnnnnnnnnnnnnnnnnnnnnnnnnnnnnnnnnnnnnnnnnnnnnnnnnnnnnnnnnnnnnnnnnnnnnnnnnnnnnnnnnnnnnnnnnnnnnnnnnnnnnnnnnnnnnnnnnnnnnnnnnnnnnnnnnnnnnnnnnnnnnnnnnnnnnnnnnnnnnnnnnnnnnnnnnnnnnnnnnnnnnnnnnnnnnnnnnnnnnnnnnnnnnnnnnnnnnnnnnnnnnnnnnnnnnnnnnnnnnnnnnnnnnnnnnnnnnnnnnnnnnnnnnnnnnnnnnnnnnnnnnnnnnnnnnnnnnnnnnnnnnnnnnnnnnnnnnnnnnnnnnnnnnnnnnnnnnnnnnnnnnnnnnnnnnnnnnnnnnnnnnnnnnnnnnnnnnnnnnnnnnnnnnnnnnnnnnnnnnnnnnnnnnnnnnnnnnnnnnnnnnnnnnnnnnnnnnnnnnnnnnnnnnnnnnnnnnnnnnnnnnnnnnnnnnnnnnnnnnnnnnnnnnnnnnnnnnnnnnnnnnnnnnnnnnnnnnnnnnnnnnnnnnnnnnnnnnnnnnnnnnnnnnnnnnnnnnnnnnnnnnnnnnnnnnnnnnnnnnnnnnnnnnnnnnnnnnnnnnnnnnnnnnnnnnnnnnnnnnnnnnnnnnnnnnnnnnnnnnnnnnnnnnnnnnnnnnnnnnnnnnnnnnnnnnnnnnnnnnnnnnnnnnnnnnnnnnnnnnnnnnnnnnnnnnnnnnnnnnnnnnnnnnnnnnnnnnnnnnnnnnnnnnnnnnnnnnnnnnnnnnnnnnnnnnnnnnnnnnnnnnnnnnnnnnnnnnnnnnnnnnnnnnnnnnnnnnnnnnnnnnnnnnnnnnnnnnnnnnnnnnnnnnnnnnnnnnnnnnnnnnnnnnnnnnnnnnnnnnnnnnnnnnnnnnnnnnnnnnnnnnnnnnnnnnnnnnnnnnnnnnnnnnnnnnnnnnnnnnnnnnnnnnnnnnnnnnnnnnnnnnnnnnnnnnnnnnnnnnnnnnnnnnnnnnnnnnnnnnnnnnnnnnnnnnnnnnnnnnnnnnnnnnnnnnnnnnnnnnnnnnnnnnnnnnnnnnnnnnnnnnnnnnnnnnnnnnnnnnnnnnnnnnnnnnnnnnnnnnnnnnnnnnnnnnnnnnnnnnnnnnnnnnnnnnnnnnnnnnnnnnnnnnnnnnnnnnnnnnnnnnnnnnnnnnnnnnnnnnnnnnnnnnnnnnnnnnnnnnnnnnnnnnnnnnnnnnnnnnnnnnnnnnnnnnnnnnnnnnnnnnnnnnnnnnnnnnnnnnnnnnnnnnnnnnnnnnnnnnnnnnnnnnnnnnnnnnnnnnnnnnnnnnnnnnnnnnnnnnnnnnnnnnnnnnnnnnnnnnnnnnnnnnnnnnnnnnnnnnnnnnnnnnnnnnnnnnnnnnnnnnnnnnnnnnnnnnnnnnnnnnnnnnnnnnnnnnnnnnnnnnnnnnnnnnnnnnnnnnnnnnnnnnnnnnnnnnnnnnnnnnnnnnnnnnnnnnnnnnnnnnnnnnnnnnnnnnnnnnnnnnnnnnnnnnnnnnnnnnnnnnnnnnnnnnnnnnnnnnnnnnnnnnnnnnnnnnnnnnnnnnnnnnnnnnnnnnnnnnnnnnnnnnnnnnnnnnnnnnnnnnnnnnnnnnnnnnnnnnnnnnnnnnnnnnnnnnnnnnnnnnnnnnnnnnnnnnnnnnnnnnnnnnnnnnnnnnnnnnnnnnnnnnnnnnnnnnnnnnnnnnnnnnnnnnnnnnnnnnnnnnnnnnnnnnnnnnnnnnnnnnnnnnnnnnnnnnnnnnnnnnnnnnnnnnnnnnnnnnnnnnnnnnnnnnnnnnnnnnnnnnnnnnnnnnnnnnnnnnnnnnnnnnnnnnnnnnnnnnnnnnnnnnnnnnnnnnnnnnnnnnnnnnnnnnnnnnnnnnnnnnnnnnnnnnnnnnnnnnnnnnnnnnnnnnnnnnnnnnnnnnnnnnnnnnnnnnnnnnnnnnnnnnnnnnnnnnnnnnnnnnnnnnnnnnnnnnnnnnnnnnnnnnnnnnnnnnnnnnnnnnnnnnnnnnnnnnnnnnnnnnnnnnnnnnnnnnnnnnnnnnnnnnnnnnnnnnnnnnnnnnnnnnnnnnnnnnnnnnnnnnnnnnnnnnnnnnnnnnnnnnnnnnnnnnnnnnnnnnnnnnnnnnnnnnnnnnnnnnnnnnnnnnnnnnnnnnnnnnnnnnnnnnnnnnnnnnnnnnnnnnnnnnnnnnnnnnnnnnnnnnnnnnnnnnnnnnnnnnnnnnnnnnnnnnnnnnnnnnnnnnnnnnnnnnnnnnnnnnnnnnnnnnnnnnnnnnnnnnnnnnnnnnnnnnnnnnnnnnnnnnnnnnnnnnnnnnnnnnnnnnnnnnnnnnnnnnnnnnnnnnnnnnnnnnnnnnnnnnnnnnnnnnnnnnnnnnnnnnnnnnnnnnnnnnnnnnnnnnnnnnnnnnnnnnnnnnnnnnnnnnnnnnnnnnnnnnnnnnnnnnnnnnnnnnnnnnnnnnnnnnnnnnnnnnnnnnnnnnnnnnnnnnnnnnnnnnnnnnnnnnnnnnnnnnnnnnnnnnnnnnnnnnnnnnnnnnnnnnnnnnnnnnnnnnnnnnnnnnnnnnnnnnnnnnnnnnnnnnnnnnnnnnnnnnnnnnnnnnnnnnnnnnnnnnnnnnnnnnnnnnnnnnnnnnnnnnnnnnnnnnnnnnnnnnnnnnnnnnnnnnnnnnnnnnnnnnnnnnnnnnnnnnnnnnnnnnnnnnnnnnnnnnnnnnnnnnnnnnnnnnnnnnnnnnnnnnnnnnnnnnnnnnnnnnnnnnnnnnnnnnnnnnnnnnnnnnnnnnnnnnnnnnnnnnnnnnnnnnnnnnnnnnnnnnnnnnnnnnnnnnnnnnnnnnnnnnnnnnnnnnnnnnnnnnnnnnnnnnnnnnnnnnnnnnnnnnnnnnnnnnnnnnnnnnnnnnnnnnnnnnnnnnnnnnnnnnnnnnnnnnnnnnnnnnnnnnnnnnnnnnnnnnnnnnnnnnnnnnnnnnnnnnnnnnnnnnnnnnnnnnnnnnnnnnnnnnnnnnnnnnnnnnnnnnnnnnnnnnnnnnnnnnnnnnnnnnnnnnnnnnnnnnnnnnnnnnnnnnnnnnnnnnnnnnnnnnnnnnnnnnnnnnnnnnnnnnnnnnnnnnnnnnnnnnnnnnnnnnnnnnnnnnnnnnnnnnnnnnnnnnnnnnnnnnnnnnnnnnnnnnnnnnnnnnnnnnnnnnnnnnnnnnnnnnnnnnnnnnnnnnnnnnnnnnnnnnnnnnnnnnnnnnnnnnnnnnnnnnnnnnnnnnnnnnnnnnnnnnnnnnnnnnnnnnnnnnnnnnnnnnnnnnnnnnnnnnnnnnnnnnnnnnnnnnnnnnnnnnnnnnnnnnnnnnnnnnnnnnnnnnnnnnnnnnnnnnnnnnnnnnnnnnnnnnnnnnnnnnnnnnnnnnnnnnnnnnnnnnnnnnnnnnnnnnnnnnnnnnnnnnnnnnnnnnnnnnnnnnnnnnnnnnnnnnnnnnnnnnnnnnnnnnnnnnnnnnnnnnnnnnnnnnnnnnnnnnnnnnnnnnnnnnnnnnnnnnnnnnnnnnnnnnnnnnnnnnnnnnnnnnnnnnnnnnnnnnnnnnnnnnnnnnnnnnnnnnnnnnnnnnnnnnnnnnnnnnnnnnnnnnnnnnnnnnnnnnnnnnnnnnnnnnnnnnnnnnnnnnnnnnnnnnnnnnnnnnnnnnnnnnnnnnnnnnnnnnnnnnnnnnnnnnnnnnnnnnnnnnnnnnnnnnnnnnnnnnnnnnnnnnnnnnnnnnnnnnnnnnnnnnnnnnnnnnnnnnnnnnnnnnnnnnnnnnnnnnnnnnnnnnnnnnnnnnnnnnnnnnnnnnnnnnnnnnnnnnnnnnnnnnnnnnnnnnnnnnnnnnnnnnnnnnnnnnnnnnnnnnnnnnnnnnnnnnnnnnnnnnnnnnnnnnnnnnnnnnnnnnnnnnnnnnnnnnnnnnnnnnnnnnnnnnnnnnnnnnnnnnnnnnnnnnnnnnnnnnnnnnnnnnnnnnnnnnnnnnnnnnnnnnnnnnnnnnnnnnnnnnnnnnnnnnnnnnnnnnnnnnnnnnnnnnnnnnnnnnnnnnnnnnnnnnnnnnnnnnnnnnnnnnnnnnnnnnnnnnnnnnnnnnnnnnnnnnnnnnnnnnnnnnnnnnnnnnnnnnnnnnnnnnnnnnnnnnnnnnnnnnnnnnnnnnnnnnnnnnnnnnnnnnnnnnnnnnnnnnnnnnnnnnnnnnnnnnnnnnnnnnnnnnnnnnnnnnnnnnnnnnnnnnnnnnnnnnnnnnnnnnnnnnnnnnnnnnnnnnnnnnnnnnnnnnnnnnnnnnnnnnnnnnnnnnnnnnnnnnnnnnnnnnnnnnnnnnnnnnnnnnnnnnnnnnnnnnnnnnnnnnnnnnnnnnnnnnnnnnnnnnnnnnnnnnnnnnnnnnnnnnnnnnnnnnnnnnnnnnnnnnnnnnnnnnnnnnnnnnnnnnnnnnnnnnnnnnnnnnnnnnnnnnnnnnnnnnnnnnnnnnnnnnnnnnnnnnnnnnnnnnnnnnnnnnnnnnnnnnnnnnnnnnnnnnnnnnnnnnnnnnnnnnnnnnnnnnnnnnnnnnnnnnnnnnnnnnnnnnnnnnnnnnnnnnnnnnnnnnnnnnnnnnnnnnnnnnnnnnnnnnnnnnnnnnnnnnnnnnnnnnnnnnnnnnnnnnnnnnnnnnnnnnnnnnnnnnnnnnnnnnnnnnnnnnnnnnnnnnnnnnnnnnnnnnnnnnnnnnnnnnnnnnnnnnnnnnnnnnnnnnnnnnnnnnnnnnnnnnnnnnnnnnnnnnnnnnnnnnnnnnnnnnnnnnnnnnnnnnnnnnnnnnnnnnnnnnnnnnnnnnnnnnnnnnnnnnnnnnnnnnnnnnnnnnnnnnnnnnnnnnnnnnnnnnnnnnnnnnnnnnnnnnnnnnnnnnnnnnnnnnnnnnnnnnnnnnnnnnnnnnnnnnnnnnnnnnnnnnnnnnnnnnnnnnnnnnnnnnnnnnnnnnnnnnnnnnnnnnnnnnnnnnnnnnnnnnnnnnnnnnnnnnnnnnnnnnnnnnnnnnnnnnnnnnnnnnnnnnnnnnnnnnnnnnnnnnnnnnnnnnnnnnnnnnnnnnnnnnnnnnnnnnnnnnnnnnnnnnnnnnnnnnnnnnnnnnnnnnnnnnnnnnnnnnnnnnnnnnnnnnnnnnnnnnnnnnnnnnnnnnnnnnnnnnnnnnnnnnnnnnnnnnnnnnnnnnnnnnnnnnnnnnnnnnnnnnnnnnnnnnnnnnnnnnnnnnnnnnnnnnnnnnnnnnnnnnnnnnnnnnnnnnnnnnnnnnnnnnnnnnnnnnnnnnnnnnnnnnnnnnnnnnnnnnnnnnnnnnnnnnnnnnnnnnnnnnnnnnnnnnnnnnnnnnnnnnnnnnnnnnnnnnnnnnnnnnnnnnnnnnnnnnnnnnnnnnnnnnnnnnnnnnnnnnnnnnnnnnnnnnnnnnnnnnnnnnnnnnnnnnnnnnnnnnnnnnnnnnnnnnnnnnnnnnnnnnnnnnnnnnnnnnnnnnnnnnnnnnnnnnnnnnnnnnnnnnnnnnnnnnnnnnnnnnnnnnnnnnnnnnnnnnnnnnnnnnnnnnnnnnnnnnnnnnnnnnnnnnnnnnnnnnnnnnnnnnnnnnnnnnnnnnnnnnnnnnnnnnnnnnnnnnnnnnnnnnnnnnnnnnnnnnnnnnnnnnnnnnnnnnnnnnnnnnnnnnnnnnnnnnnnnnnnnnnnnnnnnnnnnnnnnnnnnnnnnnnnnnnnnnnnnnnnnnnnnnnnnnnnnnnnnnnnnnnnnnnnnnnnnnnnnnnnnnnnnnnnnnnnnnnnnnnnnnnnnnnnnnnnnnnnnnnnnnnnnnnnnnnnnnnnnnnnnnnnnnnnnnnnnnnnnnnnnnnnnnnnnnnnnnnnnnnnnnnnnnnnnnnnnnnnnnnnnnnnnnnnnnnnnnnnnnnnnnnnnnnnnnnnnnnnnnnnnnnnnnnnnnnnnnnnnnnnnnnnnnnnnnnnnnnnnnnnnnnnnnnnnnnnnnnnnnnnnnnnnnnnnnnnnnnnnnnnnnnnnnnnnnnnnnnnnnnnnnnnnnnnnnnnnnnnnnnnnnnnnnnnnnnnnnnnnnnnnnnnnnnnnnnnnnnnnnnnnnnnnnnnnnnnnnnnnnnnnnnnnnnnnnnnnnnnnnnnnnnnnnnnnnnnnnnnnnnnnnnnnnnnnnnnnnnnnnnnnnnnnnnnnnnnnnnnnnnnnnnnnnnnnnnnnnnnnnnnnnnnnnnnnnnnnnnnnnnnnnnnnnnnnnnnnnnnnnnnnnnnnnnnnnnnnnnnnnnnnnnnnnnnnnnnnnnnnnnnnnnnnnnnnnnnnnnnnnnnnnnnnnnnnnnnnnnnnnnnnnnnnnnnnnnnnnnnnnnnnnnnnnnnnnnnnnnnnnnnnnnnnnnnnnnnnnnnnnnnnnnnnnnnnnnnnnnnnnnnnnnnnnnnnnnnnnnnnnnnnnnnnnnnnnnnnnnnnnnnnnnnnnnnnnnnnnnnnnnnnnnnnnnnnnnnnnnnnnnnnnnnnnnnnnnnnnnnnnnnnnnnnnnnnnnnnnnnnnnnnnnnnnnnnnnnnnnnnnnnnnnnnnnnnnnnnnnnnnnnnnnnnnnnnnnnnnnnnnnnnnnnnnnnnnnnnnnnnnnnnnnnnnnnnnnnnnnnnnnnnnnnnnnnnnnnnnnnnnnnnnnnnnnnnnnnnnnnnnnnnnnnnnnnnnnnnnnnnnnnnnnnnnnnnnnnnnnnnnnnnnnnnnnnnnnnnnnnnnnnnnnnnnnnnnnnnnnnnnnnnnnnnnnnnnnnnnnnnnnnnnnnnnnnnnnnnnnnnnnnnnnnnnnnnnnnnnnnnnnnnnnnnnnnnnnnnnnnnnnnnnnnnnnnnnnnnnnnnnnnnnnnnnnnnnnnnnnnnnnnnnnnnnnnnnnnnnnnnnnnnnnnnnnnnnnnnnnnnnnnnnnnnnnnnnnnnnnnnnnnnnnnnnnnnnnnnnnnnnnnnnnnnnnnnnnnnnnnnnnnnnnnnnnnnnnnnnnnnnnnnnnnnnnnnnnnnnnnnnnnnnnnnnnnnnnnnnnnnnnnnnnnnnnnnnnnnnnnnnnnnnnnnnnnnnnnnnnnnnnnnnnnnnnnnnnnnnnnnnnnnnnnnnnnnnnnnnnnnnnnnnnnnnnnnnnnnnnnnnnnnnnnnnnnnnnnnnnnnnnnnnnnnnnnnnnnnnnnnnnnnnnnnnnnnnnnnnnnnnnnnnnnnnnnnnnnnnnnnnnnnnnnnnnnnnnnnnnnnnnnnnnnnnnnnnnnnnnnnnnnnnnnnnnnnnnnnnnnnnnnnnnnnnnnnnnnnnnnnnnnnnnnnnnnnnnnnnnnnnnnnnnnnnnnnnnnnnnnnnnnnnnnnnnnnnnnnnnnnnnnnnnnnnnnnnnnnnnnnnnnnnnnnnnnnnnnnnnnnnnnnnnnnnnnnnnnnnnnnnnnnnnnnnnnnnnnnnnnnnnnnnnnnnnnnnnnnnnnnnnnnnnnnnnnnnnnnnnnnnnnnnnnnnnnnnnnnnnnnnnnnnnnnnnnnnnnnnnnnnnnnnnnnnnnnnnnnnnnnnnnnnnnnnnnnnnnnnnnnnnnnnnnnnnnnnnnnnnnnnnnnnnnnnnnnnnnnnnnnnnnnnnnnnnnnnnnnnnnnnnnnnnnnnnnnnnnnnnnnnnnnnnnnnnnnnnnnnnnnnnnnnnnnnnnnnnnnnnnnnnnnnnnnnnnnnnnnnnnnnnnnnnnnnnnnnnnnnnnnnnnnnnnnnnnnnnnnnnnnnnnnnnnnnnnnnnnnnnnnnnnnnnnnnnnnnnnnnnnnnnnnnnnnnnnnnnnnnnnnnnnnnnnnnnnnnnnnnnnnnnnnnnnnnnnnnnnnnnnnnnnnnnnnnnnnnnnnnnnnnnnnnnnnnnnnnnnnnnnnnnnnnnnnnnnnnnnnnnnnnnnnnnnnnnnnnnnnnnnnnnnnnnnnnnnnnnnnnnnnnnnnnnnnnnnnnnnnnnnnnnnnnnnnnnnnnnnnnnnnnnnnnnnnnnnnnnnnnnnnnnnnnnnnnnnnnnnnnnnnnnnnnnnnnnnnnnnnnnnnnnnnnnnnnnnnnnnnnnnnnnnnnnnnnnnnnnnnnnnnnnnnnnnnnnnnnnnnnnnnnnnnnnnnnnnnnnnnnnnnnnnnnnnnnnnnnnnnnnnnnnnnnnnnnnnnnnnnnnnnnnnnnnnnnnnnnnnnnnnnnnnnnnnnnnnnnnnnnnnnnnnnnnnnnnnnnnnnnnnnnnnnnnnnnnnnnnnnnnnnnnnnnnnnnnnnnnnnnnnnnnnnnnnnnnnnnnnnnnnnnnnnnnnnnnnnnnnnnnnnnnnnnnnnnnnnnnnnnnnnnnnnnnnnnnnnnnnnnnnnnnnnnnnnnnnnnnnnnnnnnnnnnnnnnnnnnnnnnnnnnnnnnnnnnnnnnnnnnnnnnnnnnnnnnnnnnnnnnnnnnnnnnnnnnnnnnnnnnnnnnnnnnnnnnnnnnnnnnnnnnnnnnnnnnnnnnnnnnnnnnnnnnnnnnnnnnnnnnnnnnnnnnnnnnnnnnnnnnnnnnnnnnnnnnnnnnnnnnnnnnnnnnnnnnnnnnnnnnnnnnnnnnnnnnnnnnnnnnnnnnnnnnnnnnnnnnnnnnnnnnnnnnnnnnnnnnnnnnnnnnnnnnnnnnnnnnnnnnnnnnnnnnnnnnnnnnnnnnnnnnnnnnnnnnnnnnnnnnnnnnnnnnnnnnnnnnnnnnnnnnnnnnnnnnnnnnnnnnnnnnnnnnnnnnnnnnnnnnnnnnnnnnnnnnnnnnnnnnnnnnnnnnnnnnnnnnnnnnnnnnnnnnnnnnnnnnnnnnnnnnnnnnnnnnnnnnnnnnnnnnnnnnnnnnnnnnnnnnnnnnnnnnnnnnnnnnnnnnnnnnnnnnnnnnnnnnnnnnnnnnnnnnnnnnnnnnnnnnnnnnnnnnnnnnnnnnnnnnnnnnnnnnnnnnnnnnnnnnnnnnnnnnnnnnnnnnnnnnnnnnnnnnnnnnnnnnnnnnnnnnnnnnnnnnnnnnnnnnnnnnnnnnnnnnnnnnnnnnnnnnnnnnnnnnnnnnnnnnnnnnnnnnnnnnnnnnnnnnnnnnnnnnnnnnnnnnnnnnnnnnnnnnnnnnnnnnnnnnnnnnnnnnnnnnnnnnnnnnnnnnnnnnnnnnnnnnnnnnnnnnnnnnnnnnnnnnnnnnnnnnnnnnnnnnnnnnnnnnnnnnnnnnnnnnnnnnnnnnnnnnnnnnnnnnnnnnnnnnnnnnnnnnnnnnnnnnnnnnnnnnnnnnnnnnnnnnnnnnnnnnnnnnnnnnnnnnnnnnnnnnnnnnnnnnnnnnnnnnnnnnnnnnnnnnnnnnnnnnnnnnnnnnnnnnnnnnnnnnnnnnnnnnnnnnnnnnnnnnnnnnnnnnnnnnnnnnnnnnnnnnnnnnnnnnnnnnnnnnnnnnnnnnnnnnnnnnnnnnnnnnnnnnnnnnnnnnnnnnnnnnnnnnnnnnnnnnnnnnnnnnnnnnnnnnnnnnnnnnnnnnnnnnnnnnnnnnnnnnnnnnnnnnnnnnnnnnnnnnnnnnnnnnnnnnnnnnnnnnnnnnnnnnnnnnnnnnnnnnnnnnnnnnnnnnnnnnnnnnnnnnnnnnnnnnnnnnnnnnnnnnnnnnnnnnnnnnnnnnnnnnnnnnnnnnnnnnnnnnnnnnnnnnnnnnnnnnnnnnnnnnnnnnnnnnnnnnnnnnnnnnnnnnnnnnnnnnnnnnnnnnnnnnnnnnnnnnnnnnnnnnnnnnnnnnnnnnnnnnnnnnnnnnnnnnnnnnnnnnnnnnnnnnnnnnnnnnnnnnnnnnnnnnnnnnnnnnnnnnnnnnnnnnnnnnnnnnnnnnnnnnnnnnnnnnnnnnnnnnnnnnnnnnnnnnnnnnnnnnnnnnnnnnnnnnnnnnnnnnnnnnnnnnnnnnnnnnnnnnnnnnnnnnnnnnnnnnnnnnnnnnnnnnnnnnnnnnnnnnnnnnnnnnnnnnnnnnnnnnnnnnnnnnnnnnnnnnnnnnnnnnnnnnnnnnnnnnnnnnnnnnnnnnnnnnnnnnnnnnnnnnnnnnnnnnnnnnnnnnnnnnnnnnnnnnnnnnnnnnnnnnnnnnnnnnnnnnnnnnnnnnnnnnnnnnnnnnnnnnnnnnnnnnnnnnnnnnnnnnnnnnnnnnnnnnnnnnnnnnnnnnnnnnnnnnnnnnnnnnnnnnnnnnnnnnnnnnnnnnnnnnnnnnnnnnnnnnnnnnnnnnnnnnnnnnnnnnnnnnnnnnnnnnnnnnnnnnnnnnnnnnnnnnnnnnnnnnnnnnnnnnnnnnnnnnnnnnnnnnnnnnnnnnnnnnnnnnnnnnnnnnnnnnnnnnnnnnnnnnnnnnnnnnnnnnnnnnnnnnnnnnnnnnnnnnnnnnnnnnnnnnnnnnnnnnnnnnnnnnnnnnnnnnnnnnnnnnnnnnnnnnnnnnnnnnnnnnnnnnnnnnnnnnnnnnnnnnnnnnnnnnnnnnnnnnnnnnnnnnnnnnnnnnnnnnnnnnnnnnnnnnnnnnnnnnnnnnnnnnnnnnnnnnnnnnnnnnnnnnnnnnnnnnnnnnnnnnnnnnnnnnnnnnnnnnnnnnnnnnnnnnnnnnnnnnnnnnnnnnnnnnnnnnnnnnnnnnnnnnnnnnnnnnnnnnnnnnnnnnnnnnnnnnnnnnnnnnnnnnnnnnnnnnnnnnnnnnnnnnnnnnnnnnnnnnnnnnnnnnnnnnnnnnnnnnnnnnnnnnnnnnnnnnnnnnnnnnnnnnnnnnnnnnnnnnnnnnnnnnnnnnnnnnnnnnnnnnnnnnnnnnnnnnnnnnnnnnnnnnnnnnnnnnnnnnnnnnnnnnnnnnnnnnnnnnnnnnnnnnnnnnnnnnnnnnnnnnnnnnnnnnnnnnnnnnnnnnnnnnnnnnnnnnnnnnnnnnnnnnnnnnnnnnnnnnnnnnnnnnnnnnnnnnnnnnnnnnnnnnnnnnnnnnnnnnnnnnnnnnnnnnnnnnnnnnnnnnnnnnnnnnnnnnnnnnnnnnnnnnnnnnnnnnnnnnnnnnnnnnnnnnnnnnnnnnnnnnnnnnnnnnnnnnnnnnnnnnnnnnnnnnnnnnnnnnnnnnnnnnnnnnnnnnnnnnnnnnnnnnnnnnnnnnnnnnnnnnnnnnnnnnnnnnnnnnnnnnnnnnnnnnnnnnnnnnnnnnnnnnnnnnnnnnnnnnnnnnnnnnnnnnnnnnnnnnnnnnnnnnnnnnnnnnnnnnnnnnnnnnnnnnnnnnnnnnnnnnnnnnnnnnnnnnnnnnnnnnnnnnnnnnnnnnnnnnnnnnnnnnnnnnnnnnnnnnnnnnnnnnnnnnnnnnnnnnnnnnnnnnnnnnnnnnnnnnnnnnnnnnnnnnnnnnnnnnnnnnnnnnnnnnnnnnnnnnnnnnnnnnnnnnnnnnnnnnnnnnnnnnnnnnnnnnnnnnnnnnnnnnnnnnnnnnnnnnnnnnnnnnnnnnnnnnnnnnnnnnnnnnnnnnnnnnnnnnnnnnnnnnnnnnnnnnnnnnnnnnnnnnnnnnnnnnnnnnnnnnnnnnnnnnnnnnnnnnnnnnnnnnnnnnnnnnnnnnnnnnnnnnnnnnnnnnnnnnnnnnnnnnnnnnnnnnnnnnnnnnnnnnnnnnnnnnnnnnnnnnnnnnnnnnnnnnnnnnnnnnnnnnnnnnnnnnnnnnnnnnnnnnnnnnnnnnnnnnnnnnnnnnnnnnnnnnnnnnnnnnnnnnnnnnnnnnnnnnnnnnnnnnnnnnnnnnnnnnnnnnnnnnnnnnnnnnnnnnnnnnnnnnnnnnnnnnnnnnnnnnnnnnnnnnnnnnnnnnnnnnnnnnnnnnnnnnnnnnnnnnnnnnnnnnnnnnnnnnnnnnnnnnnnnnnnnnnnnnnnnnnnnnnnnnnnnnnnnnnnnnnnnnnnnnnnnnnnnnnnnnnnnnnnnnnnnnnnnnnnnnnnnnnnnnnnnnnnnnnnnnnnnnnnnnnnnnnnnnnnnnnnnnnnnnnnnnnnnnnnnnnnnnnnnnnnnnnnnnnnnnnnnnnnnnnnnnnnnnnnnnnnnnnnnnnnnnnnnnnnnnnnnnnnnnnnnnnnnnnnnnnnnnnnnnnnnnnnnnnnnnnnnnnnnnnnnnnnnnnnnnnnnnnnnnnnnnnnnnnnnnnnnnnnnnnnnnnnnnnnnnnnnnnnnnnnnnnnnnnnnnnnnnnnnnnnnnnnnnnnnnnnnnnnnnnnnnnnnnnnnnnnnnnnnnnnnnnnnnnnnnnnnnnnnnnnnnnnnnnnnnnnnnnnnnnnnnnnnnnnnnnnnnnnnnnnnnnnnnnnnnnnnnnnnnnnnnnnnnnnnnnnnnnnnnnnnnnnnnnnnnnnnnnnnnnnnnnnnnnnnnnnnnnnnnnnnnnnnnnnnnnnnnnnnnnnnnnnnnnnnnnnnnnnnnnnnnnnnnnnnnnnnnnnnnnnnnnnnnnnnnnnnnnnnnnnnnnnnnnnnnnnnnnnnnnnnnnnnnnnnnnnnnnnnnnnnnnnnnnnnnnnnnnnnnnnnnnnnnnnnnnnnnnnnnnnnnnnnnnnnnnnnnnnnnnnnnnnnnnnnnnnnnnnnnnnnnnnnnnnnnnnnnnnnnnnnnnnnnnnnnnnnnnnnnnnnnnnnnnnnnnnnnnnnnnnnnnnnnnnnnnnnnnnnnnnnnnnnnnnnnnnnnnnnnnnnnnnnnnnnnnnnnnnnnnnnnnnnnnnnnnnnnnnnnnnnnnnnnnnnnnnnnnnnnnnnnnnnnnnnnnnnnnnnnnnnnnnnnnnnnnnnnnnnnnnnnnnnnnnnnnnnnnnnnnnnnnnnnnnnnnnnnnnnnnnnnnnnnnnnnnnnnnnnnnnnnnnnnnnnnnnnnnnnnnnnnnnnnnnnnnnnnnnnnnnnnnnnnnnnnnnnnnnnnnnnnnnnnnnnnnnnnnnnnnnnnnnnnnnnnnnnnnnnnnnnnnnnnnnnnnnnnnnnnnnnnnnnnnnnnnnnnnnnnnnnnnnnnnnnnnnnnnnnnnnnnnnnnnnnnnnnnnnnnnnnnnnnnnnnnnnnnnnnnnnnnnnnnnnnnnnnnnnnnnnnnnnnnnnnnnnnnnnnnnnnnnnnnnnnnnnnnnnnnnnnnnnnnnnnnnnnnnnnnnnnnnnnnnnnnnnnnnnnnnnnnnnnnnnnnnnnnnnnnnnnnnnnnnnnnnnnnnnnnnnnnnnnnnnnnnnnnnnnnnnnnnnnnnnnnnnnnnnnnnnnnnnnnnnnnnnnnnnnnnnnnnnnnnnnnnnnnnnnnnnnnnnnnnnnnnnnnnnnnnnnnnnnnnnnnnnnnnnnnnnnnnnnnnnnnnnnnnnnnnnnnnnnnnnnnnnnnnnnnnnnnnnnnnnnnnnnnnnnnnnnnnnnnnnnnnnnnnnnnnnnnnnnnnnnnnnnnnnnnnnnnnnnnnnnnnnnnnnnnnnnnnnnnnnnnnnnnnnnnnnnnnnnnnnnnnnnnnnnnnnnnnnnnnnnnnnnnnnnnnnnnnnnnnnnnnnnnnnnnnnnnnnnnnnnnnnnnnnnnnnnnnnnnnnnnnnnnnnnnnnnnnnnnnnnnnnnnnnnnnnnnnnnnnnnnnnnnnnnnnnnnnnnnnnnnnnnnnnnnnnnnnnnnnnnnnnnnnnnnnnnnnnnnnnnnnnnnnnnnnnnnnnnnnnnnnnnnnnnnnnnnnnnnnnnnnnnnnnnnnnnnnnnnnnnnnnnnnnnnnnnnnnnnnnnnnnnnnnnnnnnnnnnnnnnnnnnnnnnnnnnnnnnnnnnnnnnnnnnnnnnnnnnnnnnnnnnnnnnnnnnnnnnnnnnnnnnnnnnnnnnnnnnnnnnnnnnnnnnnnnnnnnnnnnnnnnnnnnnnnnnnnnnnnnnnnnnnnnnnnnnnnnnnnnnnnnnnnnnnnnnnnnnnnnnnnnnnnnnnnnnnnnnnnnnnnnnnnnnnnnnnnnnnnnnnnnnnnnnnnnnnnnnnnnnnnnnnnnnnnnnnnnnnnnnnnnnnnnnnnnnnnnnnnnnnnnnnnnnnnnnnnnnnnnnnnnnnnnnnnnnnnnnnnnnnnnnnnnnnnnnnnnnnnnnnnnnnnnnnnnnnnnnnnnnnnnnnnnnnnnnnnnnnnnnnnnnnnnnnnnnnnnnnnnnnnnnnnnnnnnnnnnnnnnnnnnnnnnnnnnnnnnnnnnnnnnnnnnnnnnnnnnnnnnnnnnnnnnnnnnnnnnnnnnnnnnnnnnnnnnnnnnnnnnnnnnnnnnnnnnnnnnnnnnnnnnnnnnnnnnnnnnnnnnnnnnnnnnnnnnnnnnnnnnnnnnnnnnnnnnnnnnnnnnnnnnnnnnnnnnnnnnnnnnnnnnnnnnnnnnnnnnnnnnnnnnnnnnnnnnnnnnnnnnnnnnnnnnnnnnnnnnnnnnnnnnnnnnnnnnnnnnnnnnnnnnnnnnnnnnnnnnnnnnnnnnnnnnnnnnnnnnnnnnnnnnnnnnnnnnnnnnnnnnnnnnnnnnnnnnnnnnnnnnnnnnnnnnnnnnnnnnnnnnnnnnnnnnnnnnnnnnnnnnnnnnnnnnnnnnnnnnnnnnnnnnnnnnnnnnnnnnnnnnnnnnnnnnnnnnnnnnnnnnnnnnnnnnnnnnnnnnnnnnnnnnnnnnnnnnnnnnnnnnnnnnnnnnnnnnnnnnnnnnnnnnnnnnnnnnnnnnnnnnnnnnnnnnnnnnnnnnnnnnnnnnnnnnnnnnnnnnnnnnnnnnnnnnnnnnnnnnnnnnnnnnnnnnnnnnnnnnnnnnnnnnnnnnnnnnnnnnnnnnnnnnnnnnnnnnnnnnnnnnnnnnnnnnnnnnnnnnnnnnnnnnnnnnnnnnnnnnnnnnnnnnnnnnnnnnnnnnnnnnnnnnnnnnnnnnnnnnnnnnnnnnnnnnnnnnnnnnnnnnnnnnnnnnnnnnnnnnnnnnnnnnnnnnnnnnnnnnnnnnnnnnnnnnnnnnnnnnnnnnnnnnnnnnnnnnnnnnnnnnnnnnnnnnnnnnnnnnnnnnnnnnnnnnnnnnnnnnnnnnnnnnnnnnnnnnnnnnnnnnnnnnnnnnnnnnnnnnnnnnnnnnnnnnnnnnnnnnnnnnnnnnnnnnnnnnnnnnnnnnnnnnnnnnnnnnnnnnnnnnnnnnnnnnnnnnnnnnnnnnnnnnnnnnnnnnnnnnnnnnnnnnnnnnnnnnnnnnnnnnnnnnnnnnnnnnnnnnnnnnnnnnnnnnnnnnnnnnnnnnnnnnnnnnnnnnnnnnnnnnnnnnnnnnnnnnnnnnnnnnnnnnnnnnnnnnnnnnnnnnnnnnnnnnnnnnnnnnnnnnnnnnnnnnnnnnnnnnnnnnnnnnnnnnnnnnnnnnnnnnnnnnnnnnnnnnnnnnnnnnnnnnnnnnnnnnnnnnnnnnnnnnnnnnnnnnnnnnnnnnnnnnnnnnnnnnnnnnnnnnnnnnnnnnnnnnnnnnnnnnnnnnnnnnnnnnnnnnnnnnnnnnnnnnnnnnnnnnnnnnnnnnnnnnnnnnnnnnnnnnnnnnnnnnnnnnnnnnnnnnnnnnnnnnnnnnnnnnnnnnnnnnnnnnnnnnnnnnnnnnnnnnnnnnnnnnnnnnnnnnnnnnnnnnnnnnnnnnnnnnnnnnnnnnnnnnnnnnnnnnnnnnnnnnnnnnnnnnnnnnnnnnnnnnnnnnnnnnnnnnnnnnnnnnnnnnnnnnnnnnnnnnnnnnnnnnnnnnnnnnnnnnnnnnnnnnnnnnnnnnnnnnnnnnnnnnnnnnnnnnnnnnnnnnnnnnnnnnnnnnnnnnnnnnnnnnnnnnnnnnnnnnnnnnnnnnnnnnnnnnnnnnnnnnnnnnnnnnnnnnnnnnnnnnnnnnnnnnnnnnnnnnnnnnnnnnnnnnnnnnnnnnnnnnnnnnnnnnnnnnnnnnnnnnnnnnnnnnnnnnnnnnnnnnnnnnnnnnnnnnnnnnnnnnnnnnnnnnnnnnnnnnnnnnnnnnnnnnnnnnnnnnnnnnnnnnnnnnnnnnnnnnnnnnnnnnnnnnnnnnnnnnnnnnnnnnnnnnnnnnnnnnnnnnnnnnnnnnnnnnnnnnnnnnnnnnnnnnnnnnnnnnnnnnnnnnnnnnnnnnnnnnnnnnnnnnnnnnnnnnnnnnnnnnnnnnnnnnnnnnnnnnnnnnnnnnnnnnnnnnnnnnnnnnnnnnnnnnnnnnnnnnnnnnnnnnnnnnnnnnnnnnnnnnnnnnnnnnnnnnnnnnnnnnnnnnnnnnnnnnnnnnnnnnnnnnnnnnnnnnnnnnnnnnnnnnnnnnnnnnnnnnnnnnnnnnnnnnnnnnnnnnnnnnnnnnnnnnnnnnnnnnnnnnnnnnnnnnnnnnnnnnnnnnnnnnnnnnnnnnnnnnnnnnnnnnnnnnnnnnnnnnnnnnnnnnnnnnnnnnnnnnnnnnnnnnnnnnnnnnnnnnnnnnnnnnnnnnnnnnnnnnnnnnnnnnnnnnnnnnnnnnnnnnnnnnnnnnnnnnnnnnnnnnnnnnnnnnnnnnnnnnnnnnnnnnnnnnnnnnnnnnnnnnnnnnnnnnnnnnnnnnnnnnnnnnnnnnnnnnnnnnnnnnnnnnnnnnnnnnnnnnnnnnnnnnnnnnnnnnnnnnnnnnnnnnnnnnnnnnnnnnnnnnnnnnnnnnnnnnnnnnnnnnnnnnnnnnnnnnnnnnnnnnnnnnnnnnnnnnnnnnnnnnnnnnnnnnnnnnnnnnnnnnnnnnnnnnnnnnnnnnnnnnnnnnnnnnnnnnnnnnnnnnnnnnnnnnnnnnnnnnnnnnnnnnnnnnnnnnnnnnnnnnnnnnnnnnnnnnnnnnnnnnnnnnnnnnnnnnnnnnnnnnnnnnnnnnnnnnnnnnnnnnnnnnnnnnnnnnnnnnnnnnnnnnnnnnnnnnnnnnnnnnnnnnnnnnnnnnnnnnnnnnnnnnnnnnnnnnnnnnnnnnnnnnnnnnnnnnnnnnnnnnnnnnnnnnnnnnnnnnnnnnnnnnnnnnnnnnnnnnnnnnnnnnnnnnnnnnnnnnnnnnnnnnnnnnnnnnnnnnnnnnnnnnnnnnnnnnnnnnnnnnnnnnnnnnnnnnnnnnnnnnnnnnnnnnnnnnnnnnnnnnnnnnnnnnnnnnnnnnnnnnnnnnnnnnnnnnnnnnnnnnnnnnnnnnnnnnnnnnnnnnnnnnnnnnnnnnnnnnnnnnnnnnnnnnnnnnnnnnnnnnnnnnnnnnnnnnnnnnnnnnnnnnnnnnnnnnnnnnnnnnnnnnnnnnnnnnnnnnnnnnnnnnnnnnnnnnnnnnnnnnnnnnnnnnnnnnnnnnnnnnnnnnnnnnnnnnnnnnnnnnnnnnnnnnnnnnnnnnnnnnnnnnnnnnnnnnnnnnnnnnnnnnnnnnnnnnnnnnnnnnnnnnnnnnnnnnnnnnnnnnnnnnnnnnnnnnnnnnnnnnnnnnnnnnnnnnnnnnnnnnnnnnnnnnnnnnnnnnnnnnnnnnnnnnnnnnnnnnnnnnnnnnnnnnnnnnnnnnnnnnnnnnnnnnnnnnnnnnnnnnnnnnnnnnnnnnnnnnnnnnnnnnnnnnnnnnnnnnnnnnnnnnnnnnnnnnnnnnnnnnnnnnnnnnnnnnnnnnnnnnnnnnnnnnnnnnnnnnnnnnnnnnnnnnnnnnnnnnnnnnnnnnnnnnnnnnnnnnnnnnnnnnnnnnnnnnnnnnnnnnnnnnnnnnnnnnnnnnnnnnnnnnnnnnnnnnnnnnnnnnnnnnnnnnnnnnnnnnnnnnnnnnnnnnnnnnnnnnnnnnnnnnnnnnnnnnnnnnnnnnnnnnnnnnnnnnnnnnnnnnnnnnnnnnnnnnnnnnnnnnnnnnnnnnnnnnnnnnnnnnnnnnnnnnnnnnnnnnnnnnnnnnnnnnnnnnnnnnnnnnnnnnnnnnnnnnnnnnnnnnnnnnnnnnnnnnnnnnnnnnnnnnnnnnnnnnnnnnnnnnnnnnnnnnnnnnnnnnnnnnnnnnnnnnnnnnnnnnnnnnnnnnnnnnnnnnnnnnnnnnnnnnnnnnnnnnnnnnnnnnnnnnnnnnnnnnnnnnnnnnnnnnnnnnnnnnnnnnnnnnnnnnnnnnnnnnnnnnnnnnnnnnnnnnnnnnnnnnnnnnnnnnnnnnnnnnnnnnnnnnnnnnnnnnnnnnnnnnnnnnnnnnnnnnnnnnnnnnnnnnnnnnnnnnnnnnnnnnnnnnnnnnnnnnnnnnnnnnnnnnnnnnnnnnnnnnnnnnnnnnnnnnnnnnnnnnnnnnnnnnnnnnnnnnnnnnnnnnnnnnnnnnnnnnnnnnnnnnnnnnnnnnnnnnnnnnnnnnnnnnnnnnnnnnnnnnnnnnnnnnnnnnnnnnnnnnnnnnnnnnnnnnnnnnnnnnnnnnnnnnnnnnnnnnnnnnnnnnnnnnnnnnnnnnnnnnnnnnnnnnnnnnnnnnnnnnnnnnnnnnnnnnnnnnnnnnnnnnnnnnnnnnnnnnnnnnnnnnnnnnnnnnnnnnnnnnnnnnnnnnnnnnnnnnnnnnnnnnnnnnnnnnnnnnnnnnnnnnnnnnnnnnnnnnnnnnnnnnnnnnnnnnnnnnnnnnnnnnnnnnnnnnnnnnnnnnnnnnnnnnnnnnnnnnnnnnnnnnnnnnnnnnnnnnnnnnnnnnnnnnnnnnnnnnnnnnnnnnnnnnnnnnnnnnnnnnnnnnnnnnnnnnnnnnnnnnnnnnnnnnnnnnnnnnnnnnnnnnnnnnnnnnnnnnnnnnnnnnnnnnnnnnnnnnnnnnnnnnnnnnnnnnnnnnnnnnnnnnnnnnnnnnnnnnnnnnnnnnnnnnnnnnnnnnnnnnnnnnnnnnnnnnnnnnnnnnnnnnnnnnnnnnnnnnnnnnnnnnnnnnnnnnnnnnnnnnnnnnnnnnnnnnnnnnnnnnnnnnnnnnnnnnnnnnnnnnnnnnnnnnnnnnnnnnnnnnnnnnnnnnnnnnnnnnnnnnnnnnnnnnnnnnnnnnnnnnnnnnnnnnnnnnnnnnnnnnnnnnnnnnnnnnnnnnnnnnnnnnnnnnnnnnnnnnnnnnnnnnnnnnnnnnnnnnnnnnnnnnnnnnnnnnnnnnnnnnnnnnnnnnnnnnnnnnnnnnnnnnnnnnnnnnnnnnnnnnnnnnnnnnnnnnnnnnnnnnnnnnnnnnnnnnnnnnnnnnnnnnnnnnnnnnnnnnnnnnnnnnnnnnnnnnnnnnnnnnnnnnnnnnnnnnnnnnnnnnnnnnnnnnnnnnnnnnnnnnnnnnnnnnnnnnnnnnnnnnnnnnnnnnnnnnnnnnnnnnnnnnnnnnnnnnnnnnnnnnnnnnnnnnnnnnnnnnnnnnnnnnnnnnnnnnnnnnnnnnnnnnnnnnnnnnnnnnnnnnnnnnnnnnnnnnnnnnnnnnnnnnnnnnnnnnnnnnnnnnnnnnnnnnnnnnnnnnnnnnnnnnnnnnnnnnnnnnnnnnnnnnnnnnnnnnnnnnnnnnnnnnnnnnnnnnnnnnnnnnnnnnnnnnnnnnnnnnnnnnnnnnnnnnnnnnnnnnnnnnnnnnnnnnnnnnnnnnnnnnnnnnnnnnnnnnnnnnnnnnnnnnnnnnnnnnnnnnnnnnnnnnnnnnnnnnnnnnnnnnnnnnnnnnnnnnnnnnnnnnnnnnnnnnnnnnnnnnnnnnnnnnnnnnnnnnnnnnnnnnnnnnnnnnnnnnnnnnnnnnnnnnnnnnnnnnnnnnnnnnnnnnnnnnnnnnnnnnnnnnnnnnnnnnnnnnnnnnnnnnnnnnnnnnnnnnnnnnnnnnnnnnnnnnnnnnnnnnnnnnnnnnnnnnnnnnnnnnnnnnnnnnnnnnnnnnnnnnnnnnnnnnnnnnnnnnnnnnnnnnnnnnnnnnnnnnnnnnnnnnnnnnnnnnnnnnnnnnnnnnnnnnnnnnnnnnnnnnnnnnnnnnnnnnnnnnnnnnnnnnnnnnnnnnnnnnnnnnnnnnnnnnnnnnnnnnnnnnnnnnnnnnnnnnnnnnnnnnnnnnnnnnnnnnnnnnnnnnnnnnnnnnnnnnnnnnnnnnnnnnnnnnnnnnnnnnnnnnnnnnnnnnnnnnnnnnnnnnnnnnnnnnnnnnnnnnnnnnnnnnnnnnnnnnnnnnnnnnnnnnnnnnnnnnnnnnnnnnnnnaccaaaatccctccggtggtataaatgcctccgccgtccatgccggcggtgttggactcgaacgtggttgaagtgatggtggggcctgcgccgttgttgtacacaccgccgcccgacccggtcgcgttgttgaaccccaaataacaggaaatcaaccgggggccgcctccctcattataaacgccgccgccatcgcgcgccgtattgtacaggaacgtgcagttggtcaggcgatgggaggcggccttattgtaaatgcccccgcccatttccgatgcctgattgttgaaaaataccgtgttttctacaatcgccgaagcgccgagacaattgtgcatggcgccgcccaagaggccgtagttgccatagaagcggcagttggccacggaaactccgccgccatgattgtacatgccgccgccatatcccagactttcctctccgtccgcacgcccgccggtaatcgaaaacccgtcaagggtggcgcgattgtttccctcgataacatgataggccggaataccggggccgcggccgtttgaaccgtcaataatggtcgtgcgcactgcccagtcgcgctggttgcgttccgtctccgttcccgcgaatcccccgtacagatacacgcggcgctgggttatcatcaggctaccgttcggactgggacgggtttcgtcatagatcccttcggccacccagatttcgtcgtcccgtgccgccaaatccagcgcgggttggatggtttgaaaagccgtggcccaactcaagccatcttccgttccggacaaattatccctgtcaacgtaccatacccctgaaatagcaggaagggaacagagcattgtcagcacgaaaaaacggtctttttcataattcgtagatcctccctggcgcactaccccgctttgttttcatttaattaaacttccctcacatttgaattttacacttatcatagaaaaaagtcaaaaagttttttttgtattattaacttgagagtaccatgttctcgaagttgggaatgtaacgccgatttccaaatcggcttgttgaaacgcgacatgccgatttggaaatcggcgctacaaagcagccattttcaatttcaacacaagatctcgttgcctgatccgacatgaaattgcccggaaatgccaatcttcctggaaattctcatccttattgtctcgaatccgctgaaagaccgcgttggcgaataggtgttccttgtctgaaagggggccgatcccgtataagggttcaggcctattggaggaaacgggcgatgggacgcgtgaaggcgttttacgggaccgtggcggttctgggcggctttgtattgattacttactggggcatgatggttgtttggggcagcgggtcctggctgcatgggacgcgcagtcttcgtctcggccccatttatgtgccgatgttgctgttggggctggcgacgttgattgtcctgccggctttcctgttgagcgtgtgcaggatcatgcagactcgcggccgtttccctcgatggaccgggcttccgggcgccagttgcgcgatggcgtggcaggcgttgttgcttgcggcgctggtgctggttttcgacacgccatggtccggtttgtttcgcacggattgggccggggtttttcgcaatgcgggcaagccggcggttctcgaattgggcgacgaccacctgaattatcctgagctaccgcttcagcccgtggattattatgcgtggtccgtttacgatctcgacggacgggaagtgccgatggcgtcgttccgcggcaaaacgcttttcctgaatttctgggcgacgtggtgcatgccgtgccgttccgaaatgcccagcgtgcagcgtctttacgacgcggcgaaggataagggcgtggcgtttgcgtttgtttcgcgggaagaggcggagactgtccgcacgtttatgaaagcggaagggtacacgctgccggtgtatctggcgaaagaacgccccccggcgttcatggccattaccgggatccccgcaacgatgatctttgcccccgacggccaactggcatttcgccacacgggcgccgcggcgtgggacacacccaagactcttgagtttctcgcgaaactaaccggcgttccgtgaaatggacagtcccgtgaatgaaacgaaaccgcttggcgggggtgatatccggcgattgcgcgccgattttccgctgctgaccgattccggcgttccggtcatctatctggacaatgctgcgacgacccagaagccgcgcgccgtcattgatgcgcttacccggttctatgcgctacagaacgcgccggttcatcgcggcatttaccggcttggcgatcaggcctcggccttgtatgaacaggcgcggagccgggtgtcgcggttcattggagccggaagcagcagcgagatcgtgttcacgcgcggaacgacggaaagcatcaatctcgttgcgcagaccttcggacgtcggagactcgggcccggggatgaaattctcgtgaccgaaatggaacaccatgcaaatatcgtcccttggcaaatcgtctgccgggaacatggcgcgatcctgcgatggatacccgcgggccgggcgtgcgaagtgcgggccgatgaattggcgcggcgcctgggtccgcgcactcgcctgctggccgtcgtccatgtttccaatgtgaccggaaccgtcaatcccatcggctccctcatcgaaatcgcccatgcgaaaggggttcccgtgttggtggacggcgcccaagcggccggccatttgccggttgatgtgaccgcgctgggctgcgatttctatgcgttttccggccacaagatgctggggccgatgggcgtcgggatcctgtacggacgtggggatctgttgcgagacatgcccccgtggcaggggggcggcggcgcgattgcgcacgttggccgcgattcgtccaccttccgcgaaccgccggcgaaattcgaggccggcacgccgcccgtggcggaggccatcgccttggccgaggccatcgaatacatcgaacgggccgggcgcgcgcgcctcgcggcctatgagcaatccctgattcatcaggtcgagcgcggtctgaaagccattccgggcgtccggattcatggcgatcccgccgaacgggccgcggcggtttctttctctttggagggtgtgcatccgcatgacgtcagccagatgctcgatgaagacggtatcgccgtgcgcgcgggcaatctgtgcgcacagccgttgatggatgcgctgggcgttccaggagtcgttcgaatagcgcccgccttttacaacacaccggaagaaattgacttgacgatgcaagcgctggaccgcgtgcgcgggatttttcgatgaacctatacgaccaagtcctgctcgaccataaccggaatccgcggaatttccgccccatgcccggcgccacgcattccggcgaggcggataatccgctgtgcggcgatcgtatcgccgtttttctgcgcgtcgaggacggcgtcgtggccgaggcaagttttcagggcaaggcgtgcgccgtggccacggcatcggcctcgctcatgaccgtcgccgtgcagggggaggttgtggaggaagcgaaaaaaatgtgtctttccgtgaaggcttttctcaatgaccgggcggaaccggcgccgaccgcttcccttgccatgcttgaacgggtccgcgattatcctgttcgcatcggatgtgccgaattgccgtggacagcggttgccgccgcgttggcgacgggggaccgacagccctaaagcggatcgattggcaattcggggcaatctttttcatcagatggtattgacaatatgagaaatcagcgatatagtagtcgcgacaagtgatagcttgtgcagtttggcggcgaatagagaagtttgcgcgtcggtaaatgcgacaaaaacatgagaaaggagatcgttggggacgtttacccaagcaggtgatggccgaagtgtaagggcagttttccgaactactggcgaagtccaacacaaagggttgtcacatgaaaaagcaaggttttacgctcatcgaattgctggttgtcatcgccatcattggcatcttggcggcaatactgttgcccgcgcttgcccgagcccgtgaatcagcacgccgttcgagttgccagaacaacctgaaacagcttggcgtggtgtacaagatgtacgcgaacgaaaaccgcgcccagaaatttcccatgatggccgcccggttgtcgtatcaggtccagaatgcggaggtcatctacagttcgtacaacgaatgcggatacaacaatccgtatctgccgccgacggcgggcggcgacgcggaattcgtgccggacgggaagtccatttatcccgaatacctgacggacgtgaacatcctgatttgtccgtcggattcccaggcgaaaaaggcccagcagtactggtttatcaacggcaaggtggatccgtgcgcgattacggccgaatcgtacatgtacgtgaattgggccctgacaggacgcgacggcgaaggatatttgaaatccggcgcggatcccaatccgggcaatatgcccttgggcgtggcggcgattggcacgtatctggatcttggcttcatcaccaaggtcaacacgcttctcacgcagcagtcggccatcgatccccccggctcgcaaaacctgtatgacaccgacttcaagttcacgaaccaggacggaaaagaaatcaccatctatcagatgcgggagggtatcgagcggtttttcatcaccgacatcaacaatcccggcgcaacgacgcgcgcgcaaagcgtcattcccatcgaatgggatcttgccagcacgaccgccgatgagttcaaccacgtgcccggcggatcaaacgtcatgtttctggacggacacgtcgagttcatcaagtatccgggcgaatttccgattacgcaggcctttgccgtcatgacgtccatgttctagcgtcgtgagtcgccgatgcaagggacaaacgaccacagcaagtgaacaaaagggactgacccgcttttcgggagtttgatcagcggatcagtctttccttttttcgcggcctttctttcatccttgcccggcttgccgaaaaagaactcgatgcgaagatgtgggaagaggcgaagcattgcacccgcatcccgcattcaagtttgaatcgcttgcatcgaacatgtaggtctttttttcaatctctgggtatctgcgtcatctgtggaagatcggaagacggtccgtggatgccgaaaaaaggaagtgggattgtctttgccccaatcgcctgcaaagaacttgacgcaaagggctggaaaacgggactcctgaaaaaagcgcggttattccggtttctcttccacggccgggtccgggacgaaaaaggccagggaagcgaaactgatggaggttcgggtgtcgcccgttttgcgcgcggaaatgtcatgggccagcaggcggccggttgcggatttcggcacgatccgcagcaggatggcgatggcgtttttcgcgcagattggattgcgggtatcgtcgagatagcggacaaagccccggaaatcccgcgtgagaatgaggcggaacgcctccttgtccagtgcttcgatggattcgatgatgttttccttgaaagggcggtaactgaagttgttgccgtaatgcgtaaagtcggaactgacgaccagcagggtccgatcatccatcagggggtgaagcgatttcgcgacggcttcgatcgcgtccacgtcggtcttcttctggtaatcaaggaaatcgccgactaggatggggatcaagcggaacgttccaaggcgttcctggaggaagggcaacgtcgcctcgattgaatattcgatttcgtggacttgcacgcgggacgaatcggcctggtagttgacgctacgcacttcgatgagcggcgaaagatccaactgccggatgctttggccatccaacggaatgctgcccaagggggtttggtaaaactcgaccgacggaatcgagcaaccgcggaaggaactccggtgcgacgcccccagcacgataacgcgatcgtattgtcccggctgaagcattcccagcgcggcgcccgcaatggcgccggatgtctggtacggcgcatgcggcacgatgcatgccgccattcgttcgcccgccgggggccgcgcgtctttcatgcactccttcagggccgattccagcgctgctttgtcggctggataccagacacccgcggcgaccggcagggcaaaacgcgttacagcttcggacaagccgctccacagaagcgtcaggcagatgccgtaaaaaatgtggcgccgcatcgcgcgttgtctcccgttgtcggaacgtatctgaaaatgtatcgaatcggctgcaggattgtccatgtgaatggttgaacaaccgagcggccgtttagggtatggttcgatggttcattgctgttcaggcgcaatgcttgggcatgggcagggctttgccggccttggatgatttttcggcggtggcgatcaccgcgatgacgcgccgggcgctttcgggggtcacgacaagcggctcgccgagcatgagatgatcggcaatgttgcgataataggcgtgccagtcggactcgaagtacttgagcgtcgcctcggatcgcacgccgtcgcggtaactgatgacagtaaacttgtcgtcatcgtagtcgaggatgccgcctttcgtacccaggatgcgccatcgcggtttgccggccgcggcgatttgcgacaattcgatgaaggcgctgcatccgttcgagaagcgcaccgtggccgagcaatggtcctcgttggtgacatcgtgccagacgcgtttttcctggaaatagccggagacctcgacgatttgcgccggaacgagtccgagggtccaatcaacgacgtgtgcgccccaatcgtagaacgcgccgccgctgatctttttttcggaccgccaccagtaactcggatggccgtatccgcccatgcaggcctcgatatggaaaacctcgccgatcaggccgctggcgatcgcgtgtttgatggccatgtagtcgccgtcccagcggcggttgtgaaagacgctcaacatgcgcctgttcctgcgggcggcggcgatcatcgcatcggcttcttcgatggtgatgcagaagggtttctcggtgatcgcatggacgccggcattcaggcattcgatgacccgtttggcgtgatcgttgtgctcggtgatgaccgtggcgagttccacgcctgatttttcaagcatttttcgtgaggaggcgtaggtcggaatgccgggaaagtcctcctcggcctcaatccggcgctgttcgacaaggtcgcatgcggccacaatttcaaaaccggcggcgcgcatgctttcgagatgaagtcggcccatcttgaacgattttccgtatccgatgacgcccgccttcatggatttgatctctttgcgaccaaaggtccagtccacgcccctccggatcattttctggacttcggggtgattcagcgagcgttcgtcgtggcccagcgcgaggaaaaagacccggcctttgccgtgggtccgtgtgtatgccatgggctgcggcttgccccgccacatggccgttgcaaggacttcgcaggaatccgcctggaatttgtcgagcagatacagttcgtccgtcacgcggaaaggttgtatccgccgcgtgatcatcgaatccgccgctgtcggcgtcacgggaaactcgaattgcgcatcgtgcccggcaaacgtcgagccgagcatgtccacataagccgcatttttcgtgaacgaggccgccgcgccatgcaatccgatgaatgcgccgccattcttcacgaaattgacaagcccattttcctgatctttccgtagttccccgccgtcggcataaacgattgccgcatcaaaacgcccgatatttcccgcgcgcagcgtgtttaggtcgtgcgtcggtgtgaccagataccgcccggtgtcttccagaagtttttttacaatttcgccgcaccgatcgaggggatgatattgtccccccagtaccatgaggatttttttcatcgtcgccattccgcgtcctttctctgctataattacacggtgtcaaagtgcattgagtgcgattttacgtacataacggaggaataacaaatcgccgcgggcggggaggcaatgacgaaaatggatggggaggcgaaagtggttgcctgtgccgcatgcggtcatgtcatgaaaattccgccccagtatgccgatacgccggggcggtgtggccggtgtggcgccacggtaaacgatcgcgttttgatacccgccattgatctgtccgatctggggccgccatcccccaaaaagaagacatctgcggccgtccagaattcagaaaccttttcgactactgttcgccgggcgttgctggcggggttggccggtgctttggttggggggggtgtcgtaggcgctttctttactattcgtcgcacggaggggcaggccatcacgccgggcactcttttcgcaaacgccaacacggggctcgtgctcggtttcacgatatgttcgctgtttttctttgtcaagcatttgaattggggaccgttcagggcggccggggctggaatgctcagttgtgtcgtgatcggctccgtcatgtttctcttggaagcccgtttggttgccccgccggacataggtttgtttgcccaaatcgcgatggccgccatggcgggaggggtcgcggggttgatcatgggggccaaattgaacaacgaagactgaccgtatgccggagacctcggccgccatcatgttccaattcataaggagatggcggatcacacattgaatctccgccattgcagccgttttttggggcctatcccatcgcgtgtgcgcgggccgctggggttcgtttttttgaatcatgttattagggaggcatatacttttttcgatcgttgagggaacgggaggtgagcgatgcaaagagtgagtgtgttggcttttttgctgttatggtgtggggttgctttttcggtcgagttcgtgtttgaagaacaacccggatcgtgcctgttgaaaggcgatggaaaaacgtggatggccacgatgatggccgctttcgatccggcaaaacgcgatgagacatacaaagtctacacacatatccacgattttcagggcatcgccccgattaccaagggaccgggcgggaaatatccgcatcatcgcggtatgttcattggctggaaggatgtcgtggccaacggtctccacttcaatttgtgggaaatggcgaatacctcgcagcgccatgtggcgtggctggaacgcaaaggagggctggactccgcgcggcaatcggagcgcatccactggtgcgatccggagggaaaagtgcttatcgaggagacgcggacccttgccgtccggcccggtcccggcggcgtgcgccttttcgattttcagtctgtgcttttggccccgtccggcgacatccagttgcgcggggatcttcagcacgccggcatgcaggtccgcatggcgcaagaagtggcggaccatgaagattcgacgaaatacattttgcccgaaggcgcccaggaactgccggacgacaaggtcgtgggtgcatggtgggtatgttgcagtccggttgtgcgcgatgtgcgctattgggtcgttcatatgacaccgtccggtcatccgttgggtcagccggtgtattcgattcgccggtatgcgcgattcggtgcgttttttgagccggacttgcaggccggaaagccatcggcattctcgtttcgcattgcggtatcggacaaggaactggaccgcgccgcctgcgaatcgctgtatgccgattattgcaagcccgccccctgattcgattcggagacttacgcgtgcgcaagttggcggtcacattctacggcatcattcacggatcgttgatcaaggaatgcgccgtcgtgccggaacagcgcgcggaactgtgcatggaaggcgacccgtggctggcgacggtttcgacgccctacgatccctccgcccattcggatacctgcaaagtctttacgcatttgtatagtccttgcgacgggctgccgattacaaaaggggcgggcggtttcgattcgcatcagcgtggcctgcatatcggctggcgacgcacggaagtggaagggcggaacttcgacacgtggcatatgacggattgttcccagcgccatggcggatggctggctgaaccggggcatgtggccgcccacgcgttcatcgtggattggtgcgacgcgggggggcggcctttcctgcgcgagtttcggtccgtgttgtgccgccgcgcgcgatatggcgcgcgcatgttcgatttgcagtcgcggctggccgccgtggaccgtcctgtcgccctgcgcggggacccgcaccatgccggtgtccagattcgcctggcgaatgaagtttgccggcggccgtggggcacccggttcgtgctgccgggcaatgcacaacgccggcgcaacgatgtcgtgcgcgatgcgctctgggtttgctgcctttccactattcgagacaagcgccatgccgttttgcacatgacccatcccgccaatccgggtctcgaacatctagtctatgggatacgcgcctatgggcgtttcggggcctttttcgatgcggatttgaagcccgggtttcccatgcgcatgcgtttccgaatcctgtggaccgagggcgaattggacagagatgaatgcgaggctctctatcgcgagtacacctcatccttctgaacattacaagcccggcaaggcaatgataattcccgccttgtgggcaggatgaacgatggggaccccatggacttgattcggcgcctgatatcttatcgtctccgccgcggtccacggcgtcgctggtgtggacgtttacggtgggaactgtcgcgctggggttcgcgggggctttcgggaacccggatcgtctcggcgggaatgtaacgggcgagtttgtcttcggtcgagttgtaacagtcgcagcggggacaccttgaaagccgttcggcctgctcgtcaaggtagatatatccgcaaaacgtgcaccgccagagaaactgtttggttaggaccgcctgtattctccgggaaacgatttccgtatgcgtccagatgacaatggccagcgcgcacagcagggcgctgtaaaaaacgagcgcggaggtaagcgaaatctggatcatgatgatggcgcccctgctttttcgtgatcatccacggtctttgccgatggccgtttgccgttcccgtcttcctttccgggtgtcgccagcgtgaagagtccggcttggggcgtcatgggtatgtgccgcattgcttccctcatgatccgccctcgacctcgacgaataacgtgccgcgttgcaagtggacgttttcaatcggttcgaattgaaaacggggaagcacagtttggagttccgagacgacgccggtggcgtcttcgatggaagtttggacgttttccacttttcctttttcgttgacgctgaaaataatcgaaatgggagccgtaagccgggccggttccaggcgccacagggaagcgatcggaggaacaaacagggcgcggcgatcccgtggatcggacatccattcgacgaacagcgcaattccgggcgccggacattccaaccgcacgcggttgggcgttgtttgatcggttcggggccatgcccattgcgagagcgcggggccgattccgcgcaattcgctggtgaaccgcgcccatgaatcgggcgtgtcggcctcgcgcgtctcgaagagttcgctgaactgggaacgaatcttaagactttcttccgggctgcgcaagaccggcagggacgacgcgagccggggtagttcgacgggtggcagcaagtcggtatccgattcatcggccaacgcgagcagattcgggtaccgatcggtcggcatcggctgatcgctgtccggggttgggggttggacaaggccgatggtaaattgccgtgtttcgggttttggcagaagaatcacgatcgaaaaaaccgataccatcgaaagatgaaacaggaccgagacggcgagtgctatgttaaaagcggatgcgcgcggcatgacgcgttaccgttgcggcggcccggcgggacgggcggcaatcgtgcaatggcggatgccggcgtcgttgaccagtccgagcacttcgatgagccgcgcgctttcgatgcgggcatcgggccggattacgacggtgatgtccgggcgttgcgcatgcgcctctgcgagaatgcgcgaaacttcgtcgaatccgcccacctgctcctcattcacaaaaatcccgccctcatgcgaaagcgtgattgacaagtctttttcctcgtatgcggacggcccggcggcctcggcggtcttgatggtcacggggaactgcgtggcgaaggttgttcccagcatgaagaaaatcaacaggttcagaacgacgtccatgagggccgtcatatcgatcgtggggcggatcctgggcttccgttccttgcggaaccgtatgaggcgtttatccgccgccgcttgcatcatggggcctatccgtcctcgccggttcggtgcattgtcatcaattcaacggcttccgatgcgccgacttccatttcaacgatcatggtgtccacgcgcgtaacgaaataattgtacgccaccatggcgggaatgcccacaacaagccccgcaaacgtcgtgatcagggcatttccaatgccttcggcgagatcggaagggtttaccatgcctcggcggttctcgatggccgcgaagcatttgatcatcccttggaccgtacccagcaggccgagcaacggcgcgacttgcgcgcaggttcccagtccggcgagataacgttcgagacggggtatttccagccgtcccgcgtcttcaatggcctcgcggatatcggttttggtgcggttgtgcttgaccaggcccgcttttacgatgcgcgcgatgggcgcacgggtttcgtcgcaggtttgcaacgcctcctggacgcgatcctgccgtagcgcggcgcggatcagatccatgaattcccgcgtgacgactgtgatgcggcgcagcgtgtagaagcgctcgatcgcgatggccaacgcgacgatcgagcaaacgaaaatcggccacatcaccacgccgcccctgccgatcaattcgtatgcggtgttgtatcctgccggtaacatggcttcaagcctccggtaagtctaaagcgtgacgagcgtgcccacgcccttgtccgtaaaaatttcaagcagaagcgcgtgtggaacgcgtccgtcaatgatgtgggtgcgcgatacgccgtgatccagcgccttgatgcatgcgtccactttcggaatcatgccgcccgcgatgattccctcgcgcgtcaactgggccacctcgccgtgccgcagatggtgaatcagcgaatccgggtcgtccttgtcgcgcagcacacccggcgtgtccgtcagaaagacaagtttttcggcctgaagcgccgcggccacttcgcccgcggcggtgtccgcattgatgttccacgtgcccccctccgcgtctgtcgcgagtggggcgacgacgggaatcatgcctgccgcgcagagcacgttgaggatgcgggcatgcacattgacaatctggccgacatgtccgatatcggcgccgtcctcgaactcgatctttcgcgcgtgcagcagattcgcatccttgccggaaaggccgacggcctgcccgccggcttggttgagcagcgtgacgatgtccttgttgaccgttcctgccaggatcatttccacgacttcaatggcggcgtcgtcggtgacacggcgcccctgatggaacttggattcgatggccagccgtttcaacatgccgttgatggccggtccgccgccgtgtacgacgatcggattcatgccgacatatttcatcaacacgacatcttccgccgtgctcttgcggatgcggggatccgtcatggcgctgccgccgtacttgataacgaccgtcttgccctcgaacttccgaatgtacggcaacgcctcgaccaacaccgatgctttttgtataaccgcttccatttttctccttctgtcgtgcccgcaagcgcctcgggcggcaactacgtcctgtaatctgcattgatttccacgtagttgtggctcaaatccgatgtccagaatacggtttttcccggtccatttccgacttccacgcgaatgcggaattccggcttgcgcatgcaggccgccgcgtcttcttccttgtattcggccggcatcccgttgcgcatgacttggatatcgtcaatccacatgcacagtttctccgggatgaacgatgcgccggaatagcctgcggcgcaggcgaaacgcccccagttggggtcttgcccaaaaaaggccgtcttgcacagttgggatgtcgcgatggcgcgcgcgatgatctttgcgtcgttgtcggaagaggcgccattcacggcaatttcgacgaattttgtcgcaccttccccgtcacgtaccagcgattgggccatgtgaatgcacacgtcgcgcaatgctgcggcaaagcgcccgaagtcgtccgtgcccggctgtagaaccggcgtgcccgatgccccgttcgccaaacagatgaccgagtcgcttgtgctcatgtcgttgtccacgcatatttgattgaaggatacctcgacggattcgcgcagaatcttggcgagcggctccggttcgatggcggcatccgtggtcaacaggcagaacatggtggccatgttgggcgcaatcatgcccgcgcccttcgcgatggcgcccagccgcaccgtgccgcccgaaagcgctagttcgacggctgtttctttcgggacggtatccgtggtcatgatggcggcggcggcatccgcgctgccgtccgcgcgcagcgatgccaggcattcccgcacgccgttcgcgatacggtccatcggcaacgggaggccaatgactcccgtgctcaacacgcagatctcctcggatcgtgcgccgatgccttcggcaaccatttttgccgttgcctgggcatcggcatagccgcgatcgcccgtgcaggcgtttgcgttgccgctgttcgcgaaaatcgcccgcgcgacgccgcgcgtgcatacgctttcactccagcgcaccggaggcgccttgaataggttgcgcgtgaatgtgccggccgctgtcgccaatcggtcgctgacgatgagcgcgcaatcctttttggtcgaattcggcttgatggccgcagcgacgcctgttgcttggaagccttttgccgccgtcacgccgcccgggatggtcgtcatggcatcatccccgccagtttaaggccggtcgtctccggcagcccgaacatgacattcatgcactgcaccgccatgcctgccgtgccgccgacgaggttgtctatggcgctgacgataatcaggtttttggtgcgtttgtccacgacccaaccgatatcgcagaaattcgagccacgcacataacggatttccgccggtttgccttcgccgagcacgcgcacgaacggctcgtccgcgtagcgttcatagcaggccgccacatcgaagatttccttgagatgcacggttatcgtgctgagaattccgcgtgtgtaggcgcctacgtgcggcgtgaactgcaccgtaaaggccttcagcagctcctgttcgatttccggcgtatgctggtgatttccgatacggtaggccttgacgttttcattcatttccgggaagtggaaagcctccgccacggcccggcccgcgcccgaaagacccgaaatcgcgtccacaacgattggtacatccttgtcaatgggagcgtccacgagcggtcgcatcggcaagatcacgcttgcagggtagcaaccaggcgccgccaccaattgggcgtctcgcaattgatcgcgataatagggaacaaggccgtacaccgcttcccgcacccattggcccgccgtgtgctcgaccttgtagtattcggagtagagacgcagatccttgatgcggaagtccggacccatgtccaccgtgcgaacgcccgcctcgcgcaatgccgcgcccaacgccatggacttcgtgcccggcaccgcgatgaacaccacgtcgcacttcttcgccaacgccgccgggtcgaatttttcgcataccacatccacgagtttaccaaaggccggcaacaattcctggatggattttcctgcctcgacttccgccgcggccaccagtttcgcctcgggatgcaaattcagcaggcgtatcaattcacgcccgccgtaaccaatggcgcctacaagacctacacgtatcatgaaatacacctccgtgggatggattggaaacagccggattatagtccgctgtcggcagggcaatcaaagaaagctcacacattcgacgaattttctactgcagcagccacgcgacaccggcgccgcccaggatgacccaaggcaccttggcgcgcaggagcaaggccgcaaacgccgccgttccgactgcggccaacgatggattccagggcacttccatgccgagcatcgcggtggtggcaagaaggaggccgacgaaggatgccacggctccacgaagcacgcaccggactgcgggacggcggcgcaggcggtggaattccggggccagcgccagcagcaccagaaacgagggaaggaagatccccatggtcgccgcgcaggccccggccagcccttcgcgcatgtagcccacgaatgtggcggtgatgatgatcggtccgggcgtgacttggcccagtgcgatgccgtccatgaatgtccgcgcgtccagccaatgccgggcatccaccacctcgtgcagcatgatggggagggcggcgtatcctccgccgaaggcaaacaggtcaatccgcatcatcgtgaaggccagattgaaaagcgagcggtccacgaagaaaagcaccaccatgccggccaacgctgcggacacgacaagcgcggccgcccgccatgcgtttctccgttgcgtaaagggcgcgggcgatcgcggcgattcttcgtcgcccacacgccggtaaagccaaaatccggccaaggccgcgacggggatggcgatatacggaacgccgccaagtccgagatagatcgcgacactgaaggccagcagtacgtcctgccgatacttcacaaattcccggccgaaggaccacgccgcatgcgccaccaaggccacgaccacagcctgcaatccgttgaacattgcaagaatagacggcaaattgtgtgtccggctgtacacggcggacagggcgagcatgagtagaaacgccggcagtccaaaacccacaaaggccgccagcgccccgcgaatgccgccgatgcgcaatcccaaataccccgccatctgcattcccgtggcgccgggaatcgcctggcacagtccgatgccgtcgtcgaatgcctcggcccttacccagccgcgactccgcacgagatcttcgcgtagatgaacgatgatggccggtccgccgaacgccgagcacccgagaatcaaaaaggtccggaatatttgccacaggtttggattcggcatgggtcgaatcggttgctggtttgtttgcatgtcctggatgatatcatttttcccgcatccaattttggtattgccgggtagggacacctctgtcctgtactcaatccgctcgtatctgcgtcatccgcggaaggccatgcggtcaaccgaggacgcggctattcgtagatgctgaaaagatgaatggggaatcaacgcaagcccgatttcagccagccgcttgtcacgcctcgacggtttgccgtttggggagacgcaccacaaatcgcgtgttcgaggacgcggcgtccaagaacaagtcgccgtggtggttttcgaccatccggcgcgaaatgctcaaaccaagaccgatgccgccgatggtctgtttcgtggtgaagaaggggacaaaggccatttcctgaagatccctgcccaagccgtgtccactgtcggttatggcaaatcgaatagtcgtcccttcatcttcgacgtcgagccgtatccatttttccggcaattctttgacggcgtcgtaggcattgttgatcaggttgagcagcacttggcccaattgggcagagcggcattcaatatggagttcattcggtatgggcgacaccgtcagtgtgatgccggcgtctctacagcgcgccatgcacacttccagtgtttctgtgacgatggtggcgaccgattcccgcacgaatgcgtcggacgagccgtccctggacaaattccgcagtccttggacaatatgttgaacgcgcttgacattgcgcacgatggtcttggtcacgtttgcccggtattcgtttgaaaggcggggatcgtcgagacttcgttcgagttgttcggcgccgaccgaaataatggccatgggattgtttatctcgtgcgcgatgccgcttgccatcgtgcccaaggccgacaggcgcgccgcgttcagcatgagcaactgctgttcgatgattaggcgctgcgcctttacgcgttcggtgatgtcgtttccgatgcaaaggatttcttttatgcggccgttttcgtcgcggatcggccggttggtccacgatatccagacgatgtccccgtttttccggcagttttcgttttcattgcacagatactgttccgggtgttccccgatgccctttatcattgcctcgtgggcgcgcccgtcggaatcttccgggcgcaggatggttccgatgacattgcgtccgatgatttcctcctcggtgtacccgaaaaattcctgcgcgaaatgattgaagaaaaggatgttgccgttcacgtccatgcgcatgatgacgctgttggcgctctcgaccagttcgcggtatttcgcctcgctttcgcgaagggcctcctcggcttttttgcggcgatcaatatcgcgtgtgatgccctgaaatccgagcaatttgccttccgaatcgaacaggggcgccgacaccgtttcggtccaaatcaaggttccgtcctttcggatttgctccagttcataggtcgcgcttcccggattgattccctgttccatgagtttcaaacgctcgctgaattgcgccttgaacgaggcaagcgaccgcggggttataaattccaaaacggatcgcccaatgacttcttccgctttgtatccccgctgccgttcgtccgccgggctgacatacgccgcgcgcagatcgggtgtcaactgccaaaaaacatcgtccacgctttctatcatgaaccggagggattcctcgctttctttcagcgcctcctcggcctgcttgcgttccgtgatgtcgcggcccaccgactgggtttcgatcaggcgtcccgttttatcgaagaagccccggttgacaaactgcatccagcggatttcccccgtgccggcatagacacggttttcgataacaacgacggggttgtccggcgacatctttccgagttgctcttcgatgatcggacggtcatcctcatgcgccaggggttgccagggtttttcaatcagatcgtttcttgttttattgaaaaagcggcaaaaaacgtcgttcacaaacacgaatgtgccatcgggccggaaccggctgatgatttccgtctgatcctccaagacagtccggtagcgttgctcgctgtcgcgcaaagccgtttcgatgaggcggcgttcggcgatttcttgttccaattgccggttgatccgcatcagttcggcggtgcgttcggccacgcgattttcaagttgtgctcgcgtctgctcaagctcctcgaacgctttccgtttttcctccatctggacacggagcgtttcctgttcgacttggagccgttgcttggcccggtgggtttcatacactccccagaagaggccgccgatgaacaatacaatgccggtgctcatgagcggttccttgaccagatggaacggcctcacgaccggacgcacattgccgccgaaagatgagatgccatccatgacattgatgatctggccggccaagataagggcgatgccgatggccgccagaaaagtgatcggccgtacggcatacacgacggacaagacaaacgtggtcccaatgcccaacagaagtagactgaaaaaagtaatggtatcggcgataaaaaaactataccagccttggtaaaagcccacacggcccagtaaatgaagggaaagaaccagcgacagtgaaatgacgacataccacgcgacgcgcggcggcaaatcatattttgtcgccggagatgccccttgatcggcttccgccttctccggttcgttcccgtcacgcctcatgaaatacccctgccctgttcgggccgttgctccctgctcctacctttcccgtatgccggtttcattgtactactttctcgccaaaattgaaaggcctctgtttgaaccaccgcgtaaagcgtcgtagactatattccgccaagtgcgagaggagaagcgccgatgtcggaaacgaagaagtttcgcgtgggggttatcggggtgggttcgattgcgcaggcgtgccacctgccgggttatctcaaagatgatcgggcgcaattggtggctttcgccgaccccgaaccggagcgccacaaggagatggcgctgtcctatggcgagatgcggggctatgcgcattaccgcgacatgcttgcccgggaaaaactcgatgtcgtcagcgtgtgcacgccgaacaagtatcatgccgaagccgtaatcgccgcgctggaggcgaaatgccatgtcttgtgcgaaaagcccatttcaacgacgctgcaagaggccgacctgatgatcgccgccgcgagaaaagtccggcgcaaactgatgattggcttcacgcaccggcttttcaatggcccgaagaaatgcaaggaactactcgaggagaagacgctgggaaaaccgttcatgatccgcgtgcggtttgcgcatggcgggccgtttcccggctgggccaagagtgattggttttaccagaagaatctggcggcaggcggcgcgatgctggacatgggcattcatgcgattgatttatgcctgtggcttttcggcccgatcgtggccgtaagcgccaaggcggcgacgctcgtcaagaaaatcgaagtggatgacaatgcgttgttgctgctcgaattcaaaagcggcgcgctcggatacatcgaagtgggctggaccagccgtcccggattcagcggccttgaaatctacgggaccgagggatccatcatctgcgactacacgcggggcgtgtatctggtggggggcaaggcatcggcggggcgcgacggcaaacacgaatggaaaacgctggacaaatcgcccacggaagggggatggtccacggagatgggctactggctcgatgtggtcacgggggtggaaaaactgaccatggacggcagggccggacgggatgcgttggaagtggcgctggcggcctacaagtcgagccagaccgccaagcgcgtcaccatcgaataagccgcctgcaacctttcgcgcggcgcgggtatatcattgagaaggagggttgccatgattcgcgggctatttgtttcgattggcctttccgtgctggttcttgttccggatactgcgttggcgcaacgcgagccaagggctttccgaaccatcaacacggatcaatacgaggtggccgttcacaagaatggcctgattgacattcgggtgaaccggatcgaaaccattgccaccggtctgtatccgatgatctggattgagggggaggccgcgccgaaaccttttcccgttgatgcgcgatacagcaaccgcgctcccgtgaacaaccgccttggagaaggacaggggatgtggttcaagaaggggacgctggattggattgtggagacgtaccccacaaaacctttcatgacgattcaagtggcgttcgaaaacacaaccaaaaagcccgtgacgatcaaggcgctgattccatgggcgcttggaggcgagaaaaagggttcgctcaatctggggttgggttccggcgggtccgttattcttgaaaacggccgccatctgggtttgaccgacgaagttccccaagtcgtcgccgggaagacgcaatgtctaagcaattgcacggccttcaatccgaccagcggattgtcgttgacggcgggttttctgaccatgcggcatgcgtacggacgaatcatgcttgaattggatgacgatccgacgagggccgtcatgcgcgccgactgtatatttgatccgccgatcgaggttccgcccggaaagcgcctcgaatcggagattttttatgtggcccttactgaacgaaaccccttcgacgggttggagcatttcgggcaggccgtcggcgcgttcaacgatgccggcccgcaaggtttccggttgccgcacggttgggattcatggaacaccgccctcaagagcgacatcaacgaatcgaacgttttggcggcgttggatgtgttcgatcgcgatttgaaacgttacggttggacgcattttgcgattgggggcggttggcagcaggccacgggaacctgggaaccggattccgcgaagtttccgcatggcatgaaatggctggccgaccagatccattcgcgaaaaatgacggccggcctttggttggatccgtttaccgcccatgtaaacagcgccgttgcgcgggaacatccggattggttgcgccaaccggccgaggcgtaccgttccatgctggacccggatgatcgcatcatagatgtgacaatccccgaggcgtacgcgtgggtgcgggatctggctgtacgcgtcgggaacgattggggattcgacacgttgcagcagggcgattttgcatgccggttgctgtatgcggatcggtacgccgcggtgggtgttacgcgcgtggatgtgtttcggatgggcgtgcaagccttgcgcgaagggctaggcggggaatcgttgattacctctttttccccggcgcaggtcacggcgccggtttggcgtcgggagacaggccggaaaccttggggatgtgtcgaggcgatgacgaacgccgcccggcgctattattttgcgccgcattgttggatagccgacacggactgttcctattttgggattgattccacacgggaacggtggagtgtgggccatagacctcccttgtccgccgaacaggcgcaggcatggctgacggccgccgccctgaccggcggcgtgatcaaaatgggcgattggcctccggacctcgacgccggacagcgcgcccttttgacacggcttctgcccaccattggccgctctgcgcgccctgtcgatctctttgaaggcaaaacgcctgcgatttggtcgcttccgattcaatgcgccgtgggatcatggcatgtcgtcgccgtattcaactggaacgatgccgcccctgccaagattcccctcgatttcacaaacctgggtctcaatttcaaccgctactataccgtctatgatttctggcgcgacaagttctatggcctcgccaaggggaggctgatgctcgacatgccgccgggcagcgtgcggctgctgggtctgcgagcctatgagggccgaccgatgtttctcgccacggatcggcatttcacgcaaggggccaccgatttcacccgcctcgaatggaatgcgcaaacccgcctcttgtcgggaacatttaccggcattgcggagacggattataacctgcgtatttttgtgccggacgaatatgcggtgaaatcgtcctattgttcggcggaagcgcccaaaacggaacaggacgggaaagtttacaaactcggttttcgctgtatcgaatcagcaccggtcaactggaacgttcagttctgaaccgcaaggcggtggatttcccacgcgatcgcgccgtttatcaggcccgacgcggcgagcaagggcacgtcgtagccttcgaggggcacgcaggcgtcgggccaatcccacatgggatcaatccatataacgccgcgatcatgagcaaaatcgcgttcgtgccggagcgccgtgaaagcgacacgggcgccggccggccgtgccttgcggaggagatcgtccggcggctgctggtatccgatgagcacaatcatgtcgccgggacgataaacgtcatcgggtttcggcgacgtgcggaatcccgcgttccacacgtccgaatgaaacagttttccgatgtctgttttacccacttcgtccggaaacaggtggcccatgctgtacatgaacaattgtgcgccccgctttctcgccgctcggcaccatgcgcctgttttgtcgagttggcggcgttgttcgcgatccacgcgatccagcatggccttgattgtgttgatatagcggttggcgatgacacccgctgccacgggggggacttctttatcgtcgtgaaaggcaatatcgccgttcttgtactgcgtgatgcgcgggatgccgctgtatgagccgatactttcgtaaatgaccggcattttgccgagccgggtcaacgcggcgatcgtttcgccggtaaaaatccatgcgggaatggcgtttgccagcgtgggggagatgcctgcctcttcggcatgattcggaaaaaacggccattgatcatgaaccggccttgaaccgaaggtcactacaagcgcctgcgtgtttttcagggggtcaggcatgccggcgccgatttcgggcgtgtacaaaaccacatcggcgggatcaggcggctcgcttcccagtgcgcgaatcatcataaagccgccggcgcgtccgctgatttcgctgacgagcgagggctggcccgccgcccatagtttccctccgttggccagagcggcggcggcccgttcggcaaccggctgcatggcggataggtcgccccgggcacattcgatcgcatgcgccacgcgcgccagatacgaaccgttgatcggggcggccatggccgcactcattatgccgataatcgccgtcatcatgcgcggaaaccctttacttgaaagacagtcggaacccttttcccgaaacgactatcggatccaccgtgggaacatcgcccgattcgggcaatagaatccgcatgggggaaaaatccagaatatctttcctgatgtcaatgccgggcacgatacgcaccagttccataccgcgcggcgtcaactggaaaatgcccacattggacacgtaaagcactttcttgcccgtggcaagcgcttggcgtccactgaaggtaatttcgtccacattggcgatgaatttcggcttgccgtattcgacgatgcgcagggcattgccttccagacgaatctttccacccagcatccaactactgacgaagataatcgtccgcgccgcggtcgtgaagtcaatgaatccccccggtccgacgtaattgattgcgccctcgccgcgtttggaaacgttgacgtttccatcgctgtcacattgcagcatccccaggatgctcacatccaggctttcgtagcaccgatggaaaatttccgcgctggtaatcatctttttgggacatatcgcagcgccgaaaaagacgcccggcgctggcaatccaccaatgacgccgctttccgtaaacagggtgatgtcctcgtagagtcccgcctcgtacagcagccggcaaacttcttccggcaggccgacgccgatgttgaccaggctgccccggcgaacgttttccgcgaaagccgtcgcggccaagcgcgcaagcgaatcgtccaccgctgtgcgtctcggcgtgatgcgcagagtttcgttggcgtacttgagtttggcaacgctttccgcgatcggcatgtcgctttcggtagtgaacatcggccagtgtttgcgatgtttgacggaacccgtctgttccgtgcgggggtagacaacgaccgcgtccacatccgatgccggcagaaagatatcgtccgaatttttttcgacgacgtacccgacattgacgataaccaatccaccgtttgcccgcgcggcctttgcaatttcgcgactctccgcgagcatggccgtgtgcctcatgtagatattgccttcgcggtccgccgatggcgcgttgaacatcgcgaccgttatcgggggaagccggtagcgcaatttgccgttttcaaccgcaacccattgttccccggcgggcggtgtcacgggcgatccgcgccccacgcgcggatccatgaatgtgccgatgccggtgcttgtcaacagggatgtttccccgtggccttggccctcgatgaggaacgccataaccccttggggaatgcattggagttccagttttccttggtctgccagacgaagcatcgccttgaaggtttcgagatgtccgctgaaaaaacgcgtgcataagccgggaaggccgagttcttccagcgatcccggcgcgcggccccgagcgcccatgcccccaatcgccatgacggtcaaatcgcgcgggtggcccgtttcctgaaacaattcccgaatggaccaatacaggatggacgcccattgattggcgcccaaacccgaagcggccacgacggcgccgtcggggatcaatttgacggcgtcacgcggtcccatgaatttcggattgtcgggaatcgtgaaccgataatgcgtgtcgcgccggttccatgtcagccgccatttgagaacgtgatacaatacggaaatcttggaaaatagtgtcatgaggggtacttcctctttgaatccgtgacgtaagatagccgcttcaagaccgaaaagcaagagatatcggcgcggccactttacatggccgattccgttgcgctaccgtacccgtcaaaccggaacgaaaaaaaggatcgaagtatgaaagcgcctgtcgggattggggtattgagttttgcgcatggccatgtcggtgcgtatgtggacgtgatgaagaattttgccgatgtgagactggtgtcggcatacgacgacaatgagcaacggggcaagggggtgtgtgacaatgcggggatgcgctacacgccgcatgtcgaagatgtcttggacgatccgaatgtgcaggcggtcatggtgggcagcgagacatgccggcacgcagaattgtgcgtcgcggcggcgcgggccggaaagcacatcctctgccagaagcctatggccctctcgctcgaggattgcgaccgcatgatcgcggcggcggaaaaagcgggcgtgatgcttgccgtggccttccagatgcgtcacgacccggccaacatccggatgcgcgagattgtccagtcgggcgaattgggccgcatcgcggtcattcgccgccgccactgcatcggcgtgctgctcatggaatcgttcgtcaacgggccgacgcattggcatatcgaggccgacaagaacatgggcatgttcatggatgacgcgacgcatcccgccgactggttccactggatgctcggcaagcccgtcagcgtgatagccgaaattgacaatgtaatcacccatgtcgcgcccgacgacaacggtgtggccgtgttccgtttcgcacagggggaaatggggatcgttttcaacagttcgacggtcatggcgtcggaaaacacgaccgaaatctacggggagaaaggctgcgtgattcaaaattacggggacgcgccgtcgtgcgacacgcggctgcctggcgggatagccgtcaagatgttcaagtacggcgagggcaagtggcaggacctcggcgttccgattcctcccggccacggttgccggattcaagccgtgccgaggccctgggtggacagtcttgtgaacgagaccccgccggccgcgacgggacatgacggccgcgtggccgtcgagatgatcctcggcgcctacaaggcggcgcgtgaaggccgccgggtaacgtttccgttatgaaaggatccatgacgggattgcgggctgtttgtcgtccgcaacgggaagcgttgatgcccgtcatggggaaaaaggcagtatgaaggaattcgatctcgacacgatggtggatgtgggttgcgccacgatcctggaagtgcagcagaagatccagggcatggtgatagacaatccggcccgggcgctggatccggtcattgtcggtgcgcggaaaaaggccgcgttgcgcgtggatgtcttcgcggaggattacaccgaggccgaactgcgcaagaaattgaggaaataccgcccccgcgtgatcggggaagagagtcttttgaaggaggatctcgatctatcgcgcgaggatcgcctggtcgtgctgctcgacatgctcgatggcacggatttgctcgagcggggcttgtccaactggtgttcggcgatggtgttctattatccgcccgaatgcaggattttggcgtcgttcgtcggcattccgaacgatgccgtctactttgcgatcgaggatcgatcggcgccggtgcggaaatttctctggcatgtccgccgcggtcagccgcgcgtcattgacgtgaccggcccgtcgtccgtcacggccttgcaggaagcctcgctgtcgttctacggccagcagcccgccaatttcatgtccgttgcgggaaacaggcgttttgccgcgaaactggctgaattcgaaaccgtcaaggacgactcattcaagcgcatgcgcatctataatttggcgggcaatccgatgatgatgaaactcattgacggatccaaacgcattgacgcggtgttcgatttgctggggcaattgccgcacgacatggcgcccggcgcctacatcgcccgccgcgccggcgcaatcctgtgcggcctcgacgggcggcccattctggaagaagatcttgcgcgcatgttgataaaacccgcgcacggggcatcgaaaaggccgtatctgctggccgccaccgagggattgaaaaacgaatttctcgccctcttcggaacggatgcgtgccgggactgagaagtcccgatcctttttttgcatcaatggcgtgttatgcgccggccgcttcgcgcaaggcccgcaggacggcctgcgcggcgccgggggccggatcgctgagcaccggcaggaaaatcgtccgggccatcgcgcgttcggcattcgggaaatcgccgggacggtagccggcatagccctcgctcgcgcacaagggaccgcgattgcgcgtaaaaatatcgaagcctttggcaaacagcggcaagtcgtgcaggttcggatacggcgaaagcgacgcgcccacgccgcgcgccttgatccgctcgacgtaatccgcggtggacagaccccccatggcctccggctcgtgaatgattgggaatccataaaaaccgccgcgctcggcgccctcgtggaccgtgatggggcgcaatcccggaatcgaatccagtccggcctccacttcggcgaaatacgccgcgcggcgccggttcaattccggcagttttttcaattggaccgccgcgatgccgatgcccaggggatgcgcccggaacttcatgcccagtccgagcggttgaagctccgcatattttgccccgaccaaatcaatgcccgcgatgcggttgacctgtccgacaaggcatgcccgctcgaacacatcgaggtcgtccgtggcgatcatgcccccttcccccgcgctgaccgccttcgatccctgcaaactccatgcgccaacatggccgatcgcgccgcacatgcgccctttgtactttgcgccgtgcgcgtgggaacaatcctcgaccacggcgacgcccgtctcccgcgaaacggccatgatcgcgtccatgtcgcagacgtttccccaaagatgcacggcgcacaggcaacgcgtccgcggtgttattttccgtttcatgtcggccggatcgatcagaagcgtatccggattgatgtcgcagaaaacgggccgcgcgcccagcagcagggccggcgcgatgctgcaaatccaagtattgacgggacaaacgacctcgtcgcccggcccgactcccagtccgaaatacgccgagtacaaggccgatgtgccgttcaccaccgacacggcgaacttcgtgcccatccacgcccgccacgcctgttcgaattcgcgcaccacgggcgttccgcccgaaagctcgtttcgacgaaccatgtcggcggccatcgcggcctcgtcctcgccgatttgccgccaccggtcaagctcgcccgccgcccgcgccgtctgcacgaacgcacgcggaccgcccggattgacttccacgtcgagcgccatgttctttcccgatcgcgtgatgtgaaccgctattttttagcggcgtcttcctttggcacgaccttgtcgaaattgggctccgtgccgtccgttccttcttccatcaaccacatggccgcgtccacgatacttgcctggaacgtcggattttcccaaagatcctcgcgatggccgagggcgctgaaatacaccttgcccttgcccaacgcgctgcaccaaatcaccggatacggcgcaatgcgatacgccgcttgttttgcccctgcctcgcccgggtccagcaacgccagcacatgcatcgtttccgtgttgaaatttttgaacagataccactcctcctcgaaactccaatccgccggaatgctcgccatcgccggatgcgccggatccacaatcttcagcgtgcccttgaactgcgcgccatgcgtgacgaattcggcgcccaccatcttcaaatagggcgtcacctcgccgccggccggcgtgtgaaacgtgtccgacgcggaatgaaagcccatgaaacgcccgccgttccggacccactccaccagttcggcctggcccttttcacccatcggcgcgccgccgtccttgctggggcgcgtcaagtcgccctgcgtgtaaaaacacaccagatcgtagttcttgagattgtccgcattgatcaggctcgcatccttcgtgctggtgaaaggcgacccgttttcccgcgcaagccgcccgagaatcgtttccgccagactcggctgatcgcccttgacggccaccgggctgtgctcgaacccttccgacttgctcaagaacaaaatccgcggcggcgtgatatcctgcgccacggccacgaaagccacacccaagagaaccgctgtcgcccatgccgtccatgcaaccattcgacacatcgtcctttcctcccatgcgttttccatcgcgttgtccaaccggcgtagcataccctcccccgcggcgcgggtcaattcgccgcatttgtagtgtattcctgcacatgaaatttggaacgagcacgcaggtaatggtatatagttcgatatgcgggcaagctgaaggattctaatcgacaataggtttttcagtgcttcagaaaggggttgttgattatgaacgagtataatttgctggatgaatcgtggattcccgtactataccgaaacggctgcttcattcgcatcggcatccgcaaagccctcgaagacgcccaccgcattcgaaccatcgccgcaagcaatcccatggaccgcgtcgcaatccttcggttcctactcgccttgctgtattggtgcaagggcaatccaccggatggagcgaacgcaaacactggcgatccgtttccaacggattggttctcgatgcttgatgccaagagagactgctttaacctcctgggtgaggggaagaggttctatcaatacagaaaggctggttctggctcggaaaagaagcttgccgcaaactatttggcacaagaggtgcccaccggcacgaacaaatggcatttccggcatgcgacggacgagaaggatggcttgtgtcccgcatgctgcgccatgggcttgctgcgactcccactattcgcaacatcagggggacgtggcaagccgccaggcgtcaacgcgaaaccgcctctctatgtcataccggtcggcgattcgctcgcaaagaccttgcggctctcgtggaagccaatgcccaatctgggaacaccggcttgggagaagccggaaatggaacttctaaagacgggggagttgcccttactgatgggattcacttggatcccgcgacgggtctggctagataatcccgacaaacccgaaacaccctgcatatcatgcggtcaggtctgccgattgatccgcctcagcgtcttcgctcctatcggaagcaccaaaacgcaggaaggcggtgtaggtcgcttctggcgcgacccacacgttctctattccacttcagccaatgacgaagtaatctcgctgcatgccgccgacgtgcgcgccgctccggacgccgcagcgggacagtgggcaagaatcatcgctggcaatcagaaagtgcggcaagcagatgatcgaatcgggacttggattgttggtttctcgacagtgaacaacgatacgtatttggaggcgaccgaaagccttgtgcgtgacccattcttacccgaacagtcggaggccatcattgccagactggaacgatggcaaaaggaaggatcaaaacttgcccgcaaggcgcgtcccccgaatgagaaggttgcctcgcgaaagcatgtcgaaatccttccaatgctcgatggggttcgtccacatgtcgaaagcaaggtgttcgcggacgtaggcgagttgcttgtgggagacgatgaagcatgggagcaggcggcggctaagtacaggccaatgatgaggatggtagcccgatcgcttgcgcccggcttcacgaccgaggccctacgccgtcgccggaccatacaattcattgtccccaatatgaaacccaaacctgaaccggtcaagaaagatacccggaagaaagggggcgcgagcgaatgacgcctaccgagatgttcatcaaaaccctgacgaacctcaaaaccggcgacctcagcctcctgcgcacgcacgcaggacaaggtctcgatgagtcgctggaaggattcgacctcttcaccggaatctggtggcccttgcgcgagaagaatcaagctgcaccgcgccgttcagtggcatggctgatcgcgaagctctacgcgttctgtcccatccaccaggagcggggatgcgcgctcgccgcgcaattacgccgttgccgacccagcgaacagttctttaagaagtgtgacaggctgctcctgttgccgaacgaccggttggaaccagctcttcaatgggcaatcggaacccttgcttcaaataaattgcggctcgactgggtgcaactaacggacgatttatccatttgggaacgtgaaacaacccgcctcaggtgggcggaacaattactcgaaaacagggaggagaaatagacatgttgatcgaaatccacgccatccaaaaccacagcccggccaacctgaaccgggacgacctcggcgcacccaagacctgctacttcggcggcgtgctgcggtcgcgcatctccagccagtgcatcaagcgcagtatccgaacaagcgagcagttcaaggccttgtgcggcggaatccgtacccggcagttggcaaaattgattgctgaaaaggtaaccggcaaggccgatgtgaagaagcgcgcggcaaagatcctcaaggaatgcggcatcgctccaaaagacgaagacaagagcgacatgctcgtttacacgacgcaagaggcgatccaggagatggcggcgcttctgcaagatggcgacggaaagaccgatgaacaactggcgcaggccttcggcaacctaatcgctgatcggaccgccgtgcctgatatggcactcagcggcagaatgctcgaaaccggtgtcctgaaagacacgaccgtagaggctgcgttgcaggtaggccacgccatttctacgcacgaggcgcgcccggaagtggactactatgtcgccgccgacgacatccccggcgatgacgcgggagcgggttatgtggacgaagcaatgtttgcgtccgcctgtttctacaagtatttctcgatccactgggagacgctggtcgaaaatctgaagggcaacgaggagttggcggcccacacggtcggcgcattcattcgcgcggcggcattggcgaatccgacaggcaagcagaacagtttcgccgcccacaatccgcccgacgcgctcctcatcgagatcaaagataccccggttagctatgccaacgccttcgccaaaccggccgcgcaaggcgaacgcgacatcatcgcgcagagcattgctcaattggcgcagtacgttcacgacctcgatgtcggatatggccagccgcgacagcgattctggttctctcccaatctccgctataccttgagcgccgtgcaggataagaaggagatcgcactttctgaaaacaaccttcgagcgctcgacgaattgattcctgccgtgattgccgcaatcggccatgactgggaggaagtccagaaggttgtcgcaaaccatgaggtggccccatgagcgctaacaccctctttcttcgcctcgaaggtcccttgcaggcatggggcgatcagcagtcgaaattcgtcatccgccggaccgccgaagcgccgaccaagtccggcgtcatcggtatgctctgcgccgcattgggcgtatcgcgcgccgatgcccccgccgagtggctgccgaagctcggcgcgctgcgcatgggagttcgcatcgatgtgccgggcattcgatggtgggactatcacacggtcggcgcgggcatggaaatgcgcattgccgaagcagagggaaagaccaaacccggcgcgatgctcacgcggcgcgaatacctctgcgacgcgtcttttctcgtcgccctgcaaggcgatcccgctctcgttgccgaactggaagcggccctgaaagcacccaagtggacgctctatcttggacggaaatgctgtccgccctcgcgtcccgtgatgcaacatccatccggttcctttgaagatctccgttccgcgctcgcgtccgtgccatggcaagcccgactcaaaggagatacaccgcctaagtgtgtcgagtgtctcgttgactgggaatccacggaggaacaacctgaagcgcccgacgatgccctcgtctggtacgacgtgccgttgacattcgaaccaccggcacatcgcccacgattcgtcattcgcgagcaattgtccgttggcattgatggcgtcctaagcattgccgagacccccgcacaacggtttacaccgccgccgccgcgtcctcgagccgattatggcaacaaggaatacaaggatcgacgtaaagcccgcctcgaacaagaccaccatctctgcgtcttctgcaagtcgcccgcaaccactgttcagcacgtcacctatcgccgtgccggtggagacgagcagatagacgatctgcgttccctctgccgcctgtgccacgacgccgtcaccatgatcgagtacggccttggcatgggcctcgaccgtatcaaccccgaagaacaacgctggcgaaacaagatcatcgagaaacgcgacgaaatcgtcaaattccgttcgctggagacaaggcggcggcgtctcagcccagaggaggtcgaataatgttcctgtcccatctcttgatcgataccggaggcaatcccgaccgcccaagacccggcaggaaatggctccgcaacgtctatcacgtccatcagcgcctgtgcatggcctttccttcaaacatgcgtgtgcaggacgatccggagttcctcaagcccttcaagggagaagatttcccgttgcgcgggaacgcgaacgcggatccgcgcaatccccggcacagtttcctgttccgcatagacaacggcatcgagagcgatgccccgcgcgccatcatcctcgtccagtccgaactgaaacccaattgggactacgccttccacaacgcgcgcgtctttctcgcggccgacccggaaacccgcgaatacaaccccgcctttaccaccggcgacacgctccgttttcgcatccgaatcaacctaagcaagaagattcagtccaatagagaaggtatcgatcttcgaaaaccgcgagtggggatagacgccaaaggacgtcaaaaagatcaaagcaagcgagtggctctcacatggaacgacgatcagaagccggaagacgtaatcgtgccgtggtttgccgagaaaggcgccaaacgaggctttgaagtgaaaggtgcggcccttcttcaacttggctggtcgtcgggatttacggcggaaaaagaaaaggggatgaaattccggtccgccctgctcgaaggcacgcttgccgtggccaatcccgtgctcttttcccaaacgctggcgtcggggattggcgcggcgaaagccttcggattcggactcttgagcgtcgcgccatgcaatgtgaacccgtgacatgcgcacacacgatctgcacgaattgccgaaagtgagagacaaactcggttatctgtacgtcgagcattgtcgcatcgatcaggaagacaaggcgatcgctttgcatgatgaaaccggcgttacctccgttccatgtgcggccctttccctgctcatgctcggacccggcaccagcattacccatgcggccatactcacgctggccgacagtgcctgtcttaccgcatggtgcggcgagcaaggcatccgatactatgcctccggctccggggcgacccgcgacgcgtatgccctgctccggcaagccgccctttgttccgatgatgccgcccggctgaaagtcgtccgaagactttacgaggcccggttcaaagggaaaatcgacccctccctgacgcttcagcaactccgtgggcgtgaaggcgttcgcgttcgcgacgcctatgcccatgccgcgcgggaaacggggattcaatggcaagggcgaaactacgatcgcggcaactggaacgccgccgatcccgtcaatcgagcgctttccgccgccaatgcctgtctctacggtatctgccaggccgccatcattgccgccggttactccacggcgctcggttttatccacacgggaaagcaactttcctttgtttacgacattgccgatctttacaaatgcgacatgaccgttccactcgcttttcatgtcgcggccggccatcccatcaacttggagcgggaagtccgaatacaatgccgcgacgtgttcgcggaacaacgccttcttcaacggatcgttgacgatatcgcccagatcctcgatatcccacctgacgaagatacgcgtttggatgaggatccggccctgcccggcgcactctgggatccccggcaaggatcatgtccgggcggcatacaatacggtgctgatgactccggagatattggacatggtgatcatgattcttgaatccgtctcgccatcccttcgtggacaactcacgcggtggctgctcgaaccaaaatcaggcgtctttgtcggatccatttcggccatggtccgccaaaaactttgggaaaaggtttgcaaggaagcacgagatggcggcgccatcctcatcttttccgccaagaacgaacaaggtttcagaatagacttctggggaaaaacaacccgatggattacaaattgggaaggacttcaactagttaccaaaccaaaatgccaataaattcaatgggtattccccacgcacgtgggggtgaaccggatcgcaagaatgaggcggcgcagcaccgaatgtattccccacgcacgtgggggtgaaccggcggagatggtaagggagaaaataaaagaggggtattccccacgcacgtgggggtgaaccgagcaatgccgcgtatgaacaggccgcgcacaagtattccccacgcacgtgggggtgaaccgatccgccggtggccgcgccaagcgcgaatccg

SEQ ID NO: 974 - DNA, 131951 bp, Artificial Sequence; identical to SEQ ID NO: 495
  Synthetic Oligonucleotide
  misc_feature (1)..(95399): n is a, c, g, or t

SEQ ID NO: 975 - DNA, 104686 bp, Artificial Sequence
  Synthetic Oligonucleotide
  misc_feature (1)..(71314): n is a, c, g, or t
nnnnnnnnnnnnnnnnnnnnnnnnnnnnnnnnnnnnnnnnnnnnnnnnnnnnnnnnnnnnnnnnnnnnnnnnnnnnnnnnnnnnnnnnnnnnnnnnnnnnnnnnnnnnnnnnnnnnnnnnnnnnnnnnnnnnnnnnnnnnnnnnnnnnnnnnnnnnnnnnnnnnnnnnnnnnnnnnnnnnnnnnnnnnnnnnnnnnnnnnnnnnnnnnnnnnnnnnnnnnnnnnnnnnnnnnnnnnnnnnnnnnnnnnnnnnnnnnnnnnnnnnnnnnnnnnnnnnnnnnnnnnnnnnnnnnnnnnnnnnnnnnnnnnnnnnnnnnnnnnnnnnnnnnnnnnnnnnnnnnnnnnnnnnnnnnnnnnnnnnnnnnnnnnnnnnnnnnnnnnnnnnnnnnnnnnnnnnnnnnnnnnnnnnnnnnnnnnnnnnnnnnnnnnnnnnnnnnnnnnnnnnnnnnnnnnnnnnnnnnnnnnnnnnnnnnnnnnnnnnnnnnnnnnnnnnnnnnnnnnnnnnnnnnnnnnnnnnnnnnnnnnnnnnnnnnnnnnnnnnnnnnnnnnnnnnnnnnnnnnnnnnnnnnnnnnnnnnnnnnnnnnnnnnnnnnnnnnnnnnnnnnnnnnnnnnnnnnnnnnnnnnnnnnnnnnnnnnnnnnnnnnnnnnnnnnnnnnnnnnnnnnnnnnnnnnnnnnnnnnnnnnnnnnnnnnnnnnnnnnnnnnnnnnnnnnnnnnnnnnnnnnnnnnnnnnnnnnnnnnnnnnnnnnnnnnnnnnnnnnnnnnnnnnnnnnnnnnnnnnnnnnnnnnnnnnnnnnnnnnnnnnnnnnnnnnnnnnnnnnnnnnnnnnnnnnnnnnnnnnnnnnnnnnnnnnnnnnnnnnnnnnnnnnnnnnnnnnnnnnnnnnnnnnnnnnnnnnnnnnnnnnnnnnnnnnnnnnnnnnnnnnnnnnnnnnnnnnnnnnnnnnnnnnnnnnnnnnnnnnnnnnnnnnnnnnnnnnnnnnnnnnnnnnnnnnnnnnnnnnnnnnnnnnnnnnnnnnnnnnnnnnnnnnnnnnnnnnnnnnnnnnnnnnnnnnnnnnnnnnnnnnnnnnnnnnnnnnnnnnnnnnnnnnnnnnnnnnnnnnnnnnnnnnnnnnnnnnnnnnnnnnnnnnnnnnnnnnnnnnnnnnnnnnnnnnnnnnnnnnnnnnnnnnnnnnnnnnnnnnnnnnnnnnnnnnnnnnnnnnnnnnnnnnnnnnnnnnnnnnnnnnnnnnnnnnnnnnnnnnnnnnnnnnnnnnnnnnnnnnnnnnnnnnnnnnnnnnnnnnnnnnnnnnnnnnnnnnnnnnnnnnnnnnnnnnnnnnnnnnnnnnnnnnnnnnnnnnnnnnnnnnnnnnnnnnnnnnnnnnnnnnnnnnnnnnnnnnnnnnnnnnnnnnnnnnnnnnnnnnnnnnnnnnnnnnnnnnnnnnnnnnnnnnnnnnnnnnnnnnnnnnnnnnnnnnnnnnnnnnnnnnnnnnnnnnnnnnnnnnnnnnnnnnnnnnnnnnnnnnnnnnnnnnnnnnnnnnnnnnnnnnnnnnnnnnnnnnnnnnnnnnnnnnnnnnnnnnnnnnnnnnnnnnnnnnnnnnnnnnnnnnnnnnnnnnnnnnnnnnnnnnnnnnnnnnnnnnnnnnnnnnnnnnnnnnnnnnnnnnnnnnnnnnnnnnnnnnnnnnnnnnnnnnnnnnnnnnnnnnnnnnnnnnnnnnnnnnnnnnnnnnnnnnnnnnnnnnnnnnnnnnnnnnnnnnnnnnnnnnnnnnnnnnnnnnnnnnnnnnnnnnnnnnnnnnnnnnnnnnnnnnnnnnnnnnnnnnnnnnnnnnnnnnnnnnnnnnnnnnnnnnnnnnnnnnnnnnnnnnnnnnnnnnnnnnnnnnnnnnnnnnnnnnnnnnnnnnnnnnnnnnnnnnnnnnnnnnnnnnnnnnnnnnnnnnnnnnnnnnnnnnnnnnnnnnnnnnnnnnnnnnnnnnnnnnnnnnnnnnnnnnnnnnnnnnnnnnnnnnnnnnnnnnnnnnnnnnnnnnnnnnnnnnnnnnnnnnnnnnnnnnnnnnnnnnnnnnnnnnnnnnnnnnnnnnnnnnnnnnnnnnnnnnnnnnnnnnnnnnnnnnnnnnnnnnnnnnnnnnnnnnnnnnnnnnnnnnnnnnnnnnnnnnnnnnnnnnnnnnnnnnnnnnnnnnnnnnnnnnnnnnnnnnnnnnnnnnnnnnnnnnnnnnnnnnnnnnnnnnnnnnnnnnnnnnnnnnnnnnnnnnnnnnnnnnnnnnnnnnnnnnnnnnnnnnnnnnnnnnnnnnnnnnnnnnnnnnnnnnnnnnnnnnnnnnnnnnnnnnnnnnnnnnnnnnnnnnnnnnnnnnnnnnnnnnnnnnnnnnnnnnnnnnnnnnnnnnnnnnnnnnnnnnnnnnnnnnnnnnnnnnnnnnnnnnnnnnnnnnnnnnnnnnnnnnnnnnnnnnnnnnnnnnnnnnnnnnnnnnnnnnnnnnnnnnnnnnnnnnnnnnnnnnnnnnnnnnnnnnnnnnnnnnnnnnnnnnnnnnnnnnnnnnnnnnnnnnnnnnnnnnnnnnnnnnnnnnnnnnnnnnnnnnnnnnnnnnnnnnnnnnnnnnnnnnnnnnnnnnnnnnnnnnnnnnnnnnnnnnnnnnnnnnnnnnnnnnnnnnnnnnnnnnnnnnnnnnnnnnnnnnnnnnnnnnnnnnnnnnnnnnnnnnnnnnnnnnnnnnnnnnnnnnnnnnnnnnnnnnnnnnnnnnnnnnnnnnnnnnnnnnnnnnnnnnnnnnnnnnnnnnnnnnnnnnnnnnnnnnnnnnnnnnnnnnnnnnnnnnnnnnnnnnnnnnnnnnnnnnnnnnnnnnnnnnnnnnnnnnnnnnnnnnnnnnnnnnnnnnnnnnnnnnnnnnnnnnnnnnnnnnnnnnnnnnnnnnnnnnnnnnnnnnnnnnnnnnnnnnnnnnnnnnnnnnnnnnnnnnnnnnnnnnnnnnnnnnnnnnnnnnnnnnnnnnnnnnnnnnnnnnnnnnnnnnnnnnnnnnnnnnnnnnnnnnnnnnnnnnnnnnnnnnnnnnnnnnnnnnnnnnnnnnnnnnnnnnnnnnnnnnnnnnnnnnnnnnnnnnnnnnnnnnnnnnnnnnnnnnnnnnnnnnnnnnnnnnnnnnnnnnnnnnnnnnnnnnnnnnnnnnnnnnnnnnnnnnnnnnnnnnnnnnnnnnnnnnnnnnnnnnnnnnnnnnnnnnnnnnnnnnnnnnnnnnnnnnnnnnnnnnnnnnnnnnnnnnnnnnnnnnnnnnnnnnnnnnnnnnnnnnnnnnnnnnnnnnnnnnnnnnnnnnnnnnnnnnnnnnnnnnnnnnnnnnnnnnnnnnnnnnnnnnnnnnnnnnnnnnnnnnnnnnnnnnnnnnnnnnnnnnnnnnnnnnnnnnnnnnnnnnnnnnnnnnnnnnnnnnnnnnnnnnnnnnnnnnnnnnnnnnnnnnnnnnnnnnnnnnnnnnnnnnnnnnnnnnnnnnnnnnnnnnnnnnnnnnnnnnnnnnnnnnnnnnnnnnnnnnnnnnnnnnnnnnnnnnnnnnnnnnnnnnnnnnnnnnnnnnnnnnnnnnnnnnnnnnnnnnnnnnnnnnnnnnnnnnnnnnnnnnnnnnnnnnnnnnnnnnnnnnnnnnnnnnnnnnnnnnnnnnnnnnnnnnnnnnnnnnnnnnnnnnnnnnnnnnnnnnnnnnnnnnnnnnnnnnnnnnnnnnnnnnnnnnnnnnnnnnnnnnnnnnnnnnnnnnnnnnnnnnnnnnnnnnnnnnnnnnnnnnnnnnnnnnnnnnnnnnnnnnnnnnnnnnnnnnnnnnnnnnnnnnnnnnnnnnnnnnnnnnnnnnnnnnnnnnnnnnnnnnnnnnnnnnnnnnnnnnnnnnnnnnnnnnnnnnnnnnnnnnnnnnnnnnnnnnnnnnnnnnnnnnnnnnnnnnnnnnnnnnnnnnnnnnnnnnnnnnnnnnnnnnnnnnnnnnnnnnnnnnnnnnnnnnnnnnnnnnnnnnnnnnnnnnnnnnnnnnnnnnnnnnnnnnnnnnnnnnnnnnnnnnnnnnnnnnnnnnnnnnnnnnnnnnnnnnnnnnnnnnnnnnnnnnnnnnnnnnnnnnnnnnnnnnnnnnnnnnnnnnnnnnnnnnnnnnnnnnnnnnnnnnnnnnnnnnnnnnnnnnnnnnnnnnnnnnnnnnnnnnnnnnnnnnnnnnnnnnnnnnnnnnnnnnnnnnnnnnnnnnnnnnnnnnnnnnnnnnnnnnnnnnnnnnnnnnnnnnnnnnnnnnnnnnnnnnnnnnnnnnnnnnnnnnnnnnnnnnnnnnnnnnnnnnnnnnnnnnnnnnnnnnnnnnnnnnnnnnnnnnnnnnnnnnnnnnnnnnnnnnnnnnnnnnnnnnnnnnnnnnnnnnnnnnnnnnnnnnnnnnnnnnnnnnnnnnnnnnnnnnnnnnnnnnnnnnnnnnnnnnnnnnnnnnnnnnnnnnnnnnnnnnnnnnnnnnnnnnnnnnnnnnnnnnnnnnnnnnnnnnnnnnnnnnnnnnnnnnnnnnnnnnnnnnnnnnnnnnnnnnnnnnnnnnnnnnnnnnnnnnnnnnnnnnnnnnnnnnnnnnnnnnnnnnnnnnnnnnnnnnnnnnnnnnnnnnnnnnnnnnnnnnnnnnnnnnnnnnnnnnnnnnnnnnnnnnnnnnnnnnnnnnnnnnnnnnnnnnnnnnnnnnnnnnnnnnnnnnnnnnnnnnnnnnnnnnnnnnnnnnnnnnnnnnnnnnnnnnnnnnnnnnnnnnnnnnnnnnnnnnnnnnnnnnnnnnnnnnnnnnnnnnnnnnnnnnnnnnnnnnnnnnnnnnnnnnnnnnnnnnnnnnnnnnnnnnnnnnnnnnnnnnnnnnnnnnnnnnnnnnnnnnnnnnnnnnnnnnnnnnnnnnnnnnnnnnnnnnnnnnnnnnnnnnnnnnnnnnnnnnnnnnnnnnnnnnnnnnnnnnnnnnnnnnnnnnnnnnnnnnnnnnnnnnnnnnnnnnnnnnnnnnnnnnnnnnnnnnnnnnnnnnnnnnnnnnnnnnnnnnnnnnnnnnnnnnnnnnnnnnnnnnnnnnnnnnnnnnnnnnnnnnnnnnnnnnnnnnnnnnnnnnnnnnnnnnnnnnnnnnnnnnnnnnnnnnnnnnnnnnnnnnnnnnnnnnnnnnnnnnnnnnnnnnnnnnnnnnnnnnnnnnnnnnnnnnnnnnnnnnnnnnnnnnnnnnnnnnnnnnnnnnnnnnnnnnnnnnnnnnnnnnnnnnnnnnnnnnnnnnnnnnnnnnnnnnnnnnnnnnnnnnnnnnnnnnnnnnnnnnnnnnnnnnnnnnnnnnnnnnnnnnnnnnnnnnnnnnnnnnnnnnnnnnnnnnnnnnnnnnnnnnnnnnnnnnnnnnnnnnnnnnnnnnnnnnnnnnnnnnnnnnnnnnnnnnnnnnnnnnnnnnnnnnnnnnnnnnnnnnnnnnnnnnnnnnnnnnnnnnnnnnnnnnnnnnnnnnnnnnnnnnnnnnnnnnnnnnnnnnnnnnnnnnnnnnnnnnnnnnnnnnnnnnnnnnnnnnnnnnnnnnnnnnnnnnnnnnnnnnnnnnnnnnnnnnnnnnnnnnnnnnnnnnnnnnnnnnnnnnnnnnnnnnnnnnnnnnnnnnnnnnnnnnnnnnnnnnnnnnnnnnnnnnnnnnnnnnnnnnnnnnnnnnnnnnnnnnnnnnnnnnnnnnnnnnnnnnnnnnnnnnnnnnnnnnnnnnnnnnnnnnnnnnnnnnnnnnnnnnnnnnnnnnnnnnnnnnnnnnnnnnnnnnnnnnnnnnnnnnnnnnnnnnnnnnnnnnnnnnnnnnnnnnnnnnnnnnnnnnnnnnnnnnnnnnnnnnnnnnnnnnnnnnnnnnnnnnnnnnnnnnnnnnnnnnnnnnnnnnnnnnnnnnnnnnnnnnnnnnnnnnnnnnnnnnnnnnnnnnnnnnnnnnnnnnnnnnnnnnnnnnnnnnnnnnnnnnnnnnnnnnnnnnnnnnnnnnnnnnnnnnnnnnnnnnnnnnnnnnnnnnnnnnnnnnnnnnnnnnnnnnnnnnnnnnnnnnnnnnnnnnnnnnnnnnnnnnnnnnnnnnnnnnnnnnnnnnnnnnnnnnnnnnnnnnnnnnnnnnnnnnnnnnnnnnnnnnnnnnnnnnnnnnnnnnnnnnnnnnnnnnnnnnnnnnnnnnnnnnnnnnnnnnnnnnnnnnnnnnnnnnnnnnnnnnnnnnnnnnnnnnnnnnnnnnnnnnnnnnnnnnnnnnnnnnnnnnnnnnnnnnnnnnnnnnnnnnnnnnnnnnnnnnnnnnnnnnnnnnnnnnnnnnnnnnnnnnnnnnnnnnnnnnnnnnnnnnnnnnnnnnnnnnnnnnnnnnnnnnnnnnnnnnnnnnnnnnnnnnnnnnnnnnnnnnnnnnnnnnnnnnnnnnnnnnnnnnnnnnnnnnnnnnnnnnnnnnnnnnnnnnnnnnnnnnnnnnnnnnnnnnnnnnnnnnnnnnnnnnnnnnnnnnnnnnnnnnnnnnnnnnnnnnnnnnnnnnnnnnnnnnnnnnnnnnnnnnnnnnnnnnnnnnnnnnnnnnnnnnnnnnnnnnnnnnnnnnnnnnnnnnnnnnnnnnnnnnnnnnnnnnnnnnnnnnnnnnnnnnnnnnnnnnnnnnnnnnnnnnnnnnnnnnnnnnnnnnnnnnnnnnnnnnnnnnnnnnnnnnnnnnnnnnnnnnnnnnnnnnnnnnnnnnnnnnnnnnnnnnnnnnnnnnnnnnnnnnnnnnnnnnnnnnnnnnnnnnnnnnnnnnnnnnnnnnnnnnnnnnnnnnnnnnnnnnnnnnnnnnnnnnnnnnnnnnnnnnnnnnnnnnnnnnnnnnnnnnnnnnnnnnnnnnnnnnnnnnnnnnnnnnnnnnnnnnnnnnnnnnnnnnnnnnnnnnnnnnnnnnnnnnnnnnnnnnnnnnnnnnnnnnnnnnnnnnnnnnnnnnnnnnnnnnnnnnnnnnnnnnnnnnnnnnnnnnnnnnnnnnnnnnnnnnnnnnnnnnnnnnnnnnnnnnnnnnnnnnnnnnnnnnnnnnnnnnnnnnnnnnnnnnnnnnnnnnnnnnnnnnnnnnnnnnnnnnnnnnnnnnnnnnnnnnnnnnnnnnnnnnnnnnnnnnnnnnnnnnnnnnnnnnnnnnnnnnnnnnnnnnnnnnnnnnnnnnnnnnnnnnnnnnnnnnnnnnnnnnnnnnnnnnnnnnnnnnnnnnnnnnnnnnnnnnnnnnnnnnnnnnnnnnnnnnnnnnnnnnnnnnnnnnnnnnnnnnnnnnnnnnnnnnnnnnnnnnnnnnnnnnnnnnnnnnnnnnnnnnnnnnnnnnnnnnnnnnnnnnnnnnnnnnnnnnnnnnnnnnnnnnnnnnnnnnnnnnnnnnnnnnnnnnnnnnnnnnnnnnnnnnnnnnnnnnnnnnnnnnnnnnnnnnnnnnnnnnnnnnnnnnnnnnnnnnnnnnnnnnnnnnnnnnnnnnnnnnnnnnnnnnnnnnnnnnnnnnnnnnnnnnnnnnnnnnnnnnnnnnnnnnnnnnnnnnnnnnnnnnnnnnnnnnnnnnnnnnnnnnnnnnnnnnnnnnnnnnnnnnnnnnnnnnnnnnnnnnnnnnnnnnnnnnnnnnnnnnnnnnnnnnnnnnnnnnnnnnnnnnnnnnnnnnnnnnnnnnnnnnnnnnnnnnnnnnnnnnnnnnnnnnnnnnnnnnnnnnnnnnnnnnnnnnnnnnnnnnnnnnnnnnnnnnnnnnnnnnnnnnnnnnnnnnnnnnnnnnnnnnnnnnnnnnnnnnnnnnnnnnnnnnnnnnnnnnnnnnnnnnnnnnnnnnnnnnnnnnnnnnnnnnnnnnnnnnnnnnnnnnnnnnnnnnnnnnnnnnnnnnnnnnnnnnnnnnnnnnnnnnnnnnnnnnnnnnnnnnnnnnnnnnnnnnnnnnnnnnnnnnnnnnnnnnnnnnnnnnnnnnnnnnnnnnnnnnnnnnnnnnnnnnnnnnnnnnnnnnnnnnnnnnnnnnnnnnnnnnnnnnnnnnnnnnnnnnnnnnnnnnnnnnnnnnnnnnnnnnnnnnnnnnnnnnnnnnnnnnnnnnnnnnnnnnnnnnnnnnnnnnnnnnnnnnnnnnnnnnnnnnnnnnnnnnnnnnnnnnnnnnnnnnnnnnnnnnnnnnnnnnnnnnnnnnnnnnnnnnnnnnnnnnnnnnnnnnnnnnnnnnnnnnnnnnnnnnnnnnnnnnnnnnnnnnnnnnnnnnnnnnnnnnnnnnnnnnnnnnnnnnnnnnnnnnnnnnnnnnnnnnnnnnnnnnnnnnnnnnnnnnnnnnnnnnnnnnnnnnnnnnnnnnnnnnnnnnnnnnnnnnnnnnnnnnnnnnnnnnnnnnnnnnnnnnnnnnnnnnnnnnnnnnnnnnnnnnnnnnnnnnnnnnnnnnnnnnnnnnnnnnnnnnnnnnnnnnnnnnnnnnnnnnnnnnnnnnnnnnnnnnnnnnnnnnnnnnnnnnnnnnnnnnnnnnnnnnnnnnnnnnnnnnnnnnnnnnnnnnnnnnnnnnnnnnnnnnnnnnnnnnnnnnnnnnnnnnnnnnnnnnnnnnnnnnnnnnnnnnnnnnnnnnnnnnnnnnnnnnnnnnnnnnnnnnnnnnnnnnnnnnnnnnnnnnnnnnnnnnnnnnnnnnnnnnnnnnnnnnnnnnnnnnnnnnnnnnnnnnnnnnnnnnnnnnnnnnnnnnnnnnnnnnnnnnnnnnnnnnnnnnnnnnnnnnnnnnnnnnnnnnnnnnnnnnnnnnnnnnnnnnnnnnnnnnnnnnnnnnnnnnnnnnnnnnnnnnnnnnnnnnnnnnnnnnnnnnnnnnnnnnnnnnnnnnnnnnnnnnnnnnnnnnnnnnnnnnnnnnnnnnnnnnnnnnnnnnnnnnnnnnnnnnnnnnnnnnnnnnnnnnnnnnnnnnnnnnnnnnnnnnnnnnnnnnnnnnnnnnnnnnnnnnnnnnnnnnnnnnnnnnnnnnnnnnnnnnnnnnnnnnnnnnnnnnnnnnnnnnnnnnnnnnnnnnnnnnnnnnnnnnnnnnnnnnnnnnnnnnnnnnnnnnnnnnnnnnnnnnnnnnnnnnnnnnnnnnnnnnnnnnnnnnnnnnnnnnnnnnnnnnnnnnnnnnnnnnnnnnnnnnnnnnnnnnnnnnnnnnnnnnnnnnnnnnnnnnnnnnnnnnnnnnnnnnnnnnnnnnnnnnnnnnnnnnnnnnnnnnnnnnnnnnnnnnnnnnnnnnnnnnnnnnnnnnnnnnnnnnnnnnnnnnnnnnnnnnnnnnnnnnnnnnnnnnnnnnnnnnnnnnnnnnnnnnnnnnnnnnnnnnnnnnnnnnnnnnnnnnnnnnnnnnnnnnnnnnnnnnnnnnnnnnnnnnnnnnnnnnnnnnnnnnnnnnnnnnnnnnnnnnnnnnnnnnnnnnnnnnnnnnnnnnnnnnnnnnnnnnnnnnnnnnnnnnnnnnnnnnnnnnnnnnnnnnnnnnnnnnnnnnnnnnnnnnnnnnnnnnnnnnnnnnnnnnnnnnnnnnnnnnnnnnnnnnnnnnnnnnnnnnnnnnnnnnnnnnnnnnnnnnnnnnnnnnnnnnnnnnnnnnnnnnnnnnnnnnnnnnnnnnnnnnnnnnnnnnnnnnnnnnnnnnnnnnnnnnnnnnnnnnnnnnnnnnnnnnnnnnnnnnnnnnnnnnnnnnnnnnnnnnnnnnnnnnnnnnnnnnnnnnnnnnnnnnnnnnnnnnnnnnnnnnnnnnnnnnnnnnnnnnnnnnnnnnnnnnnnnnnnnnnnnnnnnnnnnnnnnnnnnnnnnnnnnnnnnnnnnnnnnnnnnnnnnnnnnnnnnnnnnnnnnnnnnnnnnnnnnnnnnnnnnnnnnnnnnnnnnnnnnnnnnnnnnnnnnnnnnnnnnnnnnnnnnnnnnnnnnnnnnnnnnnnnnnnnnnnnnnnnnnnnnnnnnnnnnnnnnnnnnnnnnnnnnnnnnnnnnnnnnnnnnnnnnnnnnnnnnnnnnnnnnnnnnnnnnnnnnnnnnnnnnnnnnnnnnnnnnnnnnnnnnnnnnnnnnnnnnnnnnnnnnnnnnnnnnnnnnnnnnnnnnnnnnnnnnnnnnnnnnnnnnnnnnnnnnnnnnnnnnnnnnnnnnnnnnnnnnnnnnnnnnnnnnnnnnnnnnnnnnnnnnnnnnnnnnnnnnnnnnnnnnnnnnnnnnnnnnnnnnnnnnnnnnnnnnnnnnnnnnnnnnnnnnnnnnnnnnnnnnnnnnnnnnnnnnnnnnnnnnnnnnnnnnnnnnnnnnnnnnnnnnnnnnnnnnnnnnnnnnnnnnnnnnnnnnnnnnnnnnnnnnnnnnnnnnnnnnnnnnnnnnnnnnnnnnnnnnnnnnnnnnnnnnnnnnnnnnnnnnnnnnnnnnnnnnnnnnnnnnnnnnnnnnnnnnnnnnnnnnnnnnnnnnnnnnnnnnnnnnnnnnnnnnnnnnnnnnnnnnnnnnnnnnnnnnnnnnnnnnnnnnnnnnnnnnnnnnnnnnnnnnnnnnnnnnnnnnnnnnnnnnnnnnnnnnnnnnnnnnnnnnnnnnnnnnnnnnnnnnnnnnnnnnnnnnnnnnnnnnnnnnnnnnnnnnnnnnnnnnnnnnnnnnnnnnnnnnnnnnnnnnnnnnnnnnnnnnnnnnnnnnnnnnnnnnnnnnnnnnnnnnnnnnnnnnnnnnnnnnnnnnnnnnnnnnnnnnnnnnnnnnnnnnnnnnnnnnnnnnnnnnnnnnnnnnnnnnnnnnnnnnnnnnnnnnnnnnnnnnnnnnnnnnnnnnnnnnnnnnnnnnnnnnnnnnnnnnnnnnnnnnnnnnnnnnnnnnnnnnnnnnnnnnnnnnnnnnnnnnnnnnnnnnnnnnnnnnnnnnnnnnnnnnnnnnnnnnnnnnnnnnnnnnnnnnnnnnnnnnnnnnnnnnnnnnnnnnnnnnnnnnnnnnnnnnnnnnnnnnnnnnnnnnnnnnnnnnnnnnnnnnnnnnnnnnnnnnnnnnnnnnnnnnnnnnnnnnnnnnnnnnnnnnnnnnnnnnnnnnnnnnnnnnnnnnnnnnnnnnnnnnnnnnnnnnnnnnnnnnnnnnnnnnnnnnnnnnnnnnnnnnnnnnnnnnnnnnnnnnnnnnnnnnnnnnnnnnnnnnnnnnnnnnnnnnnnnnnnnnnnnnnnnnnnnnnnnnnnnnnnnnnnnnnnnnnnnnnnnnnnnnnnnnnnnnnnnnnnnnnnnnnnnnnnnnnnnnnnnnnnnnnnnnnnnnnnnnnnnnnnnnnnnnnnnnnnnnnnnnnnnnnnnnnnnnnnnnnnnnnnnnnnnnnnnnnnnnnnnnnnnnnnnnnnnnnnnnnnnnnnnnnnnnnnnnnnnnnnnnnnnnnnnnnnnnnnnnnnnnnnnnnnnnnnnnnnnnnnnnnnnnnnnnnnnnnnnnnnnnnnnnnnnnnnnnnnnnnnnnnnnnnnnnnnnnnnnnnnnnnnnnnnnnnnnnnnnnnnnnnnnnnnnnnnnnnnnnnnnnnnnnnnnnnnnnnnnnnnnnnnnnnnnnnnnnnnnnnnnnnnnnnnnnnnnnnnnnnnnnnnnnnnnnnnnnnnnnnnnnnnnnnnnnnnnnnnnnnnnnnnnnnnnnnnnnnnnnnnnnnnnnnnnnnnnnnnnnnnnnnnnnnnnnnnnnnnnnnnnnnnnnnnnnnnnnnnnnnnnnnnnnnnnnnnnnnnnnnnnnnnnnnnnnnnnnnnnnnnnnnnnnnnnnnnnnnnnnnnnnnnnnnnnnnnnnnnnnnnnnnnnnnnnnnnnnnnnnnnnnnnnnnnnnnnnnnnnnnnnnnnnnnnnnnnnnnnnnnnnnnnnnnnnnnnnnnnnnnnnnnnnnnnnnnnnnnnnnnnnnnnnnnnnnnnnnnnnnnnnnnnnnnnnnnnnnnnnnnnnnnnnnnnnnnnnnnnnnnnnnnnnnnnnnnnnnnnnnnnnnnnnnnnnnnnnnnnnnnnnnnnnnnnnnnnnnnnnnnnnnnnnnnnnnnnnnnnnnnnnnnnnnnnnnnnnnnnnnnnnnnnnnnnnnnnnnnnnnnnnnnnnnnnnnnnnnnnnnnnnnnnnnnnnnnnnnnnnnnnnnnnnnnnnnnnnnnnnnnnnnnnnnnnnnnnnnnnnnnnnnnnnnnnnnnnnnnnnnnnnnnnnnnnnnnnnnnnnnnnnnnnnnnnnnnnnnnnnnnnnnnnnnnnnnnnnnnnnnnnnnnnnnnnnnnnnnnnnnnnnnnnnnnnnnnnnnnnnnnnnnnnnnnnnnnnnnnnnnnnnnnnnnnnnnnnnnnnnnnnnnnnnnnnnnnnnnnnnnnnnnnnnnnnnnnnnnnnnnnnnnnnnnnnnnnnnnnnnnnnnnnnnnnnnnnnnnnnnnnnnnnnnnnnnnnnnnnnnnnnnnnnnnnnnnnnnnnnnnnnnnnnnnnnnnnnnnnnnnnnnnnnnnnnnnnnnnnnnnnnnnnnnnnnnnnnnnnnnnnnnnnnnnnnnnnnnnnnnnnnnnnnnnnnnnnnnnnnnnnnnnnnnnnnnnnnnnnnnnnnnnnnnnnnnnnnnnnnnnnnnnnnnnnnnnnnnnnnnnnnnnnnnnnnnnnnnnnnnnnnnnnnnnnnnnnnnnnnnnnnnnnnnnnnnnnnnnnnnnnnnnnnnnnnnnnnnnnnnnnnnnnnnnnnnnnnnnnnnnnnnnnnnnnnnnnnnnnnnnnnnnnnnnnnnnnnnnnnnnnnnnnnnnnnnnnnnnnnnnnnnnnnnnnnnnnnnnnnnnnnnnnnnnnnnnnnnnnnnnnnnnnnnnnnnnnnnnnnnnnnnnnnnnnnnnnnnnnnnnnnnnnnnnnnnnnnnnnnnnnnnnnnnnnnnnnnnnnnnnnnnnnnnnnnnnnnnnnnnnnnnnnnnnnnnnnnnnnnnnnnnnnnnnnnnnnnnnnnnnnnnnnnnnnnnnnnnnnnnnnnnnnnnnnnnnnnnnnnnnnnnnnnnnnnnnnnnnnnnnnnnnnnnnnnnnnnnnnnnnnnnnnnnnnnnnnnnnnnnnnnnnnnnnnnnnnnnnnnnnnnnnnnnnnnnnnnnnnnnnnnnnnnnnnnnnnnnnnnnnnnnnnnnnnnnnnnnnnnnnnnnnnnnnnnnnnnnnnnnnnnnnnnnnnnnnnnnnnnnnnnnnnnnnnnnnnnnnnnnnnnnnnnnnnnnnnnnnnnnnnnnnnnnnnnnnnnnnnnnnnnnnnnnnnnnnnnnnnnnnnnnnnnnnnnnnnnnnnnnnnnnnnnnnnnnnnnnnnnnnnnnnnnnnnnnnnnnnnnnnnnnnnnnnnnnnnnnnnnnnnnnnnnnnnnnnnnnnnnnnnnnnnnnnnnnnnnnnnnnnnnnnnnnnnnnnnnnnnnnnnnnnnnnnnnnnnnnnnnnnnnnnnnnnnnnnnnnnnnnnnnnnnnnnnnnnnnnnnnnnnnnnnnnnnnnnnnnnnnnnnnnnnnnnnnnnnnnnnnnnnnnnnnnnnnnnnnnnnnnnnnnnnnnnnnnnnnnnnnnnnnnnnnnnnnnnnnnnnnnnnnnnnnnnnnnnnnnnnnnnnnnnnnnnnnnnnnnnnnnnnnnnnnnnnnnnnnnnnnnnnnnnnnnnnnnnnnnnnnnnnnnnnnnnnnnnnnnnnnnnnnnnnnnnnnnnnnnnnnnnnnnnnnnnnnnnnnnnnnnnnnnnnnnnnnnnnnnnnnnnnnnnnnnnnnnnnnnnnnnnnnnnnnnnnnnnnnnnnnnnnnnnnnnnnnnnnnnnnnnnnnnnnnnnnnnnnnnnnnnnnnnnnnnnnnnnnnnnnnnnnnnnnnnnnnnnnnnnnnnnnnnnnnnnnnnnnnnnnnnnnnnnnnnnnnnnnnnnnnnnnnnnnnnnnnnnnnnnnnnnnnnnnnnnnnnnnnnnnnnnnnnnnnnnnnnnnnnnnnnnnnnnnnnnnnnnnnnnnnnnnnnnnnnnnnnnnnnnnnnnnnnnnnnnnnnnnnnnnnnnnnnnnnnnnnnnnnnnnnnnnnnnnnnnnnnnnnnnnnnnnnnnnnnnnnnnnnnnnnnnnnnnnnnnnnnnnnnnnnnnnnnnnnnnnnnnnnnnnnnnnnnnnnnnnnnnnnnnnnnnnnnnnnnnnnnnnnnnnnnnnnnnnnnnnnnnnnnnnnnnnnnnnnnnnnnnnnnnnnnnnnnnnnnnnnnnnnnnnnnnnnnnnnnnnnnnnnnnnnnnnnnnnnnnnnnnnnnnnnnnnnnnnnnnnnnnnnnnnnnnnnnnnnnnnnnnnnnnnnnnnnnnnnnnnnnnnnnnnnnnnnnnnnnnnnnnnnnnnnnnnnnnnnnnnnnnnnnnnnnnnnnnnnnnnnnnnnnnnnnnnnnnnnnnnnnnnnnnnnnnnnnnnnnnnnnnnnnnnnnnnnnnnnnnnnnnnnnnnnnnnnnnnnnnnnnnnnnnnnnnnnnnnnnnnnnnnnnnnnnnnnnnnnnnnnnnnnnnnnnnnnnnnnnnnnnnnnnnnnnnnnnnnnnnnnnnnnnnnnnnnnnnnnnnnnnnnnnnnnnnnnnnnnnnnnnnnnnnnnnnnnnnnnnnnnnnnnnnnnnnnnnnnnnnnnnnnnnnnnnnnnnnnnnnnnnnnnnnnnnnnnnnnnnnnnnnnnnnnnnnnnnnnnnnnnnnnnnnnnnnnnnnnnnnnnnnnnnnnnnnnnnnnnnnnnnnnnnnnnnnnnnnnnnnnnnnnnnnnnnnnnnnnnnnnnnnnnnnnnnnnnnnnnnnnnnnnnnnnnnnnnnnnnnnnnnnnnnnnnnnnnnnnnnnnnnnnnnnnnnnnnnnnnnnnnnnnnnnnnnnnnnnnnnnnnnnnnnnnnnnnnnnnnnnnnnnnnnnnnnnnnnnnnnnnnnnnnnnnnnnnnnnnnnnnnnnnnnnnnnnnnnnnnnnnnnnnnnnnnnnnnnnnnnnnnnnnnnnnnnnnnnnnnnnnnnnnnnnnnnnnnnnnnnnnnnnnnnnnnnnnnnnnnnnnnnnnnnnnnnnnnnnnnnnnnnnnnnnnnnnnnnnnnnnnnnnnnnnnnnnnnnnnnnnnnnnnnnnnnnnnnnnnnnnnnnnnnnnnnnnnnnnnnnnnnnnnnnnnnnnnnnnnnnnnnnnnnnnnnnnnnnnnnnnnnnnnnnnnnnnnnnnnnnnnnnnnnnnnnnnnnnnnnnnnnnnnnnnnnnnnnnnnnnnnnnnnnnnnnnnnnnnnnnnnnnnnnnnnnnnnnnnnnnnnnnnnnnnnnnnnnnnnnnnnnnnnnnnnnnnnnnnnnnnnnnnnnnnnnnnnnnnnnnnnnnnnnnnnnnnnnnnnnnnnnnnnnnnnnnnnnnnnnnnnnnnnnnnnnnnnnnnnnnnnnnnnnnnnnnnnnnnnnnnnnnnnnnnnnnnnnnnnnnnnnnnnnnnnnnnnnnnnnnnnnnnnnnnnnnnnnnnnnnnnnnnnnnnnnnnnnnnnnnnnnnnnnnnnnnnnnnnnnnnnnnnnnnnnnnnnnnnnnnnnnnnnnnnnnnnnnnnnnnnnnnnnnnnnnnnnnnnnnnnnnnnnnnnnnnnnnnnnnnnnnnnnnnnnnnnnnnnnnnnnnnnnnnnnnnnnnnnnnnnnnnnnnnnnnnnnnnnnnnnnnnnnnnnnnnnnnnnnnnnnnnnnnnnnnnnnnnnnnnnnnnnnnnnnnnnnnnnnnnnnnnnnnnnnnnnnnnnnnnnnnnnnnnnnnnnnnnnnnnnnnnnnnnnnnnnnnnnnnnnnnnnnnnnnnnnnnnnnnnnnnnnnnnnnnnnnnnnnnnnnnnnnnnnnnnnnnnnnnnnnnnnnnnnnnnnnnnnnnnnnnnnnnnnnnnnnnnnnnnnnnnnnnnnnnnnnnnnnnnnnnnnnnnnnnnnnnnnnnnnnnnnnnnnnnnnnnnnnnnnnnnnnnnnnnnnnnnnnnnnnnnnnnnnnnnnnnnnnnnnnnnnnnnnnnnnnnnnnnnnnnnnnnnnnnnnnnnnnnnnnnnnnnnnnnnnnnnnnnnnnnnnnnnnnnnnnnnnnnnnnnnnnnnnnnnnnnnnnnnnnnnnnnnnnnnnnnnnnnnnnnnnnnnnnnnnnnnnnnnnnnnnnnnnnnnnnnnnnnnnnnnnnnnnnnnnnnnnnnnnnnnnnnnnnnnnnnnnnnnnnnnnnnnnnnnnnnnnnnnnnnnnnnnnnnnnnnnnnnnnnnnnnnnnnnnnnnnnnnnnnnnnnnnnnnnnnnnnnnnnnnnnnnnnnnnnnnnnnnnnnnnnnnnnnnnnnnnnnnnnnnnnnnnnnnnnnnnnnnnnnnnnnnnnnnnnnnnnnnnnnnnnnnnnnnnnnnnnnnnnnnnnnnnnnnnnnnnnnnnnnnnnnnnnnnnnnnnnnnnnnnnnnnnnnnnnnnnnnnnnnnnnnnnnnnnnnnnnnnnnnnnnnnnnnnnnnnnnnnnnnnnnnnnnnnnnnnnnnnnnnnnnnnnnnnnnnnnnnnnnnnnnnnnnnnnnnnnnnnnnnnnnnnnnnnnnnnnnnnnnnnnnnnnnnnnnnnnnnnnnnnnnnnnnnnnnnnnnnnnnnnnnnnnnnnnnnnnnnnnnnnnnnnnnnnnnnnnnnnnnnnnnnnnnnnnnnnnnnnnnnnnnnnnnnnnnnnnnnnnnnnnnnnnnnnnnnnnnnnnnnnnnnnnnnnnnnnnnnnnnnnnnnnnnnnnnnnnnnnnnnnnnnnnnnnnnnnnnnnnnnnnnnnnnnnnnnnnnnnnnnnnnnnnnnnnnnnnnnnnnnnnnnnnnnnnnnnnnnnnnnnnnnnnnnnnnnnnnnnnnnnnnnnnnnnnnnnnnnnnnnnnnnnnnnnnnnnnnnnnnnnnnnnnnnnnnnnnnnnnnnnnnnnnnnnnnnnnnnnnnnnnnnnnnnnnnnnnnnnnnnnnnnnnnnnnnnnnnnnnnnnnnnnnnnnnnnnnnnnnnnnnnnnnnnnnnnnnnnnnnnnnnnnnnnnnnnnnnnnnnnnnnnnnnnnnnnnnnnnnnnnnnnnnnnnnnnnnnnnnnnnnnnnnnnnnnnnnnnnnnnnnnnnnnnnnnnnnnnnnnnnnnnnnnnnnnnnnnnnnnnnnnnnnnnnnnnnnnnnnnnnnnnnnnnnnnnnnnnnnnnnnnnnnnnnnnnnnnnnnnnnnnnnnnnnnnnnnnnnnnnnnnnnnnnnnnnnnnnnnnnnnnnnnnnnnnnnnnnnnnnnnnnnnnnnnnnnnnnnnnnnnnnnnnnnnnnnnnnnnnnnnnnnnnnnnnnnnnnnnnnnnnnnnnnnnnnnnnnnnnnnnnnnnnnnnnnnnnnnnnnnnnnnnnnnnnnnnnnnnnnnnnnnnnnnnnnnnnnnnnnnnnnnnnnnnnnnnnnnnnnnnnnnnnnnnnnnnnnnnnnnnnnnnnnnnnnnnnnnnnnnnnnnnnnnnnnnnnnnnnnnnnnnnnnnnnnnnnnnnnnnnnnnnnnnnnnnnnnnnnnnnnnnnnnnnnnnnnnnnnnnnnnnnnnnnnnnnnnnnnnnnnnnnnnnnnnnnnnnnnnnnnnnnnnnnnnnnnnnnnnnnnnnnnnnnnnnnnnnnnnnnnnnnnnnnnnnnnnnnnnnnnnnnnnnnnnnnnnnnnnnnnnnnnnnnnnnnnnnnnnnnnnnnnnnnnnnnnnnnnnnnnnnnnnnnnnnnnnnnnnnnnnnnnnnnnnnnnnnnnnnnnnnnnnnnnnnnnnnnnnnnnnnnnnnnnnnnnnnnnnnnnnnnnnnnnnnnnnnnnnnnnnnnnnnnnnnnnnnnnnnnnnnnnnnnnnnnnnnnnnnnnnnnnnnnnnnnnnnnnnnnnnnnnnnnnnnnnnnnnnnnnnnnnnnnnnnnnnnnnnnnnnnnnnnnnnnnnnnnnnnnnnnnnnnnnnnnnnnnnnnnnnnnnnnnnnnnnnnnnnnnnnnnnnnnnnnnnnnnnnnnnnnnnnnnnnnnnnnnnnnnnnnnnnnnnnnnnnnnnnnnnnnnnnnnnnnnnnnnnnnnnnnnnnnnnnnnnnnnnnnnnnnnnnnnnnnnnnnnnnnnnnnnnnnnnnnnnnnnnnnnnnnnnnnnnnnnnnnnnnnnnnnnnnnnnnnnnnnnnnnnnnnnnnnnnnnnnnnnnnnnnnnnnnnnnnnnnnnnnnnnnnnnnnnnnnnnnnnnnnnnnnnnnnnnnnnnnnnnnnnnnnnnnnnnnnnnnnnnnnnnnnnnnnnnnnnnnnnnnnnnnnnnnnnnnnnnnnnnnnnnnnnnnnnnnnnnnnnnnnnnnnnnnnnnnnnnnnnnnnnnnnnnnnnnnnnnnnnnnnnnnnnnnnnnnnnnnnnnnnnnnnnnnnnnnnnnnnnnnnnnnnnnnnnnnnnnnnnnnnnnnnnnnnnnnnnnnnnnnnnnnnnnnnnnnnnnnnnnnnnnnnnnnnnnnnnnnnnnnnnnnnnnnnnnnnnnnnnnnnnnnnnnnnnnnnnnnnnnnnnnnnnnnnnnnnnnnnnnnnnnnnnnnnnnnnnnnnnnnnnnnnnnnnnnnnnnnnnnnnnnnnnnnnnnnnnnnnnnnnnnnnnnnnnnnnnnnnnnnnnnnnnnnnnnnnnnnnnnnnnnnnnnnnnnnnnnnnnnnnnnnnnnnnnnnnnnnnnnnnnnnnnnnnnnnnnnnnnnnnnnnnnnnnnnnnnnnnnnnnnnnnnnnnnnnnnnnnnnnnnnnnnnnnnnnnnnnnnnnnnnnnnnnnnnnnnnnnnnnnnnnnnnnnnnnnnnnnnnnnnnnnnnnnnnnnnnnnnnnnnnnnnnnnnnnnnnnnnnnnnnnnnnnnnnnnnnnnnnnnnnnnnnnnnnnnnnnnnnnnnnnnnnnnnnnnnnnnnnnnnnnnnnnnnnnnnnnnnnnnnnnnnnnnnnnnnnnnnnnnnnnnnnnnnnnnnnnnnnnnnnnnnnnnnnnnnnnnnnnnnnnnnnnnnnnnnnnnnnnnnnnnnnnnnnnnnnnnnnnnnnnnnnnnnnnnnnnnnnnnnnnnnnnnnnnnnnnnnnnnnnnnnnnnnnnnnnnnnnnnnnnnnnnnnnnnnnnnnnnnnnnnnnnnnnnnnnnnnnnnnnnnnnnnnnnnnnnnnnnnnnnnnnnnnnnnnnnnnnnnnnnnnnnnnnnnnnnnnnnnnnnnnnnnnnnnnnnnnnnnnnnnnnnnnnnnnnnnnnnnnnnnnnnnnnnnnnnnnnnnnnnnnnnnnnnnnnnnnnnnnnnnnnnnnnnnnnnnnnnnnnnnnnnnnnnnnnnnnnnnnnnnnnnnnnnnnnnnnnnnnnnnnnnnnnnnnnnnnnnnnnnnnnnnnnnnnnnnnnnnnnnnnnnnnnnnnnnnnnnnnnnnnnnnnnnnnnnnnnnnnnnnnnnnnnnnnnnnnnnnnnnnnnnnnnnnnnnnnnnnnnnnnnnnnnnnnnnnnnnnnnnnnnnnnnnnnnnnnnnnnnnnnnnnnnnnnnnnnnnnnnnnnnnnnnnnnnnnnnnnnnnnnnnnnnnnnnnnnnnnnnnnnnnnnnnnnnnnnnnnnnnnnnnnnnnnnnnnnnnnnnnnnnnnnnnnnnnnnnnnnnnnnnnnnnnnnnnnnnnnnnnnnnnnnnnnnnnnnnnnnnnnnnnnnnnnnnnnnnnnnnnnnnnnnnnnnnnnnnnnnnnnnnnnnnnnnnnnnnnnnnnnnnnnnnnnnnnnnnnnnnnnnnnnnnnnnnnnnnnnnnnnnnnnnnnnnnnnnnnnnnnnnnnnnnnnnnnnnnnnnnnnnnnnnnnnnnnnnnnnnnnnnnnnnnnnnnnnnnnnnnnnnnnnnnnnnnnnnnnnnnnnnnnnnnnnnnnnnnnnnnnnnnnnnnnnnnnnnnnnnnnnnnnnnnnnnnnnnnnnnnnnnnnnnnnnnnnnnnnnnnnnnnnnnnnnnnnnnnnnnnnnnnnnnnnnnnnnnnnnnnnnnnnnnnnnnnnnnnnnnnnnnnnnnnnnnnnnnnnnnnnnnnnnnnnnnnnnnnnnnnnnnnnnnnnnnnnnnnnnnnnnnnnnnnnnnnnnnnnnnnnnnnnnnnnnnnnnnnnnnnnnnnnnnnnnnnnnnnnnnnnnnnnnnnnnnnnnnnnnnnnnnnnnnnnnnnnnnnnnnnnnnnnnnnnnnnnnnnnnnnnnnnnnnnnnnnnnnnnnnnnnnnnnnnnnnnnnnnnnnnnnnnnnnnnnnnnnnnnnnnnnnnnnnnnnnnnnnnnnnnnnnnnnnnnnnnnnnnnnnnnnnnnnnnnnnnnnnnnnnnnnnnnnnnnnnnnnnnnnnnnnnnnnnnnnnnnnnnnnnnnnnnnnnnnnnnnnnnnnnnnnnnnnnnnnnnnnnnnnnnnnnnnnnnnnnnnnnnnnnnnnnnnnnnnnnnnnnnnnnnnnnnnnnnnnnnnnnnnnnnnnnnnnnnnnnnnnnnnnnnnnnnnnnnnnnnnnnnnnnnnnnnnnnnnnnnnnnnnnnnnnnnnnnnnnnnnnnnnnnnnnnnnnnnnnnnnnnnnnnnnnnnnnnnnnnnnnnnnnnnnnnnnnnnnnnnnnnnnnnnnnnnnnnnnnnnnnnnnnnnnnnnnnnnnnnnnnnnnnnnnnnnnnnnnnnnnnnnnnnnnnnnnnnnnnnnnnnnnnnnnnnnnnnnnnnnnnnnnnnnnnnnnnnnnnnnnnnnnnnnnnnnnnnnnnnnnnnnnnnnnnnnnnnnnnnnnnnnnnnnnnnnnnnnnnnnnnnnnnnnnnnnnnnnnnnnnnnnnnnnnnnnnnnnnnnnnnnnnnnnnnnnnnnnnnnnnnnnnnnnnnnnnnnnnnnnnnnnnnnnnnnnnnnnnnnnnnnnnnnnnnnnnnnnnnnnnnnnnnnnnnnnnnnnnnnnnnnnnnnnnnnnnnnnnnnnnnnnnnnnnnnnnnnnnnnnnnnnnnnnnnnnnnnnnnnnnnnnnnnnnnnnnnnnnnnnnnnnnnnnnnnnnnnnnnnnnnnnnnnnnnnnnnnnnnnnnnnnnnnnnnnnnnnnnnnnnnnnnnnnnnnnnnnnnnnnnnnnnnnnnnnnnnnnnnnnnnnnnnnnnnnnnnnnnnnnnnnnnnnnnnnnnnnnnnnnnnnnnnnnnnnnnnnnnnnnnnnnnnnnnnnnnnnnnnnnnnnnnnnnnnnnnnnnnnnnnnnnnnnnnnnnnnnnnnnnnnnnnnnnnnnnnnnnnnnnnnnnnnnnnnnnnnnnnnnnnnnnnnnnnnnnnnnnnnnnnnnnnnnnnnnnnnnnnnnnnnnnnnnnnnnnnnnnnnnnnnnnnnnnnnnnnnnnnnnnnnnnnnnnnnnnnnnnnnnnnnnnnnnnnnnnnnnnnnnnnnnnnnnnnnnnnnnnnnnnnnnnnnnnnnnnnnnnnnnnnnnnnnnnnnnnnnnnnnnnnnnnnnnnnnnnnnnnnnnnnnnnnnnnnnnnnnnnnnnnnnnnnnnnnnnnnnnnnnnnnnnnnnnnnnnnnnnnnnnnnnnnnnnnnnnnnnnnnnnnnnnnnnnnnnnnnnnnnnnnnnnnnnnnnnnnnnnnnnnnnnnnnnnnnnnnnnnnnnnnnnnnnnnnnnnnnnnnnnnnnnnnnnnnnnnnnnnnnnnnnnnnnnnnnnnnnnnnnnnnnnnnnnnnnnnnnnnnnnnnnnnnnnnnnnnnnnnnnnnnnnnnnnnnnnnnnnnnnnnnnnnnnnnnnnnnnnnnnnnnnnnnnnnnnnnnnnnnnnnnnnnnnnnnnnnnnnnnnnnnnnnnnnnnnnnnnnnnnnnnnnnnnnnnnnnnnnnnnnnnnnnnnnnnnnnnnnnnnnnnnnnnnnnnnnnnnnnnnnnnnnnnnnnnnnnnnnnnnnnnnnnnnnnnnnnnnnnnnnnnnnnnnnnnnnnnnnnnnnnnnnnnnnnnnnnnnnnnnnnnnnnnnnnnnnnnnnnnnnnnnnnnnnnnnnnnnnnnnnnnnnnnnnnnnnnnnnnnnnnnnnnnnnnnnnnnnnnnnnnnnnnnnnnnnnnnnnnnnnnnnnnnnnnnnnnnnnnnnnnnnnnnnnnnnnnnnnnnnnnnnnnnnnnnnnnnnnnnnnnnnnnnnnnnnnnnnnnnnnnnnnnnnnnnnnnnnnnnnnnnnnnnnnnnnnnnnnnnnnnnnnnnnnnnnnnnnnnnnnnnnnnnnnnnnnnnnnnnnnnnnnnnnnnnnnnnnnnnnnnnnnnnnnnnnnnnnnnnnnnnnnnnnnnnnnnnnnnnnnnnnnnnnnnnnnnnnnnnnnnnnnnnnnnnnnnnnnnnnnnnnnnnnnnnnnnnnnnnnnnnnnnnnnnnnnnnnnnnnnnnnnnnnnnnnnnnnnnnnnnnnnnnnnnnnnnnnnnnnnnnnnnnnnnnnnnnnnnnnnnnnnnnnnnnnnnnnnnnnnnnnnnnnnnnnnnnnnnnnnnnnnnnnnnnnnnnnnnnnnnnnnnnnnnnnnnnnnnnnnnnnnnnnnnnnnnnnnnnnnnnnnnnnnnnnnnnnnnnnnnnnnnnnnnnnnnnnnnnnnnnnnnnnnnnnnnnnnnnnnnnnnnnnnnnnnnnnnnnnnnnnnnnnnnnnnnnnnnnnnnnnnnnnnnnnnnnnnnnnnnnnnnnnnnnnnnnnnnnnnnnnnnnnnnnnnnnnnnnnnnnnnnnnnnnnnnnnnnnnnnnnnnnnnnnnnnnnnnnnnnnnnnnnnnnnnnnnnnnnnnnnnnnnnnnnnnnnnnnnnnnnnnnnnnnnnnnnnnnnnnnnnnnnnnnnnnnnnnnnnnnnnnnnnnnnnnnnnnnnnnnnnnnnnnnnnnnnnnnnnnnnnnnnnnnnnnnnnnnnnnnnnnnnnnnnnnnnnnnnnnnnnnnnnnnnnnnnnnnnnnnnnnnnnnnnnnnnnnnnnnnnnnnnnnnnnnnnnnnnnnnnnnnnnnnnnnnnnnnnnnnnnnnnnnnnnnnnnnnnnnnnnnnnnnnnnnnnnnnnnnnnnnnnnnnnnnnnnnnnnnnnnnnnnnnnnnnnnnnnnnnnnnnnnnnnnnnnnnnnnnnnnnnnnnnnnnnnnnnnnnnnnnnnnnnnnnnnnnnnnnnnnnnnnnnnnnnnnnnnnnnnnnnnnnnnnnnnnnnnnnnnnnnnnnnnnnnnnnnnnnnnnnnnnnnnnnnnnnnnnnnnnnnnnnnnnnnnnnnnnnnnnnnnnnnnnnnnnnnnnnnnnnnnnnnnnnnnnnnnnnnnnnnnnnnnnnnnnnnnnnnnnnnnnnnnnnnnnnnnnnnnnnnnnnnnnnnnnnnnnnnnnnnnnnnnnnnnnnnnnnnnnnnnnnnnnnnnnnnnnnnnnnnnnnnnnnnnnnnnnnnnnnnnnnnnnnnnnnnnnnnnnnnnnnnnnnnnnnnnnnnnnnnnnnnnnnnnnnnnnnnnnnnnnnnnnnnnnnnnnnnnnnnnnnnnnnnnnnnnnnnnnnnnnnnnnnnnnnnnnnnnnnnnnnnnnnnnnnnnnnnnnnnnnnnnnnnnnnnnnnnnnnnnnnnnnnnnnnnnnnnnnnnnnnnnnnnnnnnnnnnnnnnnnnnnnnnnnnnnnnnnnnnnnnnnnnnnnnnnnnnnnnnnnnnnnnnnnnnnnnnnnnnnnnnnnnnnnnnnnnnnnnnnnnnnnnnnnnnnnnnnnnnnnnnnnnnnnnnnnnnnnnnnnnnnnnnnnnnnnnnnnnnnnnnnnnnnnnnnnnnnnnnnnnnnnnnnnnnnnnnnnnnnnnnnnnnnnnnnnnnnnnnnnnnnnnnnnnnnnnnnnnnnnnnnnnnnnnnnnnnnnnnnnnnnnnnnnnnnnnnnnnnnnnnnnnnnnnnnnnnnnnnnnnnnnnnnnnnnnnnnnnnnnnnnnnnnnnnnnnnnnnnnnnnnnnnnnnnnnnnnnnnnnnnnnnnnnnnnnnnnnnnnnnnnnnnnnnnnnnnnnnnnnnnnnnnnnnnnnnnnnnnnnnnnnnnnnnnnnnnnnnnnnnnnnnnnnnnnnnnnnnnnnnnnnnnnnnnnnnnnnnnnnnnnnnnnnnnnnnnnnnnnnnnnnnnnnnnnnnnnnnnnnnnnnnnnnnnnnnnnnnnnnnnnnnnnnnnnnnnnnnnnnnnnnnnnnnnnnnnnnnnnnnnnnnnnnnnnnnnnnnnnnnnnnnnnnnnnnnnnnnnnnnnnnnnnnnnnnnnnnnnnnnnnnnnnnnnnnnnnnnnnnnnnnnnnnnnnnnnnnnnnnnnnnnnnnnnnnnnnnnnnnnnnnnnnnnnnnnnnnnnnnnnnnnnnnnnnnnnnnnnnnnnnnnnnnnnnnnnnnnnnnnnnnnnnnnnnnnnnnnnnnnnnnnnnnnnnnnnnnnnnnnnnnnnnnnnnnnnnnnnnnnnnnnnnnnnnnnnnnnnnnnnnnnnnnnnnnnnnnnnnnnnnnnnnnnnnnnnnnnnnnnnnnnnnnnnnnnnnnnnnnnnnnnnnnnnnnnnnnnnnnnnnnnnnnnnnnnnnnnnnnnnnnnnnnnnnnnnnnnnnnnnnnnnnnnnnnnnnnnnnnnnnnnnnnnnnnnnnnnnnnnnnnnnnnnnnnnnnnnnnnnnnnnnnnnnnnnnnnnnnnnnnnnnnnnnnnnnnnnnnnnnnnnnnnnnnnnnnnnnnnnnnnnnnnnnnnnnnnnnnnnnnnnnnnnnnnnnnnnnnnnnnnnnnnnnnnnnnnnnnnnnnnnnnnnnnnnnnnnnnnnnnnnnnnnnnnnnnnnnnnnnnnnnnnnnnnnnnnnnnnnnnnnnnnnnnnnnnnnnnnnnnnnnnnnnnnnnnnnnnnnnnnnnnnnnnnnnnnnnnnnnnnnnnnnnnnnnnnnnnnnnnnnnnnnnnnnnnnnnnnnnnnnnnnnnnnnnnnnnnnnnnnnnnnnnnnnnnnnnnnnnnnnnnnnnnnnnnnnnnnnnnnnnnnnnnnnnnnnnnnnnnnnnnnnnnnnnnnnnnnnnnnnnnnnnnnnnnnnnnnnnnnnnnnnnnnnnnnnnnnnnnnnnnnnnnnnnnnnnnnnnnnnnnnnnnnnnnnnnnnnnnnnnnnnnnnnnnnnnnnnnnnnnnnnnnnnnnnnnnnnnnnnnnnnnnnnnnnnnnnnnnnnnnnnnnnnnnnnnnnnnnnnnnnnnnnnnnnnnnnnnnnnnnnnnnnnnnnnnnnnnnnnnnnnnnnnnnnnnnnnnnnnnnnnnnnnnnnnnnnnnnnnnnnnnnnnnnnnnnnnnnnnnnnnnnnnnnnnnnnnnnnnnnnnnnnnnnnnnnnnnnnnnnnnnnnnnnnnnnnnnnnnnnnnnnnnnnnnnnnnnnnnnnnnnnnnnnnnnnnnnnnnnnnnnnnnnnnnnnnnnnnnnnnnnnnnnnnnnnnnnnnnnnnnnnnnnnnnnnnnnnnnnnnnnnnnnnnnnnnnnnnnnnnnnnnnnnnnnnnnnnnnnnnnnnnnnnnnnnnnnnnnnnnnnnnnnnnnnnnnnnnnnnnnnnnnnnnnnnnnnnnnnnnnnnnnnnnnnnnnnnnnnnnnnnnnnnnnnnnnnnnnnnnnnnnnnnnnnnnnnnnnnnnnnnnnnnnnnnnnnnnnnnnnnnnnnnnnnnnnnnnnnnnnnnnnnnnnnnnnnnnnnnnnnnnnnnnnnnnnnnnnnnnnnnnnnnnnnnnnnnnnnnnnnnnnnnnnnnnnnnnnnnnnnnnnnnnnnnnnnnnnnnnnnnnnnnnnnnnnnnnnnnnnnnnnnnnnnnnnnnnnnnnnnnnnnnnnnnnnnnnnnnnnnnnnnnnnnnnnnnnnnnnnnnnnnnnnnnnnnnnnnnnnnnnnnnnnnnnnnnnnnnnnnnnnnnnnnnnnnnnnnnnnnnnnnnnnnnnnnnnnnnnnnnnnnnnnnnnnnnnnnnnnnnnnnnnnnnnnnnnnnnnnnnnnnnnnnnnnnnnnnnnnnnnnnnnnnnnnnnnnnnnnnnnnnnnnnnnnnnnnnnnnnnnnnnnnnnnnnnnnnnnnnnnnnnnnnnnnnnnnnnnnnnnnnnnnnnnnnnnnnnnnnnnnnnnnnnnnnnnnnnnnnnnnnnnnnnnnnnnnnnnnnnnnnnnnnnnnnnnnnnnnnnnnnnnnnnnnnnnnnnnnnnnnnnnnnnnnnnnnnnnnnnnnnnnnnnnnnnnnnnnnnnnnnnnnnnnnnnnnnnnnnnnnnnnnnnnnnnnnnnnnnnnnnnnnnnnnnnnnnnnnnnnnnnnnnnnnnnnnnnnnnnnnnnnnnnnnnnnnnnnnnnnnnnnnnnnnnnnnnnnnnnnnnnnnnnnnnnnnnnnnnnnnnnnnnnnnnnnnnnnnnnnnnnnnnnnnnnnnnnnnnnnnnnnnnnnnnnnnnnnnnnnnnnnnnnnnnnnnnnnnnnnnnnnnnnnnnnnnnnnnnnnnnnnnnnnnnnnnnnnnnnnnnnnnnnnnnnnnnnnnnnnnnnnnnnnnnnnnnnnnnnnnnnnnnnnnnnnnnnnnnnnnnnnnnnnnnnnnnnnnnnnnnnnnnnnnnnnnnnnnnnnnnnnnnnnnnnnnnnnnnnnnnnnnnnnnnnnnnnnnnnnnnnnnnnnnnnnnnnnnnnnnnnnnnnnnnnnnnnnnnnnnnnnnnnnnnnnnnnnnnnnnnnnnnnnnnnnnnnnnnnnnnnnnnnnnnnnnnnnnnnnnnnnnnnnnnnnnnnnnnnnnnnnnnnnnnnnnnnnnnnnnnnnnnnnnnnnnnnnnnnnnnnnnnnnnnnnnnnnnnnnnnnnnnnnnnnnnnnnnnnnnnnnnnnnnnnnnnnnnnnnnnnnnnnnnnnnnnnnnnnnnnnnnnnnnnnnnnnnnnnnnnnnnnnnnnnnnnnnnnnnnnnnnnnnnnnnnnnnnnnnnnnnnnnnnnnnnnnnnnnnnnnnnnnnnnnnnnnnnnnnnnnnnnnnnnnnnnnnnnnnnnnnnnnnnnnnnnnnnnnnnnnnnnnnnnnnnnnnnnnnnnnnnnnnnnnnnnnnnnnnnnnnnnnnnnnnnnnnnnnnnnnnnnnnnnnnnnnnnnnnnnnnnnnnnnnnnnnnnnnnnnnnnnnnnnnnnnnnnnnnnnnnnnnnnnnnnnnnnnnnnnnnnnnnnnnnnnnnnnnnnnnnnnnnnnnnnnnnnnnnnnnnnnnnnnnnnnnnnnnnnnnnnnnnnnnnnnnnnnnnnnnnnnnnnnnnnnnnnnnnnnnnnnnnnnnnnnnnnnnnnnnnnnnnnnnnnnnnnnnnnnnnnnnnnnnnnnnnnnnnnnnnnnnnnnnnnnnnnnnnnnnnnnnnnnnnnnnnnnnnnnnnnnnnnnnnnnnnnnnnnnnnnnnnnnnnnnnnnnnnnnnnnnnnnnnnnnnnnnnnnnnnnnnnnnnnnnnnnnnnnnnnnnnnnnnnnnnnnnnnnnnnnnnnnnnnnnnnnnnnnnnnnnnnnnnnnnnnnnnnnnnnnnnnnnnnnnnnnnnnnnnnnnnnnnnnnnnnnnnnnnnnnnnnnnnnnnnnnnnnnnnnnnnnnnnnnnnnnnnnnnnnnnnnnnnnnnnnnnnnnnnnnnnnnnnnnnnnnnnnnnnnnnnnnnnnnnnnnnnnnnnnnnnnnnnnnnnnnnnnnnnnnnnnnnnnnnnnnnnnnnnnnnnnnnnnnnnnnnnnnnnnnnnnnnnnnnnnnnnnnnnnnnnnnnnnnnnnnnnnnnnnnnnnnnnnnnnnnnnnnnnnnnnnnnnnnnnnnnnnnnnnnnnnnnnnnnnnnnnnnnnnnnnnnnnnnnnnnnnnnnnnnnnnnnnnnnnnnnnnnnnnnnnnnnnnnnnnnnnnnnnnnnnnnnnnnnnnnnnnnnnnnnnnnnnnnnnnnnnnnnnnnnnnnnnnnnnnnnnnnnnnnnnnnnnnnnnnnnnnnnnnnnnnnnnnnnnnnnnnnnnnnnnnnnnnnnnnnnnnnnnnnnnnnnnnnnnnnnnnnnnnnnnnnnnnnnnnnnnnnnnnnnnnnnnnnnnnnnnnnnnnnnnnnnnnnnnnnnnnnnnnnnnnnnnnnnnnnnnnnnnnnnnnnnnnnnnnnnnnnnnnnnnnnnnnnnnnnnnnnnnnnnnnnnnnnnnnnnnnnnnnnnnnnnnnnnnnnnnnnnnnnnnnnnnnnnnnnnnnnnnnnnnnnnnnnnnnnnnnnnnnnnnnnnnnnnnnnnnnnnnnnnnnnnnnnnnnnnnnnnnnnnnnnnnnnnnnnnnnnnnnnnnnnnnnnnnnnnnnnnnnnnnnnnnnnnnnnnnnnnnnnnnnnnnnnnnnnnnnnnnnnnnnnnnnnnnnnnnnnnnnnnnnnnnnnnnnnnnnnnnnnnnnnnnnnnnnnnnnnnnnnnnnnnnnnnnnnnnnnnnnnnnnnnnnnnnnnnnnnnnnnnnnnnnnnnnnnnnnnnnnnnnnnnnnnnnnnnnnnnnnnnnnnnnnnnnnnnnnnnnnnnnnnnnnnnnnnnnnnnnnnnnnnnnnnnnnnnnnnnnnnnnnnnnnnnnnnnnnnnnnnnnnnnnnnnnnnnnnnnnnnnnnnnnnnnnnnnnnnnnnnnnnnnnnnnnnnnnnnnnnnnnnnnnnnnnnnnnnnnnnnnnnnnnnnnnnnnnnnnnnnnnnnnnnnnnnnnnnnnnnnnnnnnnnnnnnnnnnnnnnnnnnnnnnnnnnnnnnnnnnnnnnnnnnnnnnnnnnnnnnnnnnnnnnnnnnnnnnnnnnnnnnnnnnnnnnnnnnnnnnnnnnnnnnnnnnnnnnnnnnnnnnnnnnnnnnnnnnnnnnnnnnnnnnnnnnnnnnnnnnnnnnnnnnnnnnnnnnnnnnnnnnnnnnnnnnnnnnnnnnnnnnnnnnnnnnnnnnnnnnnnnnnnnnnnnnnnnnnnnnnnnnnnnnnnnnnnnnnnnnnnnnnnnnnnnnnnnnnnnnnnnnnnnnnnnnnnnnnnnnnnnnnnnnnnnnnnnnnnnnnnnnnnnnnnnnnnnnnnnnnnnnnnnnnnnnnnnnnnnnnnnnnnnnnnnnnnnnnnnnnnnnnnnnnnnnnnnnnnnnnnnnnnnnnnnnnnnnnnnnnnnnnnnnnnnnnnnnnnnnnnnnnnnnnnnnnnnnnnnnnnnnnnnnnnnnnnnnnnnnnnnnnnnnnnnnnnnnnnnnnnnnnnnnnnnnnnnnnnnnnnnnnnnnnnnnnnnnnnnnnnnnnnnnnnnnnnnnnnnnnnnnnnnnnnnnnnnnnnnnnnnnnnnnnnnnnnnnnnnnnnnnnnnnnnnnnnnnnnnnnnnnnnnnnnnnnnnnnnnnnnnnnnnnnnnnnnnnnnnnnnnnnnnnnnnnnnnnnnnnnnnnnnnnnnnnnnnnnnnnnnnnnnnnnnnnnnnnnnnnnnnnnnnnnnnnnnnnnnnnnnnnnnnnnnnnnnnnnnnnnnnnnnnnnnnnnnnnnnnnnnnnnnnnnnnnnnnnnnnnnnnnnnnnnnnnnnnnnnnnnnnnnnnnnnnnnnnnnnnnnnnnnnnnnnnnnnnnnnnnnnnnnnnnnnnnnnnnnnnnnnnnnnnnnnnnnnnnnnnnnnnnnnnnnnnnnnnnnnnnnnnnnnnnnnnnnnnnnnnnnnnnnnnnnnnnnnnnnnnnnnnnnnnnnnnnnnnnnnnnnnnnnnnnnnnnnnnnnnnnnnnnnnnnnnnnnnnnnnnnnnnnnnnnnnnnnnnnnnnnnnnnnnnnnnnnnnnnnnnnnnnnnnnnnnnnnnnnnnnnnnnnnnnnnnnnnnnnnnnnnnnnnnnnnnnnnnnnnnnnnnnnnnnnnnnnnnnnnnnnnnnnnnnnnnnnnnnnnnnnnnnnnnnnnnnnnnnnnnnnnnnnnnnnnnnnnnnnnnnnnnnnnnnnnnnnnnnnnnnnnnnnnnnnnnnnnnnnnnnnnnnnnnnnnnnnnnnnnnnnnnnnnnnnnnnnnnnnnnnnnnnnnnnnnnnnnnnnnnnnnnnnnnnnnnnnnnnnnnnnnnnnnnnnnnnnnnnnnnnnnnnnnnnnnnnnnnnnnnnnnnnnnnnnnnnnnnnnnnnnnnnnnnnnnnnnnnnnnnnnnnnnnnnnnnnnnnnnnnnnnnnnnnnnnnnnnnnnnnnnnnnnnnnnnnnnnnnnnnnnnnnnnnnnnnnnnnnnnnnnnnnnnnnnnnnnnnnnnnnnnnnnnnnnnnnnnnnnnnnnnnnnnnnnnnnnnnnnnnnnnnnnnnnnnnnnnnnnnnnnnnnnnnnnnnnnnnnnnnnnnnnnnnnnnnnnnnnnnnnnnnnnnnnnnnnnnnnnnnnnnnnnnnnnnnnnnnnnnnnnnnnnnnnnnnnnnnnnnnnnnnnnnnnnnnnnnnnnnnnnnnnnnnnnnnnnnnnnnnnnnnnnnnnnnnnnnnnnnnnnnnnnnnnnnnnnnnnnnnnnnnnnnnnnnnnnnnnnnnnnnnnnnnnnnnnnnnnnnnnnnnnnnnnnnnnnnnnnnnnnnnnnnnnnnnnnnnnnnnnnnnnnnnnnnnnnnnnnnnnnnnnnnnnnnnnnnnnnnnnnnnnnnnnnnnnnnnnnnnnnnnnnnnnnnnnnnnnnnnnnnnnnnnnnnnnnnnnnnnnnnnnnnnnnnnnnnnnnnnnnnnnnnnnnnnnnnnnnnnnnnnnnnnnnnnnnnnnnnnnnnnnnnnnnnnnnnnnnnnnnnnnnnnnnnnnnnnnnnnnnnnnnnnnnnnnnnnnnnnnnnnnnnnnnnnnnnnnnnnnnnnnnnnnnnnnnnnnnnnnnnnnnnnnnnnnnnnnnnnnnnnnnnnnnnnnnnnnnnnnnnnnnnnnnnnnnnnnnnnnnnnnnnnnnnnnnnnnnnnnnnnnnnnnnnnnnnnnnnnnnnnnnnnnnnnnnnnnnnnnnnnnnnnnnnnnnnnnnnnnnnnnnnnnnnnnnnnnnnnnnnnnnnnnnnnnnnnnnnnnnnnnnnnnnnnnnnnnnnnnnnnnnnnnnnnnnnnnnnnnnnnnnnnnnnnnnnnnnnnnnnnnnnnnnnnnnnnnnnnnnnnnnnnnnnnnnnnnnnnnnnnnnnnnnnnnnnnnnnnnnnnnnnnnnnnnnnnnnnnnnnnnnnnnnnnnnnnnnnnnnnnnnnnnnnnnnnnnnnnnnnnnnnnnnnnnnnnnnnnnnnnnnnnnnnnnnnnnnnnnnnnnnnnnnnnnnnnnnnnnnnnnnnnnnnnnnnnnnnnnnnnnnnnnnnnnnnnnnnnnnnnnnnnnnnnnnnnnnnnnnnnnnnnnnnnnnnnnnnnnnnnnnnnnnnnnnnnnnnnnnnnnnnnnnnnnnnnnnnnnnnnnnnnnnnnnnnnnnnnnnnnnnnnnnnnnnnnnnnnnnnnnnnnnnnnnnnnnnnnnnnnnnnnnnnnnnnnnnnnnnnnnnnnnnnnnnnnnnnnnnnnnnnnnnnnnnnnnnnnnnnnnnnnnnnnnnnnnnnnnnnnnnnnnnnnnnnnnnnnnnnnnnnnnnnnnnnnnnnnnnnnnnnnnnnnnnnnnnnnnnnnnnnnnnnnnnnnnnnnnnnnnnnnnnnnnnnnnnnnnnnnnnnnnnnnnnnnnnnnnnnnnnnnnnnnnnnnnnnnnnnnnnnnnnnnnnnnnnnnnnnnnnnnnnnnnnnnnnnnnnnnnnnnnnnnnnnnnnnnnnnnnnnnnnnnnnnnnnnnnnnnnnnnnnnnnnnnnnnnnnnnnnnnnnnnnnnnnnnnnnnnnnnnnnnnnnnnnnnnnnnnnnnnnnnnnnnnnnnnnnnnnnnnnnnnnnnnnnnnnnnnnnnnnnnnnnnnnnnnnnnnnnnnnnnnnnnnnnnnnnnnnnnnnnnnnnnnnnnnnnnnnnnnnnnnnnnnnnnnnnnnnnnnnnnnnnnnnnnnnnnnnnnnnnnnnnnnnnnnnnnnnnnnnnnnnnnnnnnnnnnnnnnnnnnnnnnnnnnnnnnnnnnnnnnnnnnnnnnnnnnnnnnnnnnnnnnnnnnnnnnnnnnnnnnnnnnnnnnnnnnnnnnnnnnnnnnnnnnnnnnnnnnnnnnnnnnnnnnnnnnnnnnnnnnnnnnnnnnnnnnnnnnnnnnnnnnnnnnnnnnnnnnnnnnnnnnnnnnnnnnnnnnnnnnnnnnnnnnnnnnnnnnnnnnnnnnnnnnnnnnnnnnnnnnnnnnnnnnnnnnnnnnnnnnnnnnnnnnnnnnnnnnnnnnnnnnnnnnnnnnnnnnnnnnnnnnnnnnnnnnnnnnnnnnnnnnnnnnnnnnnnnnnnnnnnnnnnnnnnnnnnnnnnnnnnnnnnnnnnnnnnnnnnnnnnnnnnnnnnnnnnnnnnnnnnnnnnnnnnnnnnnnnnnnnnnnnnnnnnnnnnnnnnnnnnnnnnnnnnnnnnnnnnnnnnnnnnnnnnnnnnnnnnnnnnnnnnnnnnnnnnnnnnnnnnnnnnnnnnnnnnnnnnnnnnnnnnnnnnnnnnnnnnnnnnnnnnnnnnnnnnnnnnnnnnnnnnnnnnnnnnnnnnnnnnnnnnnnnnnnnnnnnnnnnnnnnnnnnnnnnnnnnnnnnnnnnnnnnnnnnnnnnnnnnnnnnnnnnnnnnnnnnnnnnnnnnnnnnnnnnnnnnnnnnnnnnnnnnnnnnnnnnnnnnnnnnnnnnnnnnnnnnnnnnnnnnnnnnnnnnnnnnnnnnnnnnnnnnnnnnnnnnnnnnnnnnnnnnnnnnnnnnnnnnnnnnnnnnnnnnnnnnnnnnnnnnnnnnnnnnnnnnnnnnnnnnnnnnnnnnnnnnnnnnnnnnnnnnnnnnnnnnnnnnnnnnnnnnnnnnnnnnnnnnnnnnnnnnnnnnnnnnnnnnnnnnnnnnnnnnnnnnnnnnnnnnnnnnnnnnnnnnnnnnnnnnnnnnnnnnnnnnnnnnnnnnnnnnnnnnnnnnnnnnnnnnnnnnnnnnnnnnnnnnnnnnnnnnnnnnnnnnnnnnnnnnnnnnnnnnnnnnnnnnnnnnnnnnnnnnnnnnnnnnnnnnnnnnnnnnnnnnnnnnnnnnnnnnnnnnnnnnnnnnnnnnnnnnnnnnnnnnnnnnnnnnnnnnnnnnnnnnnnnnnnnnnnnnnnnnnnnnnnnnnnnnnnnnnnnnnnnnnnnnnnnnnnnnnnnnnnnnnnnnnnnnnnnnnnnnnnnnnnnnnnnnnnnnnnnnnnnnnnnnnnnnnnnnnnnnnnnnnnnnnnnnnnnnnnnnnnnnnnnnnnnnnnnnnnnnnnnnnnnnnnnnnnnnnnnnnnnnnnnnnnnnnnnnnnnnnnnnnnnnnnnnnnnnnnnnnnnnnnnnnnnnnnnnnnnnnnnnnnnnnnnnnnnnnnnnnnnnnnnnnnnnnnnnnnnnnnnnnnnnnnnnnnnnnnnnnnnnnnnnnnnnnnnnnnnnnnnnnnnnnnnnnnnnnnnnnnnnnnnnnnnnnnnnnnnnnnnnnnnnnnnnnnnnnnnnnnnnnnnnnnnnnnnnnnnnnnnnnnnnnnnnnnnnnnnnnnnnnnnnnnnnnnnnnnnnnnnnnnnnnnnnnnnnnnnnnnnnnnnnnnnnnnnnnnnnnnnnnnnnnnnnnnnnnnnnnnnnnnnnnnnnnnnnnnnnnnnnnnnnnnnnnnnnnnnnnnnnnnnnnnnnnnnnnnnnnnnnnnnnnnnnnnnnnnnnnnnnnnnnnnnnnnnnnnnnnnnnnnnnnnnnnnnnnnnnnnnnnnnnnnnnnnnnnnnnnnnnnnnnnnnnnnnnnnnnnnnnnnnnnnnnnnnnnnnnnnnnnnnnnnnnnnnnnnnnnnnnnnnnnnnnnnnnnnnnnnnnnnnnnnnnnnnnnnnnnnnnnnnnnnnnnnnnnnnnnnnnnnnnnnnnnnnnnnnnnnnnnnnnnnnnnnnnnnnnnnnnnnnnnnnnnnnnnnnnnnnnnnnnnnnnnnnnnnnnnnnnnnnnnnnnnnnnnnnnnnnnnnnnnnnnnnnnnnnnnnnnnnnnnnnnnnnnnnnnnnnnnnnnnnnnnnnnnnnnnnnnnnnnnnnnnnnnnnnnnnnnnnnnnnnnnnnnnnnnnnnnnnnnnnnnnnnnnnnnnnnnnnnnnnnnnnnnnnnnnnnnnnnnnnnnnnnnnnnnnnnnnnnnnnnnnnnnnnnnnnnnnnnnnnnnnnnnnnnnnnnnnnnnnnnnnnnnnnnnnnnnnnnnnnnnnnnnnnnnnnnnnnnnnnnnnnnnnnnnnnnnnnnnnnnnnnnnnnnnnnnnnnnnnnnnnnnnnnnnnnnnnnnnnnnnnnnnnnnnnnnnnnnnnnnnnnnnnnnnnnnnnnnnnnnnnnnnnnnnnnnnnnnnnnnnnnnnnnnnnnnnnnnnnnnnnnnnnnnnnnnnnnnnnnnnnnnnnnnnnnnnnnnnnnnnnnnnnnnnnnnnnnnnnnnnnnnnnnnnnnnnnnnnnnnnnnnnnnnnnnnnnnnnnnnnnnnnnnnnnnnnnnnnnnnnnnnnnnnnnnnnnnnnnnnnnnnnnnnnnnnnnnnnnnnnnnnnnnnnnnnnnnnnnnnnnnnnnnnnnnnnnnnnnnnnnnnnnnnnnnnnnnnnnnnnnnnnnnnnnnnnnnnnnnnnnnnnnnnnnnnnnnnnnnnnnnnnnnnnnnnnnnnnnnnnnnnnnnnnnnnnnnnnnnnnnnnnnnnnnnnnnnnnnnnnnnnnnnnnnnnnnnnnnnnnnnnnnnnnnnnnnnnnnnnnnnnnnnnnnnnnnnnnnnnnnnnnnnnnnnnnnnnnnnnnnnnnnnnnnnnnnnnnnnnnnnnnnnnnnnnnnnnnnnnnnnnnnnnnnnnnnnnnnnnnnnnnnnnnnnnnnnnnnnnnnnnnnnnnnnnnnnnnnnnnnnnnnnnnnnnnnnnnnnnnnnnnnnnnnnnnnnnnnnnnnnnnnnnnnnnnnnnnnnnnnnnnnnnnnnnnnnnnnnnnnnnnnnnnnnnnnnnnnnnnnnnnnnnnnnnnnnnnnnnnnnnnnnnnnnnnnnnnnnnnnnnnnnnnnnnnnnnnnnnnnnnnnnnnnnnnnnnnnnnnnnnnnnnnnnnnnnnnnnnnnnnnnnnnnnnnnnnnnnnnnnnnnnnnnnnnnnnnnnnnnnnnnnnnnnnnnnnnnnnnnnnnnnnnnnnnnnnnnnnnnnnnnnnnnnnnnnnnnnnnnnnnnnnnnnnnnnnnnnnnnnnnnnnnnnnnnnnnnnnnnnnnnnnnnnnnnnnnnnnnnnnnnnnnnnnnnnnnnnnnnnnnnnnnnnnnnnnnnnnnnnnnnnnnnnnnnnnnnnnnnnnnnnnnnnnnnnnnnnnnnnnnnnnnnnnnnnnnnnnnnnnnnnnnnnnnnnnnnnnnnnnnnnnnnnnnnnnnnnnnnnnnnnnnnnnnnnnnnnnnnnnnnnnnnnnnnnnnnnnnnnnnnnnnnnnnnnnnnnnnnnnnnnnnnnnnnnnnnnnnnnnnnnnnnnnnnnnnnnnnnnnnnnnnnnnnnnnnnnnnnnnnnnnnnnnnnnnnnnnnnnnnnnnnnnnnnnnnnnnnnnnnnnnnnnnnnnnnnnnnnnnnnnnnnnnnnnnnnnnnnnnnnnnnnnnnnnnnnnnnnnnnnnnnnnnnnnnnnnnnnnnnnnnnnnnnnnnnnnnnnnnnnnnnnnnnnnnnnnnnnnnnnnnnnnnnnnnnnnnnnnnnnnnnnnnnnnnnnnnnnnnnnnnnnnnnnnnnnnnnnnnnnnnnnnnnnnnnnnnnnnnnnnnnnnnnnnnnnnnnnnnnnnnnnnnnnnnnnnnnnnnnnnnnnnnnnnnnnnnnnnnnnnnnnnnnnnnnnnnnnnnnnnnnnnnnnnnnnnnnnnnnnnnnnnnnnnnnnnnnnnnnnnnnnnnnnnnnnnnnnnnnnnnnnnnnnnnnnnnnnnnnnnnnnnnnnnnnnnnnnnnnnnnnnnnnnnnnnnnnnnnnnnnnnnnnnnnnnnnnnnnnnnnnnnnnnnnnnnnnnnnnnnnnnnnnnnnnnnnnnnnnnnnnnnnnnnnnnnnnnnnnnnnnnnnnnnnnnnnnnnnnnnnnnnnnnnnnnnnnnnnnnnnnnnnnnnnnnnnnnnnnnnnnnnnnnnnnnnnnnnnnnnnnnnnnnnnnnnnnnnnnnnnnnnnnnnnnnnnnnnnnnnnnnnnnnnnnnnnnnnnnnnnnnnnnnnnnnnnnnnnnnnnnnnnnnnnnnnnnnnnnnnnnnnnnnnnnnnnnnnnnnnnnnnnnnnnnnnnnnnnnnnnnnnnnnnnnnnnnnnnnnnnnnnnnnnnnnnnnnnnnnnnnnnnnnnnnnnnnnnnnnnnnnnnnnnnnnnnnnnnnnnnnnnnnnnnnnnnnnnnnnnnnnnnnnnnnnnnnnnnnnnnnnnnnnnnnnnnnnnnnnnnnnnnnnnnnnnnnnnnnnnnnnnnnnnnnnnnnnnnnnnnnnnnnnnnnnnnnnnnnnnnnnnnnnnnnnnnnnnnnnnnnnnnnnnnnnnnnnnnnnnnnnnnnnnnnnnnnnnnnnnnnnnnnnnnnnnnnnnnnnnnnnnnnnnnnnnnnnnnnnnnnnnnnnnnnnnnnnnnnnnnnnnnnnnnnnnnnnnnnnnnnnnnnnnnnnnnnnnnnnnnnnnnnnnnnnnnnnnnnnnnnnnnnnnnnnnnnnnnnnnnnnnnnnnnnnnnnnnnnnnnnnnnnnnnnnnnnnnnnnnnnnnnnnnnnnnnnnnnnnnnnnnnnnnnnnnnnnnnnnnnnnnnnnnnnnnnnnnnnnnnnnnnnnnnnnnnnnnnnnnnnnnnnnnnnnnnnnnnnnnnnnnnnnnnnnnnnnnnnnnnnnnnnnnnnnnnnnnnnnnnnnnnnnnnnnnnnnnnnnnnnnnnnnnnnnnnnnnnnnnnnnnnnnnnnnnnnnnnnnnnnnnnnnnnnnnnnnnnnnnnnnnnnnnnnnnnnnnnnnnnnnnnnnnnnnnnnnnnnnnnnnnnnnnnnnnnnnnnnnnnnnnnnnnnnnnnnnnnnnnnnnnnnnnnnnnnnnnnnnnnnnnnnnnnnnnnnnnnnnnnnnnnnnnnnnnnnnnnnnnnnnnnnnnnnnnnnnnnnnnnnnnnnnnnnnnnnnnnnnnnnnnnnnnnnnnnnnnnnnnnnnnnnnnnnnnnnnnnnnnnnnnnnnnnnnnnnnnnnnnnnnnnnnnnnnnnnnnnnnnnnnnnnnnnnnnnnnnnnnnnnnnnnnnnnnnnnnnnnnnnnnnnnnnnnnnnnnnnnnnnnnnnnnnnnnnnnnnnnnnnnnnnnnnnnnnnnnnnnnnnnnnnnnnnnnnnnnnnnnnnnnnnnnnnnnnnnnnnnnnnnnnnnnnnnnnnnnnnnnnnnnnnnnnnnnnnnnnnnnnnnnnnnnnnnnnnnnnnnnnnnnnnnnnnnnnnnnnnnnnnnnnnnnnnnnnnnnnnnnnnnnnnnnnnnnnnnnnnnnnnnnnnnnnnnnnnnnnnnnnnnnnnnnnnnnnnnnnnnnnnnnnnnnnnnnnnnnnnnnnnnnnnnnnnnnnnnnnnnnnnnnnnnnnnnnnnnnnnnnnnnnnnnnnnnnnnnnnnnnnnnnnnnnnnnnnnnnnnnnnnnnnnnnnnnnnnnnnnnnnnnnnnnnnnnnnnnnnnnnnnnnnnnnnnnnnnnnnnnnnnnnnnnnnnnnnnnnnnnnnnnnnnnnnnnnnnnnnnnnnnnnnnnnnnnnnnnnnnnnnnnnnnnnnnnnnnnnnnnnnnnnnnnnnnnnnnnnnnnnnnnnnnnnnnnnnnnnnnnnnnnnnnnnnnnnnnnnnnnnnnnnnnnnnnnnnnnnnnnnnnnnnnnnnnnnnnnnnnnnnnnnnnnnnnnnnnnnnnnnnnnnnnnnnnnnnnnnnnnnnnnnnnnnnnnnnnnnnnnnnnnnnnnnnnnnnnnnnnnnnnnnnnnnnnnnnnnnnnnnnnnnnnnnnnnnnnnnnnnnnnnnnnnnnnnnnnnnnnnnnnnnnnnnnnnnnnnnnnnnnnnnnnnnnnnnnnnnnnnnnnnnnnnnnnnnnnnnnnnnnnnnnnnnnnnnnnnnnnnnnnnnnnnnnnnnnnnnnnnnnnnnnnnnnnnnnnnnnnnnnnnnnnnnnnnnnnnnnnnnnnnnnnnnnnnnnnnnnnnnnnnnnnnnnnnnnnnnnnnnnnnnnnnnnnnnnnnnnnnnnnnnnnnnnnnnnnnnnnnnnnnnnnnnnnnnnnnnnnnnnnnnnnnnnnnnnnnnnnnnnnnnnnnnnnnnnnnnnnnnnnnnnnnnnnnnnnnnnnnnnnnnnnnnnnnnnnnnnnnnnnnnnnnnnnnnnnnnnnnnnnnnnnnnnnnnnnnnnnnnnnnnnnnnnnnnnnnnnnnnnnnnnnnnnnnnnnnnnnnnnnnnnnnnnnnnnnnnnnnnnnnnnnnnnnnnnnnnnnnnnnnnnnnnnnnnnnnnnnnnnnnnnnnnnnnnnnnnnnnnnnnnnnnnnnnnnnnnnnnnnnnnnnnnnnnnnnnnnnnnnnnnnnnnnnnnnnnnnnnnnnnnnnnnnnnnnnnnnnnnnnnnnnnnnnnnnnnnnnnnnnnnnnnnnnnnnnnnnnnnnnnnnnnnnnnnnnnnnnnnnnnnnnnnnnnnnnnnnnnnnnnnnnnnnnnnnnnnnnnnnnnnnnnnnnnnnnnnnnnnnnnnnnnnnnnnnnnnnnnnnnnnnnnnnnnnnnnnnnnnnnnnnnnnnnnnnnnnnnnnnnnnnnnnnnnnnnnnnnnnnnnnnnnnnnnnnnnnnnnnnnnnnnnnnnnnnnnnnnnnnnnnnnnnnnnnnnnnnnnnnnnnnnnnnnnnnnnnnnnnnnnnnnnnnnnnnnnnnnnnnnnnnnnnnnnnnnnnnnnnnnnnnnnnnnnnnnnnnnnnnnnnnnnnnnnnnnnnnnnnnnnnnnnnnnnnnnnnnnnnnnnnnnnnnnnnnnnnnnnnnnnnnnnnnnnnnnnnnnnnnnnnnnnnnnnnnnnnnnnnnnnnnnnnnnnnnnnnnnnnnnnnnnnnnnnnnnnnnnnnnnnnnnnnnnnnnnnnnnnnnnnnnnnnnnnnnnnnnnnnnnnnnnnnnnnnnnnnnnnnnnnnnnnnnnnnnnnnnnnnnnnnnnnnnnnnnnnnnnnnnnnnnnnnnnnnnnnnnnnnnnnnnnnnnnnnnnnnnnnnnnnnnnnnnnnnnnnnnnnnnnnnnnnnnnnnnnnnnnnnnnnnnnnnnnnnnnnnnnnnnnnnnnnnnnnnnnnnnnnnnnnnnnnnnnnnnnnnnnnnnnnnnnnnnnnnnnnnnnnnnnnnnnnnnnnnnnnnnnnnnnnnnnnnnnnnnnnnnnnnnnnnnnnnnnnnnnnnnnnnnnnnnnnnnnnnnnnnnnnnnnnnnnnnnnnnnnnnnnnnnnnnnnnnnnnnnnnnnnnnnnnnnnnnnnnnnnnnnnnnnnnnnnnnnnnnnnnnnnnnnnnnnnnnnnnnnnnnnnnnnnnnnnnnnnnnnnnnnnnnnnnnnnnnnnnnnnnnnnnnnnnnnnnnnnnnnnnnnnnnnnnnnnnnnnnnnnnnnnnnnnnnnnnnnnnnnnnnnnnnnnnnnnnnnnnnnnnnnnnnnnnnnnnnnnnnnnnnnnnnnnnnnnnnnnnnnnnnnnnnnnnnnnnnnnnnnnnnnnnnnnnnnnnnnnnnnnnnnnnnnnnnnnnnnnnnnnnnnnnnnnnnnnnnnnnnnnnnnnnnnnnnnnnnnnnnnnnnnnnnnnnnnnnnnnnnnnnnnnnnnnnnnnnnnnnnnnnnnnnnnnnnnnnnnnnnnnnnnnnnnnnnnnnnnnnnnnnnnnnnnnnnnnnnnnnnnnnnnnnnnnnnnnnnnnnnnnnnnnnnnnnnnnnnnnnnnnnnnnnnnnnnnnnnnnnnnnnnnnnnnnnnnnnnnnnnnnnnnnnnnnnnnnnnnnnnnnnnnnnnnnnnnnnnnnnnnnnnnnnnnnnnnnnnnnnnnnnnnnnnnnnnnnnnnnnnnnnnnnnnnnnnnnnnnnnnnnnnnnnnnnnnnnnnnnnnnnnnnnnnnnnnnnnnnnnnnnnnnnnnnnnnnnnnnnnnnnnnnnnnnnnnnnnnnnnnnnnnnnnnnnnnnnnnnnnnnnnnnnnnnnnnnnnnnnnnnnnnnnnnnnnnnnnnnnnnnnnnnnnnnnnnnnnnnnnnnnnnnnnnnnnnnnnnnnnnnnnnnnnnnnnnnnnnnnnnnnnnnnnnnnnnnnnnnnnnnnnnnnnnnnnnnnnnnnnnnnnnnnnnnnnnnnnnnnnnnnnnnnnnnnnnnnnnnnnnnnnnnnnnnnnnnnnnnnnnnnnnnnnnnnnnnnnnnnnnnnnnnnnnnnnnnnnnnnnnnnnnnnnnnnnnnnnnnnnnnnnnnnnnnnnnnnnnnnnnnnnnnnnnnnnnnnnnnnnnnnnnnnnnnnnnnnnnnnnnnnnnnnnnnnnnnnnnnnnnnnnnnnnnnnnnnnnnnnnnnnnnnnnnnnnnnnnnnnnnnnnnnnnnnnnnnnnnnnnnnnnnnnnnnnnnnnnnnnnnnnnnnnnnnnnnnnnnnnnnnnnnnnnnnnnnnnnnnnnnnnnnnnnnnnnnnnnnnnnnnnnnnnnnnnnnnnnnnnnnnnnnnnnnnnnnnnnnnnnnnnnnnnnnnnnnnnnnnnnnnnnnnnnnnnnnnnnnnnnnnnnnnnnnnnnnnnnnnnnnnnnnnnnnnnnnnnnnnnnnnnnnnnnnnnnnnnnnnnnnnnnnnnnnnnnnnnnnnnnnnnnnnnnnnnnnnnnnnnnnnnnnnnnnnnnnnnnnnnnnnnnnnnnnnnnnnnnnnnnnnnnnnnnnnnnnnnnnnnnnnnnnnnnnnnnnnnnnnnnnnnnnnnnnnnnnnnnnnnnnnnnnnnnnnnnnnnnnnnnnnnnnnnnnnnnnnnnnnnnnnnnnnnnnnnnnnnnnnnnnnnnnnnnnnnnnnnnnnnnnnnnnnnnnnnnnnnnnnnnnnnnnnnnnnnnnnnnnnnnnnnnnnnnnnnnnnnnnnnnnnnnnnnnnnnnnnnnnnnnnnnnnnnnnnnnnnnnnnnnnnnnnnnnnnnnnnnnnnnnnnnnnnnnnnnnnnnnnnnnnnnnnnnnnnnnnnnnnnnnnnnnnnnnnnnnnnnnnnnnnnnnnnnnnnnnnnnnnnnnnnnnnnnnnnnnnnnnnnnnnnnnnnnnnnnnnnnnnnnnnnnnnnnnnnnnnnnnnnnnnnnnnnnnnnnnnnnnnnnnnnnnnnnnnnnnnnnnnnnnnnnnnnnnnnnnnnnnnnnnnnnnnnnnnnnnnnnnnnnnnnnnnnnnnnnnnnnnnnnnnnnnnnnnnnnnnnnnnnnnnnnnnnnnnnnnnnnnnnnnnnnnnnnnnnnnnnnnnnnnnnnnnnnnnnnnnnnnnnnnnnnnnnnnnnnnnnnnnnnnnnnnnnnnnnnnnnnnnnnnnnnnnnnnnnnnnnnnnnnnnnnnnnnnnnnnnnnnnnnnnnnnnnnnnnnnnnnnnnnnnnnnnnnnnnnnnnnnnnnnnnnnnnnnnnnnnnnnnnnnnnnnnnnnnnnnnnnnnnnnnnnnnnnnnnnnnnnnnnnnnnnnnnnnnnnnnnnnnnnnnnnnnnnnnnnnnnnnnnnnnnnnnnnnnnnnnnnnnnnnnnnnnnnnnnnnnnnnnnnnnnnnnnnnnnnnnnnnnnnnnnnnnnnnnnnnnnnnnnnnnnnnnnnnnnnnnnnnnnnnnnnnnnnnnnnnnnnnnnnnnnnnnnnnnnnnnnnnnnnnnnnnnnnnnnnnnnnnnnnnnnnnnnnnnnnnnnnnnnnnnnnnnnnnnnnnnnnnnnnnnnnnnnnnnnnnnnnnnnnnnnnnnnnnnnnnnnnnnnnnnnnnnnnnnnnnnnnnnnnnnnnnnnnnnnnnnnnnnnnnnnnnnnnnnnnnnnnnnnnnnnnnnnnnnnnnnnnnnnnnnnnnnnnnnnnnnnnnnnnnnnnnnnnnnnnnnnnnnnnnnnnnnnnnnnnnnnnnnnnnnnnnnnnnnnnnnnnnnnnnnnnnnnnnnnnnnnnnnnnnnnnnnnnnnnnnnnnnnnnnnnnnnnnnnnnnnnnnnnnnnnnnnnnnnnnnnnnnnnnnnnnnnnnnnnnnnnnnnnnnnnnnnnnnnnnnnnnnnnnnnnnnnnnnnnnnnnnnnnnnnnnnnnnnnnnnnnnnnnnnnnnnnnnnnnnnnnnnnnnnnnnnnnnnnnnnnnnnnnnnnnnnnnnnnnnnnnnnnnnnnnnnnnnnnnnnnnnnnnnnnnnnnnnnnnnnnnnnnnnnnnnnnnnnnnnnnnnnnnnnnnnnnnnnnnnnnnnnnnnnnnnnnnnnnnnnnnnnnnnnnnnnnnnnnnnnnnnnnnnnnnnnnnnnnnnnnnnnnnnnnnnnnnnnnnnnnnnnnnnnnnnnnnnnnnnnnnnnnnnnnnnnnnnnnnnnnnnnnnnnnnnnnnnnnnnnnnnnnnnnnnnnnnnnnnnnnnnnnnnnnnnnnnnnnnnnnnnnnnnnnnnnnnnnnnnnnnnnnnnnnnnnnnnnnnnnnnnnnnnnnnnnnnnnnnnnnnnnnnnnnnnnnnnnnnnnnnnnnnnnnnnnnnnnnnnnnnnnnnnnnnnnnnnnnnnnnnnnnnnnnnnnnnnnnnnnnnnnnnnnnnnnnnnnnnnnnnnnnnnnnnnnnnnnnnnnnnnnnnnnnnnnnnnnnnnnnnnnnnnnnnnnnnnnnnnnnnnnnnnnnnnnnnnnnnnnnnnnnnnnnnnnnnnnnnnnnnnnnnnnnnnnnnnnnnnnnnnnnnnnnnnnnnnnnnnnnnnnnnnnnnnnnnnnnnnnnnnnnnnnnnnnnnnnnnnnnnnnnnnnnnnnnnnnnnnnnnnnnnnnnnnnnnnnnnnnnnnnnnnnnnnnnnnnnnnnnnnnnnnnnnnnnnnnnnnnnnnnnnnnnnnnnnnnnnnnnnnnnnnnnnnnnnnnnnnnnnnnnnnnnnnnnnnnnnnnnnnnnnnnnnnnnnnnnnnnnnnnnnnnnnnnnnnnnnnnnnnnnnnnnnnnnnnnnnnnnnnnnnnnnnnnnnnnnnnnnnnnnnnnnnnnnnnnnnnnnnnnnnnnnnnnnnnnnnnnnnnnnnnnnnnnnnnnnnnnnnnnnnnnnnnnnnnnnnnnnnnnnnnnnnnnnnnnnnnnnnnnnnnnnnnnnnnnnnnnnnnnnnnnnnnnnnnnnnnnnnnnnnnnnnnnnnnnnnnnnnnnnnnnnnnnnnnnnnnnnnnnnnnnnnnnnnnnnnnnnnnnnnnnnnnnnnnnnnnnnnnnnnnnnnnnnnnnnnnnnnnnnnnnnnnnnnnnnnnnnnnnnnnnnnnnnnnnnnnnnnnnnnnnnnnnnnnnnnnnnnnnnnnnnnnnnnnnnnnnnnnnnnnnnnnnnnnnnnnnnnnnnnnnnnnnnnnnnnnnnnnnnnnnnnnnnnnnnnnnnnnnnnnnnnnnnnnnnnnnnnnnnnnnnnnnnnnnnnnnnnnnnnnnnnnnnnnnnnnnnnnnnnnnnnnnnnnnnnnnnnnnnnnnnnnnnnnnnnnnnnnnnnnnnnnnnnnnnnnnnnnnnnnnnnnnnnnnnnnnnnnnnnnnnnnnnnnnnnnnnnnnnnnnnnnnnnnnnnnnnnnnnnnnnnnnnnnnnnnnnnnnnnnnnnnnnnnnnnnnnnnnnnnnnnnnnnnnnnnnnnnnnnnnnnnnnnnnnnnnnnnnnnnnnnnnnnnnnnnnnnnnnnnnnnnnnnnnnnnnnnnnnnnnnnnnnnnnnnnnnnnnnnnnnnnnnnnnnnnnnnnnnnnnnnnnnnnnnnnnnnnnnnnnnnnnnnnnnnnnnnnnnnnnnnnnnnnnnnnnnnnnnnnnnnnnnnnnnnnnnnnnnnnnnnnnnnnnnnnnnnnnnnnnnnnnnnnnnnnnnnnnnnnnnnnnnnnnnnnnnnnnnnnnnnnnnnnnnnnnnnnnnnnnnnnnnnnnnnnnnnnnnnnnnnnnnnnnnnnnnnnnnnnnnnnnnnnnnnnnnnnnnnnnnnnnnnnnnnnnnnnnnnnnnnnnnnnnnnnnnnnnnnnnnnnnnnnnnnnnnnnnnnnnnnnnnnnnnnnnnnnnnnnnnnnnnnnnnnnnnnnnnnnnnnnnnnnnnnnnnnnnnnnnnnnnnnnnnnnnnnnnnnnnnnnnnnnnnnnnnnnnnnnnnnnnnnnnnnnnnnnnnnnnnnnnnnnnnnnnnnnnnnnnnnnnnnnnnnnnnnnnnnnnnnnnnnnnnnnnnnnnnnnnnnnnnnnnnnnnnnnnnnnnnnnnnnnnnnnnnnnnnnnnnnnnnnnnnnnnnnnnnnnnnnnnnnnnnnnnnnnnnnnnnnnnnnnnnnnnnnnnnnnnnnnnnnnnnnnnnnnnnnnnnnnnnnnnnnnnnnnnnnnnnnnnnnnnnnnnnnnnnnnnnnnnnnnnnnnnnnnnnnnnnnnnnnnnnnnnnnnnnnnnnnnnnnnnnnnnnnnnnnnnnnnnnnnnnnnnnnnnnnnnnnnnnnnnnnnnnnnnnnnnnnnnnnnnnnnnnnnnnnnnnnnnnnnnnnnnnnnnnnnnnnnnnnnnnnnnnnnnnnnnnnnnnnnnnnnnnnnnnnnnnnnnnnnnnnnnnnnnnnnnnnnnnnnnnnnnnnnnnnnnnnnnnnnnnnnnnnnnnnnnnnnnnnnnnnnnnnnnnnnnnnnnnnnnnnnnnnnnnnnnnnnnnnnnnnnnnnnnnnnnnnnnnnnnnnnnnnnnnnnnnnnnnnnnnnnnnnnnnnnnnnnnnnnnnnnnnnnnnnnnnnnnnnnnnnnnnnnnnnnnnnnnnnnnnnnnnnnnnnnnnnnnnnnnnnnnnnnnnnnnnnnnnnnnnnnnnnnnnnnnnnnnnnnnnnnnnnnnnnnnnnnnnnnnnnnnnnnnnnnnnnnnnnnnnnnnnnnnnnnnnnnnnnnnnnnnnnnnnnnnnnnnnnnnnnnnnnnnnnnnnnnnnnnnnnnnnnnnnnnnnnnnnnnnnnnnnnnnnnnnnnnnnnnnnnnnnnnnnnnnnnnnnnnnnnnnnnnnnnnnnnnnnnnnnnnnnnnnnnnnnnnnnnnnnnnnnnnnnnnnnnnnnnnnnnnnnnnnnnnnnnnnnnnnnnnnnnnnnnnnnnnnnnnnnnnnnnnnnnnnnnnnnnnnnnnnnnnnnnnnnnnnnnnnnnnnnnnnnnnnnnnnnnnnnnnnnnnnnnnnnnnnnnnnnnnnnnnnnnnnnnnnnnnnnnnnnnnnnnnnnnnnnnnnnnnnnnnnnnnnnnnnnnnnnnnnnnnnnnnnnnnnnnnnnnnnnnnnnnnnnnnnnnnnnnnnnnnnnnnnnnnnnnnnnnnnnnnnnnnnnnnnnnnnnnnnnnnnnnnnnnnnnnnnnnnnnnnnnnnnnnnnnnnnnnnnnnnnnnnnnnnnnnnnnnnnnnnnnnnnnnnnnnnnnnnnnnnnnnnnnnnnnnnnnnnnnnnnnnnnnnnnnnnnnnnnnnnnnnnnnnnnnnnnnnnnnnnnnnnnnnnnnnnnnnnnnnnnnnnnnnnnnnnnnnnnnnnnnnnnnnnnnnnnnnnnnnnnnnnnnnnnnnnnnnnnnnnnnnnnnnnnnnnnnnnnnnnnnnnnnnnnnnnnnnnnnnnnnnnnnnnnnnnnnnnnnnnnnnnnnnnnnnnnnnnnnnnnnnnnnnnnnnnnnnnnnnnnnnnnnnnnnnnnnnnnnnnnnnnnnnnnnnnnnnnnnnnnnnnnnnnnnnnnnnnnnnnnnnnnnnnnnnnnnnnnnnnnnnnnnnnnnnnnnnnnnnnnnnnnnnnnnnnnnnnnnnnnnnnnnnnnnnnnnnnnnnnnnnnnnnnnnnnnnnnnnnnnnnnnnnnnnnnnnnnnnnnnnnnnnnnnnnnnnnnnnnnnnnnnnnnnnnnnnnnnnnnnnnnnnnnnnnnnnnnnnnnnnnnnnnnnnnnnnnnnnnnnnnnnnnnnnnnnnnnnnnnnnnnnnnnnnnnnnnnnnnnnnnnnnnnnnnnnnnnnnnnnnnnnnnnnnnnnnnnnnnnnnnnnnnnnnnnnnnnnnnnnnnnnnnnnnnnnnnnnnnnnnnnnnnnnnnnnnnnnnnnnnnnnnnnnnnnnnnnnnnnnnnnnnnnnnnnnnnnnnnnnnnnnnnnnnnnnnnnnnnnnnnnnnnnnnnnnnnnnnnnnnnnnnnnnnnnnnnnnnnnnnnnnnnnnnnnnnnnnnnnnnnnnnnnnnnnnnnnnnnnnnnnnnnnnnnnnnnnnnnnnnnnnnnnnnnnnnnnnnnnnnnnnnnnnnnnnnnnnnnnnnnnnnnnnnnnnnnnnnnnnnnnnnnnnnnnnnnnnnnnnnnnnnnnnnnnnnnnnnnnnnnnnnnnnnnnnnnnnnnnnnnnnnnnnnnnnnnnnnnnnnnnnnnnnnnnnnnnnnnnnnnnnnnnnnnnnnnnnnnnnnnnnnnnnnnnnnnnnnnnnnnnnnnnnnnnnnnnnnnnnnnnnnnnnnnnnnnnnnnnnnnnnnnnnnnnnnnnnnnnnnnnnnnnnnnnnnnnnnnnnnnnnnnnnnnnnnnnnnnnnnnnnnnnnnnnnnnnnnnnnnnnnnnnnnnnnnnnnnnnnnnnnnnnnnnnnnnnnnnnnnnnnnnnnnnnnnnnnnnnnnnnnnnnnnnnnnnnnnnnnnnnnnnnnnnnnnnnnnnnnnnnnnnnnnnnnnnnnnnnnnnnnnnnnnnnnnnnnnnnnnnnnnnnnnnnnnnnnnnnnnnnnnnnnnnnnnnnnnnnnnnnnnnnnnnnnnnnnnnnnnnnnnnnnnnnnnnnnnnnnnnnnnnnnnnnnnnnnnnnnnnnnnnnnnnnnnnnnnnnnnnnnnnnnnnnnnnnnnnnnnnnnnnnnnnnnnnnnnnnnnnnnnnnnnnnnnnnnnnnnnnnnnnnnnnnnnnnnnnnnnnnnnnnnnnnnnnnnnnnnnnnnnnnnnnnnnnnnnnnnnnnnnnnnnnnnnnnnnnnnnnnnnnnnnnnnnnnnnnnnnnnnnnnnnnnnnnnnnnnnnnnnnnnnnnnnnnnnnnnnnnnnnnnnnnnnnnnnnnnnnnnnnnnnnnnnnnnnnnnnnnnnnnnnnnnnnnnnnnnnnnnnnnnnnnnnnnnnnnnnnnnnnnnnnnnnnnnnnnnnnnnnnnnnnnnnnnnnnnnnnnnnnnnnnnnnnnnnnnnnnnnnnnnnnnnnnnnnnnnnnnnnnnnnnnnnnnnnnnnnnnnnnnnnnnnnnnnnnnnnnnnnnnnnnnnnnnnnnnnnnnnnnnnnnnnnnnnnnnnnnnnnnnnnnnnnnnnnnnnnnnnnnnnnnnnnnnnnnnnnnnnnnnnnnnnnnnnnnnnnnnnnnnnnnnnnnnnnnnnnnnnnnnnnnnnnnnnnnnnnnnnnnnnnnnnnnnnnnnnnnnnnnnnnnnnnnnnnnnnnnnnnnnnnnnnnnnnnnnnnnnnnnnnnnnnnnnnnnnnnnnnnnnnnnnnnnnnnnnnnnnnnnnnnnnnnnnnnnnnnnnnnnnnnnnnnnnnnnnnnnnnnnnnnnnnnnnnnnnnnnnnnnnnnnnnnnnnnnnnnnnnnnnnnnnnnnnnnnnnnnnnnnnnnnnnnnnnnnnnnnnnnnnnnnnnnnnnnnnnnnnnnnnnnnnnnnnnnnnnnnnnnnnnnnnnnnnnnnnnnnnnnnnnnnnnnnnnnnnnnnnnnnnnnnnnnnnnnnnnnnnnnnnnnnnnnnnnnnnnnnnnnnnnnnnnnnnnnnnnnnnnnnnnnnnnnnnnnnnnnnnnnnnnnnnnnnnnnnnnnnnnnnnnnnnnnnnnnnnnnnnnnnnnnnnnnnnnnnnnnnnnnnnnnnnnnnnnnnnnnnnnnnnnnnnnnnnnnnnnnnnnnnnnnnnnnnnnnnnnnnnnnnnnnnnnnnnnnnnnnnnnnnnnnnnnnnnnnnnnnnnnnnnnnnnnnnnnnnnnnnnnnnnnnnnnnnnnnnnnnnnnnnnnnnnnnnnnnnnnnnnnnnnnnnnnnnnnnnnnnnnnnnnnnnnnnnnnnnnnnnnnnnnnnnnnnnnnnnnnnnnnnnnnnnnnnnnnnnnnnnnnnnnnnnnnnnnnnnnnnnnnnnnnnnnnnnnnnnnnnnnnnnnnnnnnnnnnnnnnnnnnnnnnnnnnnnnnnnnnnnnnnnnnnnnnnnnnnnnnnnnnnnnnnnnnnnnnnnnnnnnnnnnnnnnnnnnnnnnnnnnnnnnnnnnnnnnnnnnnnnnnnnnnnnnnnnnnnnnnnnnnnnnnnnnnnnnnnnnnnnnnnnnnnnnnnnnnnnnnnnnnnnnnnnnnnnnnnnnnnnnnnnnnnnnnnnnnnnnnnnnnnnnnnnnnnnnnnnnnnnnnnnnnnnnnnnnnnnnnnnnnnnnnnnnnnnnnnnnnnnnnnnnnnnnnnnnnnnnnnnnnnnnnnnnnnnnnnnnnnnnnnnnnnnnnnnnnnnnnnnnnnnnnnnnnnnnnnnnnnnnnnnnnnnnnnnnnnnnnnnnnnnnnnnnnnnnnnnnnnnnnnnnnnnnnnnnnnnnnnnnnnnnnnnnnnnnnnnnnnnnnnnnnnnnnnnnnnnnnnnnnnnnnnnnnnnnnnnnnnnnnnnnnnnnnnnnnnnnnnnnnnnnnnnnnnnnnnnnnnnnnnnnnnnnnnnnnnnnnnnnnnnnnnnnnnnnnnnnnnnnnnnnnnnnnnnnnnnnnnnnnnnnnnnnnnnnnnnnnnnnnnnnnnnnnnnnnnnnnnnnnnnnnnnnnnnnnnnnnnnnnnnnnnnnnnnnnnnnnnnnnnnnnnnnnnnnnnnnnnnnnnnnnnnnnnnnnnnnnnnnnnnnnnnnnnnnnnnnnnnnnnnnnnnnnnnnnnnnnnnnnnnnnnnnnnnnnnnnnnnnnnnnnnnnnnnnnnnnnnnnnnnnnnnnnnnnnnnnnnnnnnnnnnnnnnnnnnnnnnnnnnnnnnnnnnnnnnnnnnnnnnnnnnnnnnnnnnnnnnnnnnnnnnnnnnnnnnnnnnnnnnnnnnnnnnnnnnnnnnnnnnnnnnnnnnnnnnnnnnnnnnnnnnnnnnnnnnnnnnnnnnnnnnnnnnnnnnnnnnnnnnnnnnnnnnnnnnnnnnnnnnnnnnnnnnnnnnnnnnnnnnnnnnnnnnnnnnnnnnnnnnnnnnnnnnnnnnnnnnnnnnnnnnnnnnnnnnnnnnnnnnnnnnnnnnnnnnnnnnnnnnnnnnnnnnnnnnnnnnnnnnnnnnnnnnnnnnnnnnnnnnnnnnnnnnnnnnnnnnnnnnnnnnnnnnnnnnnnnnnnnnnnnnnnnnnnnnnnnnnnnnnnnnnnnnnnnnnnnnnnnnnnnnnnnnnnnnnnnnnnnnnnnnnnnnnnnnnnnnnnnnnnnnnnnnnnnnnnnnnnnnnnnnnnnnnnnnnnnnnnnnnnnnnnnnnnnnnnnnnnnnnnnnnnnnnnnnnnnnnnnnnnnnnnnnnnnnnnnnnnnnnnnnnnnnnnnnnnnnnnnnnnnnnnnnnnnnnnnnnnnnnnnnnnnnnnnnnnnnnnnnnnnnnnnnnnnnnnnnnnnnnnnnnnnnnnnnnnnnnnnnnnnnnnnnnnnnnnnnnnnnnnnnnnnnnnnnnnnnnnnnnnnnnnnnnnnnnnnnnnnnnnnnnnnnnnnnnnnnnnnnnnnnnnnnnnnnnnnnnnnnnnnnnnnnnnnnnnnnnnnnnnnnnnnnnnnnnnnnnnnnnnnnnnnnnnnnnnnnnnnnnnnnnnnnnnnnnnnnnnnnnnnnnnnnnnnnnnnnnnnnnnnnnnnnnnnnnnnnnnnnnnnnnnnnnnnnnnnnnnnnnnnnnnnnnnnnnnnnnnnnnnnnnnnnnnnnnnnnnnnnnnnnnnnnnnnnnnnnnnnnnnnnnnnnnnnnnnnnnnnnnnnnnnnnnnnnnnnnnnnnnnnnnnnnnnnnnnnnnnnnnnnnnnnnnnnnnnnnnnnnnnnnnnnnnnnnnnnnnnnnnnnnnnnnnnnnnnnnnnnnnnnnnnnnnnnnnnnnnnnnnnnnnnnnnnnnnnnnnnnnnnnnnnnnnnnnnnnnnnnnnnnnnnnnnnnnnnnnnnnnnnnnnnnnnnnnnnnnnnnnnnnnnnnnnnnnnnnnnnnnnnnnnnnnnnnnnnnnnnnnnnnnnnnnnnnnnnnnnnnnnnnnnnnnnnnnnnnnnnnnnnnnnnnnnnnnnnnnnnnnnnnnnnnnnnnnnnnnnnnnnnnnnnnnnnnnnnnnnnnnnnnnnnnnnnnnnnnnnnnnnnnnnnnnnnnnnnnnnnnnnnnnnnnnnnnnnnnnnnnnnnnnnnnnnnnnnnnnnnnnnnnnnnnnnnnnnnnnnnnnnnnnnnnnnnnnnnnnnnnnnnnnnnnnnnnnnnnnnnnnnnnnnnnnnnnnnnnnnnnnnnnnnnnnnnnnnnnnnnnnnnnnnnnnnnnnnnnnnnnnnnnnnnnnnnnnnnnnnnnnnnnnnnnnnnnnnnnnnnnnnnnnnnnnnnnnnnnnnnnnnnnnnnnnnnnnnnnnnnnnnnnnnnnnnnnnnnnnnnnnnnnnnnnnnnnnnnnnnnnnnnnnnnnnnnnnnnnnnnnnnnnnnnnnnnnnnnnnnnnnnnnnnnnnnnnnnnnnnnnnnnnnnnnnnnnnnnnnnnnnnnnnnnnnnnnnnnnnnnnnnnnnnnnnnnnnnnnnnnnnnnnnnnnnnnnnnnnnnnnnnnnnnnnnnnnnnnnnnnnnnnnnnnnnnnnnnnnnnnnnnnnnnnnnnnnnnnnnnnnnnnnnnnnnnnnnnnnnnnnnnnnnnnnnnnnnnnnnnnnnnnnnnnnnnnnnnnnnnnnnnnnnnnnnnnnnnnnnnnnnnnnnnnnnnnnnnnnnnnnnnnnnnnnnnnnnnnnnnnnnnnnnnnnnnnnnnnnnnnnnnnnnnnnnnnnnnnnnnnnnnnnnnnnnnnnnnnnnnnnnnnnnnnnnnnnnnnnnnnnnnnnnnnnnnnnnnnnnnnnnnnnnnnnnnnnnnnnnnnnnnnnnnnnnnnnnnnnnnnnnnnnnnnnnnnnnnnnnnnnnnnnnnnnnnnnnnnnnnnnnnnnnnnnnnnnnnnnnnnnnnnnnnnnnnnnnnnnnnnnnnnnnnnnnnnnnnnnnnnnnnnnnnnnnnnnnnnnnnnnnnnnnnnnnnnnnnnnnnnnnnnnnnnnnnnnnnnnnnnnnnnnnnnnnnnnnnnnnnnnnnnnnnnnnnnnnnnnnnnnnnnnnnnnnnnnnnnnnnnnnnnnnnnnnnnnnnnnnnnnnnnnnnnnnnnnnnnnnnnnnnnnnnnnnnnnnnnnnnnnnnnnnnnnnnnnnnnnnnnnnnnnnnnnnnnnnnnnnnnnnnnnnnnnnnnnnnnnnnnnnnnnnnnnnnnnnnnnnnnnnnnnnnnnnnnnnnnnnnnnnnnnnnnnnnnnnnnnnnnnnnnnnnnnnnnnnnnnnnnnnnnnnnnnnnnnnnnnnnnnnnnnnnnnnnnnnnnnnnnnnnnnnnnnnnnnnnnnnnnnnnnnnnnnnnnnnnnnnnnnnnnnnnnnnnnnnnnnnnnnnnnnnnnnnnnnnnnnnnnnnnnnnnnnnnnnnnnnnnnnnnnnnnnnnnnnnnnnnnnnnnnnnnnnnnnnnnnnnnnnnnnnnnnnnnnnnnnnnnnnnnnnnnnnnnnnnnnnnnnnnnnnnnnnnnnnnnnnnnnnnnnnnnnnnnnnnnnnnnnnnnnnnnnnnnnnnnnnnnnnnnnnnnnnnnnnnnnnnnnnnnnnnnnnnnnnnnnnnnnnnnnnnnnnnnnnnnnnnnnnnnnnnnnnnnnnnnnnnnnnnnnnnnnnnnnnnnnnnnnnnnnnnnnnnnnnnnnnnnnnnnnnnnnnnnnnnnnnnnnnnnnnnnnnnnnnnnnnnnnnnnnnnnnnnnnnnnnnnnnnnnnnnnnnnnnnnnnnnnnnnnnnnnnnnnnnnnnnnnnnnnnnnnnnnnnnnnnnnnnnnnnnnnnnnnnnnnnnnnnnnnnnnnnnnnnnnnnnnnnnnnnnnnnnnnnnnnnnnnnnnnnnnnnnnnnnnnnnnnnnnnnnnnnnnnnnnnnnnnnnnnnnnnnnnnnnnnnnnnnnnnnnnnnnnnnnnnnnnnnnnnnnnnnnnnnnnnnnnnnnnnnnnnnnnnnnnnnnnnnnnnnnnnnnnnnnnnnnnnnnnnnnnnnnnnnnnnnnnnnnnnnnnnnnnnnnnnnnnnnnnnnnnnnnnnnnnnnnnnnnnnnnnnnnnnnnnnnnnnnnnnnnnnnnnnnnnnnnnnnnnnnnnnnnnnnnnnnnnnnnnnnnnnnnnnnnnnnnnnnnnnnnnnnnnnnnnnnnnnnnnnnnnnnnnnnnnnnnnnnnnnnnnnnnnnnnnnnnnnnnnnnnnnnnnnnnnnnnnnnnnnnnnnnnnnnnnnnnnnnnnnnnnnnnnnnnnnnnnnnnnnnnnnnnnnnnnnnnnnnnnnnnnnnnnnnnnnnnnnnnnnnnnnnnnnnnnnnnnnnnnnnnnnnnnnnnnnnnnnnnnnnnnnnnnnnnnnnnnnnnnnnnnnnnnnnnnnnnnnnnnnnnnnnnnnnnnnnnnnnnnnnnnnnnnnnnnnnnnnnnnnnnnnnnnnnnnnnnnnnnnnnnnnnnnnnnnnnnnnnnnnnnnnnnnnnnnnnnnnnnnnnnnnnnnnnnnnnnnnnnnnnnnnnnnnnnnnnnnnnnnnnnnnnnnnnnnnnnnnnnnnnnnnnnnnnnnnnnnnnnnnnnnnnnnnnnnnnnnnnnnnnnnnnnnnnnnnnnnnnnnnnnnnnnnnnnnnnnnnnnnnnnnnnnnnnnnnnnnnnnnnnnnnnnnnnnnnnnnnnnnnnnnnnnnnnnnnnnnnnnnnnnnnnnnnnnnnnnnnnnnnnnnnnnnnnnnnnnnnnnnnnnnnnnnnnnnnnnnnnnnnnnnnnnnnnnnnnnnnnnnnnnnnnnnnnnnnnnnnnnnnnnnnnnnnnnnnnnnnnnnnnnnnnnnnnnnnnnnnnnnnnnnnnnnnnnnnnnnnnnnnnnnnnnnnnnnnnnnnnnnnnnnnnnnnnnnnnnnnnnnnnnnnnnnnnnnnnnnnnnnnnnnnnnnnnnnnnnnnnnnnnnnnnnnnnnnnnnnnnnnnnnnnnnnnnnnnnnnnnnnnnnnnnnnnnnnnnnnnnnnnnnnnnnnnnnnnnnnnnnnnnnnnnnnnnnnnnnnnnnnnnnnnnnnnnnnnnnnnnnnnnnnnnnnnnnnnnnnnnnnnnnnnnnnnnnnnnnnnnnnnnnnnnnnnnnnnnnnnnnnnnnnnnnnnnnnnnnnnnnnnnnnnnnnnnnnnnnnnnnnnnnnnnnnnnnnnnnnnnnnnnnnnnnnnnnnnnnnnnnnnnnnnnnnnnnnnnnnnnnnnnnnnnnnnnnnnnnnnnnnnnnnnnnnnnnnnnnnnnnnnnnnnnnnnnnnnnnnnnnnnnnnnnnnnnnnnnnnnnnnnnnnnnnnnnnnnnnnnnnnnnnnnnnnnnnnnnnnnnnnnnnnnnnnnnnnnnnnnnnnnnnnnnnnnnnnnnnnnnnnnnnnnnnnnnnnnnnnnnnnnnnnnnnnnnnnnnnnnnnnnnnnnnnnnnnnnnnnnnnnnnnnnnnnnnnnnnnnnnnnnnnnnnnnnnnnnnnnnnnnnnnnnnnnnnnnnnnnnnnnnnnnnnnnnnnnnnnnnnnnnnnnnnnnnnnnnnnnnnnnnnnnnnnnnnnnnnnnnnnnnnnnnnnnnnnnnnnnnnnnnnnnnnnnnnnnnnnnnnnnnnnnnnnnnnnnnnnnnnnnnnnnnnnnnnnnnnnnnnnnnnnnnnnnnnnnnnnnnnnnnnnnnnnnnnnnnnnnnnnnnnnnnnnnnnnnnnnnnnnnnnnnnnnnnnnnnnnnnnnnnnnnnnnnnnnnnnnnnnnnnnnnnnnnnnnnnnnnnnnnnnnnnnnnnnnnnnnnnnnnnnnnnnnnnnnnnnnnnnnnnnnnnnnnnnnnnnnnnnnnnnnnnnnnnnnnnnnnnnnnnnnnnnnnnnnnnnnnnnnnnnnnnnnnnnnnnnnnnnnnnnnnnnnnnnnnnnnnnnnnnnnnnnnnnnnnnnnnnnnnnnnnnnnnnnnnnnnnnnnnnnnnnnnnnnnnnnnnnnnnnnnnnnnnnnnnnnnnnnnnnnnnnnnnnnnnnnnnnnnnnnnnnnnnnnnnnnnnnnnnnnnnnnnnnnnnnnnnnnnnnnnnnnnnnnnnnnnnnnnnnnnnnnnnnnnnnnnnnnnnnnnnnnnnnnnnnnnnnnnnnnnnnnnnnnnnnnnnnnnnnnnnnnnnnnnnnnnnnnnnnnnnnnnnnnnnnnnnnnnnnnnnnnnnnnnnnnnnnnnnnnnnnnnnnnnnnnnnnnnnnnnnnnnnnnnnnnnnnnnnnnnnnnnnnnnnnnnnnnnnnnnnnnnnnnnnnnnnnnnnnnnnnnnnnnnnnnnnnnnnnnnnnnnnnnnnnnnnnnnnnnnnnnnnnnnnnnnnnnnnnnnnnnnnnnnnnnnnnnnnnnnnnnnnnnnnnnnnnnnnnnnnnnnnnnnnnnnnnnnnnnnnnnnnnnnnnnnnnnnnnnnnnnnnnnnnnnnnnnnnnnnnnnnnnnnnnnnnnnnnnnnnnnnnnnnnnnnnnnnnnnnnnnnnnnnnnnnnnnnnnnnnnnnnnnnnnnnnnnnnnnnnnnnnnnnnnnnnnnnnnnnnnnnnnnnnnnnnnnnnnnnnnnnnnnnnnnnnnnnnnnnnnnnnnnnnnnnnnnnnnnnnnnnnnnnnnnnnnnnnnnnnnnnnnnnnnnnnnnnnnnnnnnnnnnnnnnnnnnnnnnnnnnnnnnnnnnnnnnnnnnnnnnnnnnnnnnnnnnnnnnnnnnnnnnnnnnnnnnnnnnnnnnnnnnnnnnnnnnnnnnnnnnnnnnnnnnnnnnnnnnnnnnnnnnnnnnnnnnnnnnnnnnnnnnnnnnnnnnnnnnnnnnnnnnnnnnnnnnnnnnnnnnnnnnnnnnnnnnnnnnnnnnnnnnnnnnnnnnnnnnnnnnnnnnnnnnnnnnnnnnnnnnnnnnnnnnnnnnnnnnnnnnnnnnnnnnnnnnnnnnnnnnnnnnnnnnnnnnnnnnnnnnnnnnnnnnnnnnnnnnnnnnnnnnnnnnnnnnnnnnnnnnnnnnnnnnnnnnnnnnnnnnnnnnnnnnnnnnnnnnnnnnnnnnnnnnnnnnnnnnnnnnnnnnnnnnnnnnnnnnnnnnnnnnnnnnnnnnnnnnnnnnnnnnnnnnnnnnnnnnnnnnnnnnnnnnnnnnnnnnnnnnnnnnnnnnnnnnnnnnnnnnnnnnnnnnnnnnnnnnnnnnnnnnnnnnnnnnnnnnnnnnnnnnnnnnnnnnnnnnnnnnnnnnnnnnnnnnnnnnnnnnnnnnnnnnnnnnnnnnnnnnnnnnnnnnnnnnnnnnnnnnnnnnnnnnnnnnnnnnnnnnnnnnnnnnnnnnnnnnnnnnnnnnnnnnnnnnnnnnnnnnnnnnnnnnnnnnnnnnnnnnnnnnnnnnnnnnnnnnnnnnnnnnnnnnnnnnnnnnnnnnnnnnnnnnnnnnnnnnnnnnnnnnnnnnnnnnnnnnnnnnnnnnnnnnnnnnnnnnnnnnnnnnnnnnnnnnnnnnnnnnnnnnnnnnnnnnnnnnnnnnnnnnnnnnnnnnnnnnnnnnnnnnnnnnnnnnnnnnnnnnnnnnnnnnnnnnnnnnnnnnnnnnnnnnnnnnnnnnnnnnnnnnnnnnnnnnnnnnnnnnnnnnnnnnnnnnnnnnnnnnnnnnnnnnnnnnnnnnnnnnnnnnnnnnnnnnnnnnnnnnnnnnnnnnnnnnnnnnnnnnnnnnnnnnnnnnnnnnnnnnnnnnnnnnnnnnnnnnnnnnnnnnnnnnnnnnnnnnnnnnnnnnnnnnnnnnnnnnnnnnnnnnnnnnnnnnnnnnnnnnnnnnnnnnnnnnnnnnnnnnnnnnnnnnnnnnnnnnnnnnnnnnnnnnnnnnnnnnnnnnnnnnnnnnnnnnnnnnnnnnnnnnnnnnnnnnnnnnnnnnnnnnnnnnnnnnnnnnnnnnnnnnnnnnnnnnnnnnnnnnnnnnnnnnnnnnnnnnnnnnnnnnnnnnnnnnnnnnnnnnnnnnnnnnnnnnnnnnnnnnnnnnnnnnnnnnnnnnnnnnnnnnnnnnnnnnnnnnnnnnnnnnnnnnnnnnnnnnnnnnnnnnnnnnnnnnnnnnnnnnnnnnnnnnnnnnnnnnnnnnnnnnnnnnnnnnnnnnnnnnnnnnnnnnnnnnnnnnnnnnnnnnnnnnnnnnnnnnnnnnnnnnnnnnnnnnnnnnnnnnnnnnnnnnnnnnnnnnnnnnnnnnnnnnnnnnnnnnnnnnnnnnnnnnnnnnnnnnnnnnnnnnnnnnnnnnnnnnnnnnnnnnnnnnnnnnnnnnnnnnnnnnnnnnnnnnnnnnnnnnnnnnnnnnnnnnnnnnnnnnnnnnnnnnnnnnnnnnnnnnnnnnnnnnnnnnnnnnnnnnnnnnnnnnnnnnnnnnnnnnnnnnnnnnnnnnnnnnnnnnnnnnnnnnnnnnnnnnnnnnnnnnnnnnnnnnnnnnnnnnnnnnnnnnnnnnnnnnnnnnnnnnnnnnnnnnnnnnnnnnnnnnnnnnnnnnnnnnnnnnnnnnnnnnnnnnnnnnnnnnnnnnnnnnnnnnnnnnnnnnnnnnnnnnnnnnnnnnnnnnnnnnnnnnnnnnnnnnnnnnnnnnnnnnnnnnnnnnnnnnnnnnnnnnnnnnnnnnnnnnnnnnnnnnnnnnnnnnnnnnnnnnnnnnnnnnnnnnnnnnnnnnnnnnnnnnnnnnnnnnnnnnnnnnnnnnnnnnnnnnnnnnnnnnnnnnnnnnnnnnnnnnnnnnnnnnnnnnnnnnnnnnnnnnnnnnnnnnnnnnnnnnnnnnnnnnnnnnnnnnnnnnnnnnnnnnnnnnnnnnnnnnnnnnnnnnnnnnnnnnnnnnnnnnnnnnnnnnnnnnnnnnnnnnnnnnnnnnnnnnnnnnnnnnnnnnnnnnnnnnnnnnnnnnnnnnnnnnnnnnnnnnnnnnnnnnnnnnnnnnnnnnnnnnnnnnnnnnnnnnnnnnnnnnnnnnnnnnnnnnnnnnnnnnnnnnnnnnnnnnnnnnnnnnnnnnnnnnnnnnnnnnnnnnnnnnnnnnnnnnnnnnnnnnnnnnnnnnnnnnnnnnnnnnnnnnnnnnnnnnnnnnnnnnnnnnnnnnnnnnnnnnnnnnnnnnnnnnnnnnnnnnnnnnnnnnnnnnnnnnnnnnnnnnnnnnnnnnnnnnnnnnnnnnnnnnnnnnnnnnnnnnnnnnnnnnnnnnnnnnnnnnnnnnnnnnnnnnnnnnnnnnnnnnnnnnnnnnnnnnnnnnnnnnnnnnnnnnnnnnnnnnnnnnnnnnnnnnnnnnnnnnnnnnnnnnnnnnnnnnnnnnnnnnnnnnnnnnnnnnnnnnnnnnnnnnnnnnnnnnnnnnnnnnnnnnnnnnnnnnnnnnnnnnnnnnnnnnnnnnnnnnnnnnnnnnnnnnnnnnnnnnnnnnnnnnnnnnnnnnnnnnnnnnnnnnnnnnnnnnnnnnnnnnnnnnnnnnnnnnnnnnnnnnnnnnnnnnnnnnnnnnnnnnnnnnnnnnnnnnnnnnnnnnnnnnnnnnnnnnnnnnnnnnnnnnnnnnnnnnnnnnnnnnnnnnnnnnnnnnnnnnnnnnnnnnnnnnnnnnnnnnnnnnnnnnnnnnnnnnnnnnnnnnnnnnnnnnnnnnnnnnnnnnnnnnnnnnnnnnnnnnnnnnnnnnnnnnnnnnnnnnnnnnnnnnnnnnnnnnnnnnnnnnnnnnnnnnnnnnnnnnnnnnnnnnnnnnnnnnnnnnnnnnnnnnnnnnnnnnnnnnnnnnnnnnnnnnnnnnnnnnnnnnnnnnnnnnnnnnnnnnnnnnnnnnnnnnnnnnnnnnnnnnnnnnnnnnnnnnnnnnnnnnnnnnnnnnnnnnnnnnnnnnnnnnnnnnnnnnnnnnnnnnnnnnnnnnnnnnnnnnnnnnnnnnnnnnnnnnnnnnnnnnnnnnnnnnnnnnnnnnnnnnnnnnnnnnnnnnnnnnnnnnnnnnnnnnnnnnnnnnnnnnnnnnnnnnnnnnnnnnnnnnnnnnnnnnnnnnnnnnnnnnnnnnnnnnnnnnnnnnnnnnnnnnnnnnnnnnnnnnnnnnnnnnnnnnnnnnnnnnnnnnnnnnnnnnnnnnnnnnnnnnnnnnnnnnnnnnnnnnnnnnnnnnnnnnnnnnnnnnnnnnnnnnnnnnnnnnnnnnnnnnnnnnnnnnnnnnnnnnnnnnnnnnnnnnnnnnnnnnnnnnnnnnnnnnnnnnnnnnnnnnnnnnnnnnnnnnnnnnnnnnnnnnnnnnnnnnnnnnnnnnnnnnnnnnnnnnnnnnnnnnnnnnnnnnnnnnnnnnnnnnnnnnnnnnnnnnnnnnnnnnnnnnnnnnnnnnnnnnnnnnnnnnnnnnnnnnnnnnnnnnnnnnnnnnnnnnnnnnnnnnnnnnnnnnnnnnnnnnnnnnnnnnnnnnnnnnnnnnnnnnnnnnnnnnnnnnnnnnnnnnnnnnnnnnnnnnnnnnnnnnnnnnnnnnnnnnnnnnnnnnnnnnnnnnnnnnnnnnnnnnnnnnnnnnnnnnnnnnnnnnnnnnnnnnnnnnnnnnnnnnnnnnnnnnnnnnnnnnnnnnnnnnnnnnnnnnnnnnnnnnnnnnnnnnnnnnnnnnnnnnnnnnnnnnnnnnnnnnnnnnnnnnnnnnnnnnnnnnnnnnnnnnnnnnnnnnnnnnnnnnnnnnnnnnnnnnnnnnnnnnnnnnnnnnnnnnnnnnnnnnnnnnnnnnnnnnnnnnnnnnnnnnnnnnnnnnnnnnnnnnnnnnnnnnnnnnnnnnnnnnnnnnnnnnnnnnnnnnnnnnnnnnnnnnnnnnnnnnnnnnnnnnnnnnnnnnnnnnnnnnnnnnnnnnnnnnnnnnnnnnnnnnnnnnnnnnnnnnnnnnnnnnnnnnnnnnnnnnnnnnnnnnnnnnnnnnnnnnnnnnnnnnnnnnnnnnnnnnnnnnnnnnnnnnnnnnnnnnnnnnnnnnnnnnnnnnnnnnnnnnnnnnnnnnnnnnnnnnnnnnnnnnnnnnnnnnnnnnnnnnnnnnnnnnnnnnnnnnnnnnnnnnnnnnnnnnnnnnnnnnnnnnnnnnnnnnnnnnnnnnnnnnnnnnnnnnnnnnnnnnnnnnnnnnnnnnnnnnnnnnnnnnnnnnnnnnnnnnnnnnnnnnnnnnnnnnnnnnnnnnnnnnnnnnnnnnnnnnnnnnnnnnnnnnnnnnnnnnnnnnnnnnnnnnnnnnnnnnnnnnnnnnnnnnnnnnnnnnnnnnnnnnnnnnnnnnnnnnnnnnnnnnnnnnnnnnnnnnnnnnnnnnnnnnnnnnnnnnnnnnnnnnnnnnnnnnnnnnnnnnnnnnnnnnnnnnnnnnnnnnnnnnnnnnnnnnnnnnnnnnnnnnnnnnnnnnnnnnnnnnnnnnnnnnnnnnnnnnnnnnnnnnnnnnnnnnnnnnnnnnnnnnnnnnnnnnnnnnnnnnnnnnnnnnnnnnnnnnnnnnnnnnnnnnnnnnnnnnnnnnnnnnnnnnnnnnnnnnnnnnnnnnnnnnnnnnnnnnnnnnnnnnnnnnnnnnnnnnnnnnnnnnnnnnnnnnnnnnnnnnnnnnnnnnnnnnnnnnnnnnnnnnnnnnnnnnnnnnnnnnnnnnnnnnnnnnnnnnnnnnnnnnnnnnnnnnnnnnnnnnnnnnnnnnnnnnnnnnnnnnnnnnnnnnnnnnnnnnnnnnnnnnnnnnnnnnnnnnnnnnnnnnnnnnnnnnnnnnnnnnnnnnnnnnnnnnnnnnnnnnnnnnnnnnnnnnnnnnnnnnnnnnnnnnnnnnnnnnnnnnnnnnnnnnnnnnnnnnnnnnnnnnnnnnnnnnnnnnnnnnnnnnnnnnnnnnnnnnnnnnnnnnnnnnnnnnnnnnnnnnnnnnnnnnnnnnnnnnnnnnnnnnnnnnnnnnnnnnnnnnnnnnnnnnnnnnnnnnnnnnnnnnnnnnnnnnnnnnnnnnnnnnnnnnnnnnnnnnnnnnnnnnnnnnnnnnnnnnnnnnnnnnnnnnnnnnnnnnnnnnnnnnnnnnnnnnnnnnnnnnnnnnnnnnnnnnnnnnnnnnnnnnnnnnnnnnnnnnnnnnnnnnnnnnnnnnnnnnnnnnnnnnnnnnnnnnnnnnnnnnnnnnnnnnnnnnnnnnnnnnnnnnnnnnnnnnnnnnnnnnnnnnnnnnnnnnnnnnnnnnnnnnnnnnnnnnnnnnnnnnnnnnnnnnnnnnnnnnnnnnnnnnnnnnnnnnnnnnnnnnnnnnnnnnnnnnnnnnnnnnnnnnnnnnnnnnnnnnnnnnnnnnnnnnnnnnnnnnnnnnnnnnnnnnnnnnnnnnnnnnnnnnnnnnnnnnnnnnnnnnnnnnnnnnnnnnnnnnnnnnnnnnnnnnnnnnnnnnnnnnnnnnnnnnnnnnnnnnnnnnnnnnnnnnnnnnnnnnnnnnnnnnnnnnnnnnnnnnnnnnnnnnnnnnnnnnnnnnnnnnnnnnnnnnnnnnnnnnnnnnnnnnnnnnnnnnnnnnnnnnnnnnnnnnnnnnnnnnnnnnnnnnnnnnnnnnnnnnnnnnnnnnnnnnnnnnnnnnnnnnnnnnnnnnnnnnnnnnnnnnnnnnnnnnnnnnnnnnnnnnnnnnnnnnnnnnnnnnnnnnnnnnnnnnnnnnnnnnnnnnnnnnnnnnnnnnnnnnnnnnnnnnnnnnnnnnnnnnnnnnnnnnnnnnnnnnnnnnnnnnnnnnnnnnnnnnnnnnnnnnnnnnnnnnnnnnnnnnnnnnnnnnnnnnnnnnnnnnnnnnnnnnnnnnnnnnnnnnnnnnnnnnnnnnnnnnnnnnnnnnnnnnnnnnnnnnnnnnnnnnnnnnnnnnnnnnnnnnnnnnnnnnnnnnnnnnnnnnnnnnnnnnnnnnnnnnnnnnnnnnnnnnnnnnnnnnnnnnnnnnnnnnnnnnnnnnnnnnnnnnnnnnnnnnnnnnnnnnnnnnnnnnnnnnnnnnnnnnnnnnnnnnnnnnnnnnnnnnnnnnnnnnnnnnnnnnnnnnnnnnnnnnnnnnnnnnnnnnnnnnnnnnnnnnnnnnnnnnnnnnnnnnnnnnnnnnnnnnnnnnnnnnnnnnnnnnnnnnnnnnnnnnnnnnnnnnnnnnnnnnnnnnnnnnnnnnnnnnnnnnnnnnnnnnnnnnnnnnnnnnnnnnnnnnnnnnnnnnnnnnnnnnnnnnnnnnnnnnnnnnnnnnnnnnnnnnnnnnnnnnnnnnnnnnnnnnnnnnnnnnnnnnnnnnnnnnnnnnnnnnnnnnnnnnnnnnnnnnnnnnnnnnnnnnnnnnnnnnnnnnnnnnnnnnnnnnnnnnnnnnnnnnnnnnnnnnnnnnnnnnnnnnnnnnnnnnnnnnnnnnnnnnnnnnnnnnnnnnnnnnnnnnnnnnnnnnnnnnnnnnnnnnnnnnnnnnnnnnnnnnnnnnnnnnnnnnnnnnnnnnnnnnnnnnnnnnnnnnnnnnnnnnnnnnnnnnnnnnnnnnnnnnnnnnnnnnnnnnnnnnnnnnnnnnnnnnnnnnnnnnnnnnnnnnnnnnnnnnnnnnnnnnnnnnnnnnnnnnnnnnnnnnnnnnnnnnnnnnnnnnnnnnnnnnnnnnnnnnnnnnnnnnnnnnnnnnnnnnnnnnnnnnnnnnnnnnnnnnnnnnnnnnnnnnnnnnnnnnnnnnnnnnnnnnnnnnnnnnnnnnnnnnnnnnnnnnnnnnnnnnnnnnnnnnnnnnnnnnnnnnnnnnnnnnnnnnnnnnnnnnnnnnnnnnnnnnnnnnnnnnnnnnnnnnnnnnnnnnnnnnnnnnnnnnnnnnnnnnnnnnnnnnnnnnnnnnnnnnnnnnnnnnnnnnnnnnnnnnnnnnnnnnnnnnnnnnnnnnnnnnnnnnnnnnnnnnnnnnnnnnnnnnnnnnnnnnnnnnnnnnnnnnnnnnnnnnnnnnnnnnnnnnnnnnnnnnnnnnnnnnnnnnnnnnnnnnnnnnnnnnnnnnnnnnnnnnnnnnnnnnnnnnnnnnnnnnnnnnnnnnnnnnnnnnnnnnnnnnnnnnnnnnnnnnnnnnnnnnnnnnnnnnnnnnnnnnnnnnnnnnnnnnnnnnnnnnnnnnnnnnnnnnnnnnnnnnnnnnnnnnnnnnnnnnnnnnnnnnnnnnnnnnnnnnnnnnnnnnnnnnnnnnnnnnnnnnnnnnnnnnnnnnnnnnnnnnnnnnnnnnnnnnnnnnnnnnnnnnnnnnnnnnnnnnnnnnnnnnnnnnnnnnnnnnnnnnnnnnnnnnnnnnnnnnnnnnnnnnnnnnnnnnnnnnnnnnnnnnnnnnnnnnnnnnnnnnnnnnnnnnnnnnnnnnnnnnnnnnnnnnnnnnnnnnnnnnnnnnnnnnnnnnnnnnnnnnnnnnnnnnnnnnnnnnnnnnnnnnnnnnnnnnnnnnnnnnnnnnnnnnnnnnnnnnnnnnnnnnnnnnnnnnnnnnnnnnnnnnnnnnnnnnnnnnnnnnnnnnnnnnnnnnnnnnnnnnnnnnnnnnnnnnnnnnnnnnnnnnnnnnnnnnnnnnnnnnnnnnnnnnnnnnnnnnnnnnnnnnnnnnnnnnnnnnnnnnnnnnnnnnnnnnnnnnnnnnnnnnnnnnnnnnnnnnnnnnnnnnnnnnnnnnnnnnnnnnnnnnnnnnnnnnnnnnnnnnnnnnnnnnnnnnnnnnnnnnnnnnnnnnnnnnnnnnnnnnnnnnnnnnnnnnnnnnnnnnnnnnnnnnnnnnnnnnnnnnnnnnnnnnnnnnnnnnnnnnnnnnnnnnnnnnnnnnnnnnnnnnnnnnnnnnnnnnnnnnnnnnnnnnnnnnnnnnnnnnnnnnnnnnnnnnnnnnnnnnnnnnnnnnnnnnnnnnnnnnnnnnnnnnnnnnnnnnnnnnnnnnnnnnnnnnnnnnnnnnnnnnnnnnnnnnnnnnnnnnnnnnnnnnnnnnnnnnnnnnnnnnnnnnnnnnnnnnnnnnnnnnnnnnnnnnnnnnnnnnnnnnnnnnnnnnnnnnnnnnnnnnnnnnnnnnnnnnnnnnnnnnnnnnnnnnnnnnnnnnnnnnnnnnnnnnnnnnnnnnnnnnnnnnnnnnnnnnnnnnnnnnnnnnnnnnnnnnnnnnnnnnnnnnnnnnnnnnnnnnnnnnnnnnnnnnnnnnnnnnnnnnnnnnnnnnnnnnnnnnnnnnnnnnnnnnnnnnnnnnnnnnnnnnnnnnnnnnnnnnnnnnnnnnnnnnnnnnnnnnnnnnnnnnnnnnnnnnnnnnnnnnnnnnnnnnnnnnnnnnnnnnnnnnnnnnnnnnnnnnnnnnnnnnnnnnnnnnnnnnnnnnnnnnnnnnnnnnnnnnnnnnnnnnnnnnnnnnnnnnnnnnnnnnnnnnnnnnnnnnnnnnnnnnnnnnnnnnnnnnnnnnnnnnnnnnnnnnnnnnnnnnnnnnnnnnnnnnnnnnnnnnnnnnnnnnnnnnnnnnnnnnnnnnnnnnnnnnnnnnnnnnnnnnnnnnnnnnnnnnnnnnnnnnnnnnnnnnnnnnnnnnnnnnnnnnnnnnnnnnnnnnnnnnnnnnnnnnnnnnnnnnnnnnnnnnnnnnnnnnnnnnnnnnnnnnnnnnnnnnnnnnnnnnnnnnnnnnnnnnnnnnnnnnnnnnnnnnnnnnnnnnnnnnnnnnnnnnnnnnnnnnnnnnnnnnnnnnnnnnnnnnnnnnnnnnnnnnnnnnnnnnnnnnnnnnnnnnnnnnnnnnnnnnnnnnnnnnnnnnnnnnnnnnnnnnnnnnnnnnnnnnnnnnnnnnnnnnnnnnnnnnnnnnnnnnnnnnnnnnnnnnnnnnnnnnnnnnnnnnnnnnnnnnnnnnnnnnnnnnnnnnnnnnnnnnnnnnnnnnnnnnnnnnnnnnnnnnnnnnnnnnnnnnnnnnnnnnnnnnnnnnnnnnnnnnnnnnnnnnnnnnnnnnnnnnnnnnnnnnnnnnnnnnnnnnnnnnnnnnnnnnnnnnnnnnnnnnnnnnnnnnnnnnnnnnnnnnnnnnnnnnnnnnnnnnnnnnnnnnnnnnnnnnnnnnnnnnnnnnnnnnnnnnnnnnnnnnnnnnnnnnnnnnnnnnnnnnnnnnnnnnnnnnnnnnnnnnnnnnnnnnnnnnnnnnnnnnnnnnnnnnnnnnnnnnnnnnnnnnnnnnnnnnnnnnnnnnnnnnnnnnnnnnnnnnnnnnnnnnnnnnnnnnnnnnnnnnnnnnnnnnnnnnnnnnnnnnnnnnnnnnnnnnnnnnnnnnnnnnnnnnnnnnnnnnnnnnnnnnnnnnnnnnnnnnnnnnnnnnnnnnnnnnnnnnnnnnnnnnnnnnnnnnnnnnnnnnnnnnnnnnnnnnnnnnnnnnnnnnnnnnnnnnnnnnnnnnnnnnnnnnnnnnnnnnnnnnnnnnnnnnnnnnnnnnnnnnnnnnnnnnnnnnnnnnnnnnnnnnnnnnnnnnnnnnnnnnnnnnnnnnnnnnnnnnnnnnnnnnnnnnnnnnnnnnnnnnnnnnnnnnnnnnnnnnnnnnnnnnnnnnnnnnnnnnnnnnnnnnnnnnnnnnnnnnnnnnnnnnnnnnnnnnnnnnnnnnnnnnnnnnnnnnnnnnnnnnnnnnnnnnnnnnnnnnnnnnnnnnnnnnnnnnnnnnnnnnnnnnnnnnnnnnnnnnnnnnnnnnnnnnnnnnnnnnnnnnnnnnnnnnnnnnnnnnnnnnnnnnnnnnnnnnnnnnnnnnnnnnnnnnnnnnnnnnnnnnnnnnnnnnnnnnnnnnnnnnnnnnnnnnnnnnnnnnnnnnnnnnnnnnnnnnnnnnnnnnnnnnnnnnnnnnnnnnnnnnnnnnnnnnnnnnnnnnnnnnnnnnnnnnnnnnnnnnnnnnnnnnnnnnnnnnnnnnnnnnnnnnnnnnnnnnnnnnnnnnnnnnnnnnnnnnnnnnnnnnnnnnnnnnnnnnnnnnnnnnnnnnnnnnnnnnnnnnnnnnnnnnnnnnnnnnnnnnnnnnnnnnnnnnnnnnnnnnnnnnnnnnnnnnnnnnnnnnnnnnnnnnnnnnnnnnnnnnnnnnnnnnnnnnnnnnnnnnnnnnnnnnnnnnnnnnnnnnnnnnnnnnnnnnnnnnnnnnnnnnnnnnnnnnnnnnnnnnnnnnnnnnnnnnnnnnnnnnnnnnnnnnnnnnnnnnnnnnnnnnnnnnnnnnnnnnnnnnnnnnnnnnnnnnnnnnnnnnnnnnnnnnnnnnnnnnnnnnnnnnnnnnnnnnnnnnnnnnnnnnnnnnnnnnnnnnnnnnnnnnnnnnnnnnnnnnnnnnnnnnnnnnnnnnnnnnnnnnnnnnnnnnnnnnnnnnnnnnnnnnnnnnnnnnnnnnnnnnnnnnnnnnnnnnnnnnnnnnnnnnnnnnnnnnnnnnnnnnnnnnnnnnnnnnnnnnnnnnnnnnnnnnnnnnnnnnnnnnnnnnnnnnnnnnnnnnnnnnnnnnnnnnnnnnnnnnnnnnnnnnnnnnnnnnnnnnnnnnnnnnnnnnnnnnnnnnnnnnnnnnnnnnnnnnnnnnnnnnnnnnnnnnnnnnnnnnnnnnnnnnnnnnnnnnnnnnnnnnnnnnnnnnnnnnnnnnnnnnnnnnnnnnnnnnnnnnnnnnnnnnnnnnnnnnnnnnnnnnnnnnnnnnnnnnnnnnnnnnnnnnnnnnnnnnnnnnnnnnnnnnnnnnnnnnnnnnnnnnnnnnnnnnnnnnnnnnnnnnnnnnnnnnnnnnnnnnnnnnnnnnnnnnnnnnnnnnnnnnnnnnnnnnnnnnnnnnnnnnnnnnnnnnnnnnnnnnnnnnnnnnnnnnnnnnnnnnnnnnnnnnnnnnnnnnnnnnnnnnnnnnnnnnnnnnnnnnnnnnnnnnnnnnnnnnnnnnnnnnnnnnnnnnnnnnnnnnnnnnnnnnnnnnnnnnnnnnnnnnnnnnnnnnnnnnnnnnnnnnnnnnnnnnnnnnnnnnnnnnnnnnnnnnnnnnnnnnnnnnnnnnnnnnnnnnnnnnnnnnnnnnnnnnnnnnnnnnnnnnnnnnnnnnnnnnnnnnnnnnnnnnnnnnnnnnnnnnnnnnnnnnnnnnnnnnnnnnnnnnnnnnnnnnnnnnnnnnnnnnnnnnnnnnnnnnnnnnnnnnnnnnnnnnnnnnnnnnnnnnnnnnnnnnnnnnnnnnnnnnnnnnnnnnnnnnnnnnnnnnnnnnnnnnnnnnnnnnnnnnnnnnnnnnnnnnnnnnnnnnnnnnnnnnnnnnnnnnnnnnnnnnnnnnnnnnnnnnnnnnnnnnnnnnnnnnnnnnnnnnnnnnnnnnnnnnnnnnnnnnnnnnnnnnnnnnnnnnnnnnnnnnnnnnnnnnnnnnnnnnnnnnnnnnnnnnnnnnnnnnnnnnnnnnnnnnnnnnnnnnnnnnnnnnnnnnnnnnnnnnnnnnnnnnnnnnnnnnnnnnnnnnnnnnnnnnnnnnnnnnnnnnnnnnnnnnnnnnnnnnnnnnnnnnnnnnnnnnnnnnnnnnnnnnnnnnnnnnnnnnnnnnnnnnnnnnnnnnnnnnnnnnnnnnnnnnnnnnnnnnnnnnnnnnnnnnnnnnnnnnnnnnnnnnnnnnnnnnnnnnnnnnnnnnnnnnnnnnnnnnnnnnnnnnnnnnnnnnnnnnnnnnnnnnnnnnnnnnnnnnnnnnnnnnnnnnnnnnnnnnnnnnnnnnnnnnnnnnnnnnnnnnnnnnnnnnnnnnnnnnnnnnnnnnnnnnnnnnnnnnnnnnnnnnnnnnnnnnnnnnnnnnnnnnnnnnnnnnnnnnnnnnnnnnnnnnnnnnnnnnnnnnnnnnnnnnnnnnnnnnnnnnnnnnnnnnnnnnnnnnnnnnnnnnnnnnnnnnnnnnnnnnnnnnnnnnnnnnnnnnnnnnnnnnnnnnnnnnnnnnnnnnnnnnnnnnnnnnnnnnnnnnnnnnnnnnnnnnnnnnnnnnnnnnnnnnnnnnnnnnnnnnnnnnnnnnnnnnnnnnnnnnnnnnnnnnnnnnnnnnnnnnnnnnnnnnnnnnnnnnnnnnnnnnnnnnnnnnnnnnnnnnnnnnnnnnnnnnnnnnnnnnnnnnnnnnnnnnnnnnnnnnnnnnnnnnnnnnnnnnnnnnnnnnnnnnnnnnnnnnnnnnnnnnnnnnnnnnnnnnnnnnnnnnnnnnnnnnnnnnnnnnnnnnnnnnnnnnnnnnnnnnnnnnnnnnnnnnnnnnnnnnnnnnnnnnnnnnnnnnnnnnnnnnnnnnnnnnnnnnnnnnnnnnnnnnnnnnnnnnnnnnnnnnnnnnnnnnnnnnnnnnnnnnnnnnnnnnnnnnnnnnnnnnnnnnnnnnnnnnnnnnnnnnnnnnnnnnnnnnnnnnnnnnnnnnnnnnnnnnnnnnnnnnnnnnnnnnnnnnnnnnnnnnnnnnnnnnnnnnnnnnnnnnnnnnnnnnnnnnnnnnnnnnnnnnnnnnnnnnnnnnnnnnnnnnnnnnnnnnnnnnnnnnnnnnnnnnnnnnnnnnnnnnnnnnnnnnnnnnnnnnnnnnnnnnnnnnnnnnnnnnnnnnnnnnnnnnnnnnnnnnnnnnnnnnnnnnnnnnnnnnnnnnnnnnnnnnnnnnnnnnnnnnnnnnnnnnnnnnnnnnnnnnnnnnnnnnnnnnnnnnnnnnnnnnnnnnnnnnnnnnnnnnnnnnnnnnnnnnnnnnnnnnnnnnnnnnnnnnnnnnnnnnnnnnnnnnnnnnnnnnnnnnnnnnnnnnnnnnnnnnnnnnnnnnnnnnnnnnnnnnnnnnnnnnnnnnnnnnnnnnnnnnnnnnnnnnnnnnnnnnnnnnnnnnnnnnnnnnnnnnnnnnnnnnnnnnnnnnnnnnnnnnnnnnnnnnnnnnnnnnnnnnnnnnnnnnnnnnnnnnnnnnnnnnnnnnnnnnnnnnnnnnnnnnnnnnnnnnnnnnnnnnnnnnnnnnnnnnnnnnnnnnnnnnnnnnnnnnnnnnnnnnnnnnnnnnnnnnnnnnnnnnnnnnnnnnnnnnnnnnnnnnnnnnnnnnnnnnnnnnnnnnnnnnnnnnnnnnnnnnnnnnnnnnnnnnnnnnnnnnnnnnnnnnnnnnnnnnnnnnnnnnnnnnnnnnnnnnnnnnnnnnnnnnnnnnnnnnnnnnnnnnnnnnnnnnnnnnnnnnnnnnnnnnnnnnnnnnnnnnnnnnnnnnnnnnnnnnnnnnnnnnnnnnnnnnnnnnnnnnnnnnnnnnnnnnnnnnnnnnnnnnnnnnnnnnnnnnnnnnnnnnnnnnnnnnnnnnnnnnnnnnnnnnnnnnnnnnnnnnnnnnnnnnnnnnnnnnnnnnnnnnnnnnnnnnnnnnnnnnnnnnnnnnnnnnnnnnnnnnnnnnnnnnnnnnnnnnnnnnnnnnnnnnnnnnnnnnnnnnnnnnnnnnnnnnnnnnnnnnnnnnnnnnnnnnnnnnnnnnnnnnnnnnnnnnnnnnnnnnnnnnnnnnnnnnnnnnnnnnnnnnnnnnnnnnnnnnnnnnnnnnnnnnnnnnnnnnnnnnnnnnnnnnnnnnnnnnnnnnnnnnnnnnnnnnnnnnnnnnnnnnnnnnnnnnnnnnnnnnnnnnnnnnnnnnnnnnnnnnnnnnnnnnnnnnnnnnnnnnnnnnnnnnnnnnnnnnnnnnnnnnnnnnnnnnnnnnnnnnnnnnnnnnnnnnnnnnnnnnnnnnnnnnnnnnnnnnnnnnnnnnnnnnnnnnnnnnnnnnnnnnnnnnnnnnnnnnnnnnnnnnnnnnnnnnnnnnnnnnnnnnnnnnnnnnnnnnnnnnnnnnnnnnnnnnnnnnnnnnnnnnnnnnnnnnnnnnnnnnnnnnnnnnnnnnnnnnnnnnnnnnnnnnnnnnnnnnnnnnnnnnnnnnnnnnnnnnnnnnnnnnnnnnnnnnnnnnnnnnnnnnnnnnnnnnnnnnnnnnnnnnnnnnnnnnnnnnnnnnnnnnnnnnnnnnnnnnnnnnnnnnnnnnnnnnnnnnnnnnnnnnnnnnnnnnnnnnnnnnnnnnnnnnnnnnnnnnnnnnnnnnnnnnnnnnnnnnnnnnnnnnnnnnnnnnnnnnnnnnnnnnnnnnnnnnnnnnnnnnnnnnnnnnnnnnnnnnnnnnnnnnnnnnnnnnnnnnnnnnnnnnnnnnnnnnnnnnnnnnnnnnnnnnnnnnnnnnnnnnnnnnnnnnnnnnnnnnnnnnnnnnnnnnnnnnnnnnnnnnnnnnnnnnnnnnnnnnnnnnnnnnnnnnnnnnnnnnnnnnnnnnnnnnnnnnnnnnnnnnnnnnnnnnnnnnnnnnnnnnnnnnnnnnnnnnnnnnnnnnnnnnnnnnnnnnnnnnnnnnnnnnnnnnnnnnnnnnnnnnnnnnnnnnnnnnnnnnnnnnnnnnnnnnnnnnnnnnnnnnnnnnnnnnnnnnnnnnnnnnnnnnnnnnnnnnnnnnnnnnnnnnnnnnnnnnnnnnnnnnnnnnnnnnnnnnnnnnnnnnnnnnnnnnnnnnnnnnnnnnnnnnnnnnnnnnnnnnnnnnnnnnnnnnnnnnnnnnnnnnnnnnnnnnnnnnnnnnnnnnnnnnnnnnnnnnnnnnnnnnnnnnnnnnnnnnnnnnnnnnnnnnnnnnnnnnnnnnnnnnnnnnnnnnnnnnnnnnnnnnnnnnnnnnnnnnnnnnnnnnnnnnnnnnnnnnnnnnnnnnnnnnnnnnnnnnnnnnnnnnnnnnnnnnnnnnnnnnnnnnnnnnnnnnnnnnnnnnnnnnnnnnnnnnnnnnnnnnnnnnnnnnnnnnnnnnnnnnnnnnnnnnnnnnnnnnnnnnnnnnnnnnnnnnnnnnnnnnnnnnnnnnnnnnnnnnnnnnnnnnnnnnnnnnnnnnnnnnnnnnnnnnnnnnnnnnnnnnnnnnnnnnnnnnnnnnnnnnnnnnnnnnnnnnnnnnnnnnnnnnnnnnnnnnnnnnnnnnnnnnnnnnnnnnnnnnnnnnnnnnnnnnnnnnnnnnnnnnnnnnnnnnnnnnnnnnnnnnnnnnnnnnnnnnnnnnnnnnnnnnnnnnnnnnnnnnnnnnnnnnnnnnnnnnnnnnnnnnnnnnnnnnnnnnnnnnnnnnnnnnnnnnnnnnnnnnnnnnnnnnnnnnnnnnnnnnnnnnnnnnnnnnnnnnnnnnnnnnnnnnnnnnnnnnnnnnnnnnnnnnnnnnnnnnnnnnnnnnnnnnnnnnnnnnnnnnnnnnnnnnnnnnnnnnnnnnnnnnnnnnnnnnnnnnnnnnnnnnnnnnnnnnnnnnnnnnnnnnnnnnnnnnnnnnnnnnnnnnnnnnnnnnnnnnnnnnnnnnnnnnnnnnnnnnnnnnnnnnnnnnnnnnnnnnnnnnnnnnnnnnnnnnnnnnnnnnnnnnnnnnnnnnnnnnnnnnnnnnnnnnnnnnnnnnnnnnnnnnnnnnnnnnnnnnnnnnnnnnnnnnnnnnnnnnnnnnnnnnnnnnnnnnnnnnnnnnnnnnnnnnnnnnnnnnnnnnnnnnnnnnnnnnnnnnnnnnnnnnnnnnnnnnnnnnnnnnnnnnnnnnnnnnnnnnnnnnnnnnnnnnnnnnnnnnnnnnnnnnnnnnnnnnnnnnnnnnnnnnnnnnnnnnnnnnnnnnnnnnnnnnnnnnnnnnnnnnnnnnnnnnnnnnnnnnnnnnnnnnnnnnnnnnnnnnnnnnnnnnnnnnnnnnnnnnnnnnnnnnnnnnnnnnnnnnnnnnnnnnnnnnnnnnnnnnnnnnnnnnnnnnnnnnnnnnnnnnnnnnnnnnnnnnnnnnnnnnnnnnnnnnnnnnnnnnnnnnnnnnnnnnnnnnnnnnnnnnnnnnnnnnnnnnnnnnnnnnnnnnnnnnnnnnnnnnnnnnnnnnnnnnnnnnnnnnnnnnnnnnnnnnnnnnnnnnnnnnnnnnnnnnnnnnnnnnnnnnnnnnnnnnnnnnnnnnnnnnnnnnnnnnnnnnnnnnnnnnnnnnnnnnnnnnnnnnnnnnnnnnnnnnnnnnnnnnnnnnnnnnnnnnnnnnnnnnnnnnnnnnnnnnnnnnnnnnnnnnnnnnnnnnnnnnnnnnnnnnnnnnnnnnnnnnnnnnnnnnnnnnnnnnnnnnnnnnnnnnnnnnnnnnnnnnnnnnnnnnnnnnnnnnnnnnnnnnnnnnnnnnnnnnnnnnnnnnnnnnnnnnnnnnnnnnnnnnnnnnnnnnnnnnnnnnnnnnnnnnnnnnnnnnnnnnnnnnnnnnnnnnnnnnnnnnnnnnnnnnnnnnnnnnnnnnnnnnnnnnnnnnnnnnnnnnnnnnnnnnnnnnnnnnnnnnnnnnnnnnnnnnnnnnnnnnnnnnnnnnnnnnnnnnnnnnnnnnnnnnnnnnnnnnnnnnnnnnnnnnnnnnnnnnnnnnnnnnnnnnnnnnnnnnnnnnnnnnnnnnnnnnnnnnnnnnnnnnnnnnnnnnnnnnnnnnnnnnnnnnnnnnnnnnnnnnnnnnnnnnnnnnnnnnnnnnnnnnnnnnnnnnnnnnnnnnnnnnnnnnnnnnnnnnnnnnnnnnnnnnnnnnnnnnnnnnnnnnnnnnnnnnnnnnnnnnnnnnnnnnnnnnnnnnnnnnnnnnnnnnnnnnnnnnnnnnnnnnnnnnnnnnnnnnnnnnnnnnnnnnnnnnnnnnnnnnnnnnnnnnnnnnnnnnnnnnnnnnnnnnnnnnnnnnnnnnnnnnnnnnnnnnnnnnnnnnnnnnnnnnnnnnnnnnnnnnnnnnnnnnnnnnnnnnnnnnnnnnnnnnnnnnnnnnnnnnnnnnnnnnnnnnnnnnnnnnnnnnnnnnnnnnnnnnnnnnnnnnnnnnnnnnnnnnnnnnnnnnnnnnnnnnnnnnnnnnnnnnnnnnnnnnnnnnnnnnnnnnnnnnnnnnnnnnnnnnnnnnnnnnnnnnnnnnnnnnnnnnnnnnnnnnnnnnnnnnnnnnnnnnnnnnnnnnnnnnnnnnnnnnnnnnnnnnnnnnnnnnnnnnnnnnnnnnnnnnnnnnnnnnnnnnnnnnnnnnnnnnnnnnnnnnnnnnnnnnnnnnnnnnnnnnnnnnnnnnnnnnnnnnnnnnnnnnnnnnnnnnnnnnnnnnnnnnnnnnnnnnnnnnnnnnnnnnnnnnnnnnnnnnnnnnnnnnnnnnnnnnnnnnnnnnnnnnnnnnnnnnnnnnnnnnnnnnnnnnnnnnnnnnnnnnnnnnnnnnnnnnnnnnnnnnnnnnnnnnnnnnnnnnnnnnnnnnnnnnnnnnnnnnnnnnnnnnnnnnnnnnnnnnnnnnnnnnnnnnnnnnnnnnnnnnnnnnnnnnnnnnnnnnnnnnnnnnnnnnnnnnnnnnnnnnnnnnnnnnnnnnnnnnnnnnnnnnnnnnnnnnnnnnnnnnnnnnnnccgcacgttccttcgacgacttgccagcaaatgccaaatcttacctcaacgctctacgggaaatgactggggttgaaatccagcatatctcagtcggaccaaaacgcgcacaaacgatagaactcacacattaatggttggactgcaagcgcatagccagcgaatggtgcttcttgcagaggggcgcctgagctcgattggactgcgaatggtgattgcggcgcttctctatgttccggaccgtatcgtcgccgttatcgatagcaccaaggagcgccagacggcgcaggaaggtatcggctttggtggggatacccctatcgtgcattctctcgaagaagctatggagtacgagcccgactcgattcttatcggtataacaccgttgggaggaaggatcccggatacatggcgggaaataatcgtcaatgctatggatacggggcttcatgttgtcagcggtctgcagcagattctgatgaaagacgagttgatccgtgcgaagtccgcagagaagggagtgcaggtatatgatctgaagaccgtgccgcacagccatcttatccgggcgcaggggagctggcagctccgcgcagcgaagaccattctaacggtcggcacggatgcaaataccgggaagatgaccgccgcgatcaggatttacgaagaattaaaagctcgtggaaaaaaggtagcgctcatcggtaccggcccgactggtatactgattagcggtcggggagtgacggtcgagtcgattggtgccgactttgtgacgggcgcaatcgaatacgagatcgataaggcaatcaacgaggggtatgatcatatcgttgtggaagggcagggcgctattacgcattgcggtaactcaccggtctcgctggggatacttcacggcacaatgcccgatgcgatgattctctgccaccacgctgccagggagaaggatatctacggattgaagctgcccaccgtcgctcagagtatcgcattacacgaacatatcatggcgccgttcaaggcgagtaaggtcgtcggtattgcgctgaacacgatggatttgggaaaggacgaagttgcgaaactcacagagactctccagtcggagcttcaactgaacgctatcgatcctatgcgccactccgcaaagctgctcgtcgatgatctggaacggtactacgagacctataagaacgataatcgcggccagcagttcatcaaggtctacgaccgcatcttctagagcttccgccctaaatcctccggttttacctcagattttatcttcacgaacgatcccagaatcaggatgatggttatgggcaaaaacacgtacaagaacagcatgttcaggacatcgagcgattcaggccgaagcgatttcatcgtgagataaaacacataaaatccgaagtagaagagaaagagcgctccttcccaccgcgatagctccaggccgttcacgaagacaggtatacagagtactgccacgccaatcatgagcggtaaatcgaagatcaccacatcgctggaaacaggcataccgccagaaccaacggcgcttgagagtccgagcactatcagcagattcatgatattgctaccgatcgcgtttccaacagcgatatcgagttcgcccttgataccggcaaccacagtcgtcgcaacttcgggtagcgaagtgccgatcgcgatcacagttaaacctatgatgagttcgctgacgccaagcgatgtagcaatgataactgcgctatcgacaagccagtttgatccgaatacgaggacaataagtcccgcgacaacatagaatgcatgtagagcccggtgcttatggtcgggctttgcatcgggggcaagcaacgcgtcgatcttcgcatctttgctttccttcctgctccgtttgacggtgataatggtgtaaactattccgcccaggataagaattccgccttctacctgcccgattcccccgtccagtgcaagcgcgagaaccacaagtgagacgccgatcataattggcagatcgatgcgcacaatttgtttcgaaaccgggagcgaccggatcgctgccgccagacccagcaccagaagtacattcgtaatgttgctcccaacgatgttcccaagcccaagatcggactggccttcgaatatcgactgcacagctatcgcgagctcaggggcgctcgttccatacgcgactaccgtcaaccccacgacaagcggcgatatgccgaaatcgattgccagccttgccgcgccgcgtacgagcagctccgcaccggcaataacacagacaaaaccgagtataaagagaagaacgacagtgtagtccatgaggaatgagttcgcgtggggctatgaggggattgtgttcacagttccggattgtattcgaatgacagcacgcaatattcactctcatgtcgtgacatccaaatcacaatgccaacaggcaaaccgaactttgataatccggcagcatgcgctagtttggaaagctatgaattcgccgaagacccacgattcacccattgcgcgaaccttgttcgccatcgttgcaggacttctccttgtgttgaccgccagccaggcgcagttcatccaagcagacacaaccctgcagactcgggaatcacaaaacctggctgagatggtgtgggaggatgtagagataggattcaacgacggcattgggttcttcacagccccggccaggttcgaaaccagcgattggctcattgccggcggtattgtcggagtaacggtcggggtgatggtgtacgatccggagttacgcgagatcagcctacgcaacaagcgaacatcgcccacctggcgcactgcgctcgattggggagaggattacgggacagtcgctgctggctgggcgattggaggaggattgtacattaccgggcttgcatcggactactggcttgacggcgctatcggcggaaaaggggaactgcgtacactcggacggctggtcggtcaaagcctcacgtattcaggactcgtcgcggttatccttcgttcgcttattggaagggagcgccccaatgaagcggatccggaagagcgaaatcactgggacgtggatttcttcaattgggacgcaagcgagaacgcattcccatccggacatactaccattgtattcgcaatctcgaccgcaatcgccgagtacctcgatacatggctcgctcgcgccgtgatgtactccgcagcaggtatcggcacgtacacgcgctttatcagcgacggccattggacgtcggatatcgtcgcgggtgctgcgcttgggtacttctctggtagatatgtcgtcgaccgggagcgggcgcgaggtatcccgaccgactcgaccacacccgaagtgtcgttctatcctgctccgaatagcgtccatatggtcatccgcttctaaatcaagctcccccatttctccccacctttcccgataaatggtataaagccttccatacaagcaagttatcgcctttctgctgacctagcctcgggagaccggcatctttttttgaagattccacgcaaatctgcccgattatttggaagggtcaggtctccctgtaagtcgctaatataaaacgatttaccgagcatcgactgccgaagcgcgctcagaatgttccacttttacgttctcatctcgaaaaaaagcacttgactctgagttaaaatggtgtgaaattggaggaaagtggtatattgtgggtcaaagtggtggactagtattgaggtcctgtgactggctttaaaggcaaatacgaatactcgatcgatacgaagggtcgcttgaaccttccggccaagatgcggaagcatatgatgccggaagcgaatggtaccttcgtcatcacccgtggtatggaaaattgcctgtacctgtatcccctcgatacatggagtaaggtcgagtcggaactacgcgaaaagctgaatgtctatcgtgaggaggataggctctttctgcgcacactcttgatgtgggcgcacgaagtaacgttggataagcaatcgagaatcatgatcccgcaggagcttctcgagtttgcctcgcttgatagcagcattgttatcatcggagcgctcgacaagatcgaactgtgggcgcctgcagaactggagaaatatctcggcaagttcgcagagcaatcgtatgaagaagtcgctgcccgagttatgggcggtatcgaataagagccatcggattaccatgtatcatgtcccggtattggctgaactagcagtccaatacctcgttacgaattcggacggggtctatatcgatggcacacttggcggaggaggtcacagtgctctcatattggataagctcagtcgcaacggtctcgtaataggcatcgatcaggacgaagatgctgtgcgattctgcaaatccagatttgccgatgaaacccgaatcaaaatagtccacgaaaacacagaacatatgtcgcgaatcctgcaagaaatcaatattgacgcggtcgacggagtgctgctcgacctcgggatttcttcccatcagattgatgagggtgcgcgcggattttcattccgagaggacggtccgctggatatgaggatggacttgcggaccgtcgcctcggcgctcgatatcgtatcgacggcaacagccgaagagcttacatcgattatcaagcgatacggagaggaacgctttgcgtatcagatatcgaaacgcatcgtgcagcgccgtaccgaaagagcgatagataccaccgatgcactgaaacacgtcgtgttagaggtggtgaaagggccaaacgcgatgaagtcggtagcgcgcgtttttcaagcgttgcgcatcgccgtgaatcgcgagttggacgtcctcgatgagattctggaagcgacgtacgcatcgttgaaagtaggcggaagatgtgtcgtgatttcttatcactcgctggaagacagaaaagtgaagcagtttctgaagcaggaagcgcccgtacaaaacgagattgacagactatataacgctacggcgcctggtctgttcaatctgataacaagaagtgcaattcaacccgatgaagatgaagttcagcgaaacaatcgcgcgagaagcgcgcgactacgcgcggcggaaaaagccgtctgagaatcagcagagcgaatttctgttcgatcacaacgtcgatgttcctctgacgaacactgcgtactatcgtaaacccgggaagcagggtttcgaatttacaacgttcaatatcattgtgattctggtattcgcaggattgatcgcaacggcatacatctcaaatgttgtcgcggttgacgatctgatgatccagagaacgaatcttcgggaaacggaacagaagctgcttcaacagcgagaaaatttgcgcgctgatatcaacatgcttacaagctacaatcgcatccacagtatcgcgctagaaaaactggggctcgtagacgctaccgaacgcccttatgtattctccaagcccgaaggcgactaacggcatagaaatgaacgacccaatctcactcggaatatcgacgccgcaggaagaatctcagaaaccgaagaccggtttccgaatgagactctacttcctgttcgttgtgtttttgctgggatacgcagttctcgcagtgaggttgtttgttattcaagttcgagacgccgacaagtaccaggagattgcacatctacaatataaaagcagagagccgttagagccggtcaggggtttaatctacgatcggaacttatccatccttgcatccaatgtcacagaatataccgttgcggtggacccaaaggtaatcgaggataaggattccgtggcggagatgctcgcacagtatttaccaggtacaaaagcctcatacctcgagcggttgaatacaaagaaatcgcgctatgtgattctggaaaaacatatctctgaatcgaggatactcccgcttaagcaatggaactactacggtgtgcgttttgatgcgatatcgaagcgtaaatacaacttcaacgatctcgccggcccgattatcggatatacaaatgtcgataaccgcggtcagagtggaattgagcttgcgtttaatgaagagctctcaggcgaagaaggctttattgtctaccaattaaacgcgaagcggtacaagcgtccggaggttgagtatccgtataaggagccaataaacggccgaagcatcgtactcactattgatcacgcatatcaatctattgcagaggatgaattaatcgcaggcgtcaaaaggcatgaagccgtatccggtagatgcatcgtcatgcacccaaagagcggtgagatccttgcgatggcgaattatccgagcctggatcctaataaccgtgcggaatatacgcccgaaaaggcgaggaatagagttgttacagatttgtatgaaccgggctcgacattcaaagtcgtaaccatgagcgccgcgctcgatgaagcactatacagtccggaagatgaaatcgacgcagaaaatggcaggtactatcatacgccgaacgaaaagccaatcgtggatgatcatgaatatggttctctgacactccgtggtgcatttgagcattcttcgaacatcgtgagtgctaaaatagcgaaagaactcggcaaggagcggatgtatgaatatgcaagaaacttcgggtttggaattaaaaccggtattgaactccccggtgaattaagcggggaactacgtaaccctacgtcgtatgatgccacaacgcatttatatatggcctttggatacggcctggccgcgacctctctgcaaatcgcttgcgcgtatgctgcgatagcgaacgacgggatcctcatgagaccgtacatccgaaaatggatgatcgatggcgataggaatattatccatgagacccggccacaaacgatccgccgcgttgttagcagtgagaccgctgccacgatgagaaggtttatgcaaggcgtcgtagactctggtaccgcgagaaatgcgagaatcgacgggatgagtataggcggtaaaacaggaacatcgcagcggctggtaaacggttcgtattcgaatacatcacatgtagcatcattcgtgggcttctttcctgttgaggatcccaaggttctgatattggttatcttggactcgccgcagaaaggctactacggcggtacagttgcggctccgatatttaaaaatattgctcaacgtattatatcgtatagcggtgaatttgcgaaagtacccgacgctgtttacgcctccgagagcgggaataaactaaaaaccgttcctgacgtaagagggttatcacctgcttcagctgctttgctattacatcagtacgggctcgcgtattctccagcgcaggatagtggtatcattgtggcacagaatccaaatccaggaaatacactcgcagagggcggaatcgtacaatgcgaagtggcatcagatacgggaaatggtgatgtagtgtccatgcctaatcttgttggaatgactgtgaggcatgctaacacactgttaaccacactcggtttatcggtagagatacatggtagtggatatgtaaaacgtcaatcgccagaacctggcagcaaggttgaagcgccacgctgtacactatgggcagaggctgcaaatatatcagcaaatctatactaagacgatgtttaatcaactgaatccaaaaatgcacgacccaatggccccgaagagattatcggatatcatctcggatgttccggttgtgcagttatttgggccggttgatgcttcggtgcagggaattactactgattccagagaagtgaaaccggggtgggtgtttgtcgcgcttgatggtgagcatgtcgacggtcacaagttcgtgaacaaggcgattgaaagcggcgccagcgtcgtagtgattcaggaagcccaatacgaaaagtctttgaaggaactccttactccttcatatgtgcagcacaatggtacaaccgtcgtgattgtacgatcaacaagaatagcctgcgcaattcttagcgatagattctacgactcaccggcgcaggagatgcgttccgtgggaattacgggaaccaacggtaagaccacggtttcgtatttgttggaatcaatcattgcgcatgcaggtcttaagccaggcgtgatcggcactatcgaatacagaagtgcaggaaaagcaacgcctgcaaaatacactactcccgcgcctgaaatactccacggagttctgcgagatatgaagcgcgataattgcgatgcatttatcatggaggtctcctcgcatgcactatcactcgatagaatctacggaatgacattcgatgtttcgatcttcacaaacttgacgcaggaccatctcgatttccacggaacgatggacgactacgcatactgcaaggcaagactctttagtgatcatacagcccaagtctccatcattaataatgacgatccatatgcaagcgtgatgctgcgaagagcgaacggaagaaaatggacatacggtacttccaatgattgcgattacacgatgtcggttgtatcgaatccatcgaatgggctgatagttgaaataacacacaaggatgaaaccgatacggtaagttccgaactgcaaggattttttaacgcttacaacattaccgctgcctatactggagcgcttgctcttggaatagagcgcgaagcaattatacagggcatccgagccatacagaacgtaccgggaagatttgagctgtacgaaggccccgacgggaaacgagctatcgtcgactatgcacatacacctgatgcattaaagaatgttttgcaggaagcccggaagattataccagataacagaaatctcatcctggtatttggctgtggtggtgatagagatattgacaagcggcccaagatgggtaaaatcgctgctgaaggaagcgatactgtaattgtcacgaacgataatcctcgaacggagaatccggaagaaattgtagcgcagattctggccggcattccagagggttattcgaacatatctgtaatctacgaccgtgaagctgccatccatacagctatagaaaagtcccagcctggtgacatagtgcttgtggctggaaaggggcatgaagaataccaggtaatcggtcacctgcgtagacaatttagtgattcctcaatcgtgaaagatgcattaggtatcacatgatatgatggaacgattctacatatcgcatttgctgcagattccggctgtttcgcacgtaggtctggcagataggacgaaagagcccgtaaacaacatcgttatcgacactcgaaaagtgaaagatggagatttattcgtcgctataaacggggctaacatcgatgctcatgacttcattgatgaatcagtagtaagtcaggcacagctttgtgtggtaagcaaggagtggtatacgcaacgcggtcatgagtatcacaacggttcatttcttgtagttgaggatacaacgaccaccctcggtcaacttgcacgattgtacagggatgaattccagataccggtgatcggaattacggggagcaacgggaaaaccacgacgaaggagatgttgaaatctgtactgtcagtaaagcatcaagtttgtgctacaagcggtaactataataaccttattggcgtcccattaacgttgtttactctgcgcagaaatcacgatatagctgtagtcgaaatggggacgaaccggccaggagaaattggagccctttgccagattgcaaatcccaatgacggtattattacaaacatcggatatgcccatatggaagggctgtcaactctagaagatgtagctaaagaaaagacagctctgtacaagtacgtagcaaatcgtggtatccgatatattaatgcagatgattcatatctcgcctcgcaaaaggtagtagccgggcaaaacgtaatctttggtatggatgggaatgctgatgtaagaatagcaggctattctacgaacgattccggtagtacggtaagtttagaagtggggcagaatacgagatgtgatgttagtatcccgaagcttggtaggcactttgcatacagcgttgctggtgccgttgctgtcggactgcagtatagttgcggattagatgaaatgaaagaggcactcagcgcgttccatggtgctcccggccgaatggatgtattccgtgttggtgagaacactgttattgacgatacctacaatgccaacccaagttcggtcaaagcagccgttgatactcttgatgaccttacaactgattgcgataaggtcgtagtgctgggagatatgctagaactaggccatcgatccgctgaatatcatcgggaagttggtgagtatatcgccggatcgaaagtaatgacactcatgacttatggcagcgacagcaaagaaatgagtgacgccttttctgaaatacgcagcgtgaaggccgcgcattatactgatataggtgaacttacgagaacactaattgagtgcatgagtgtccggactattctccttgtaaaagggtctaggagcatgcacatggaactcattgtagagaaacttaaaaattctgtaccggtgacctgatgctgtattacctactggaatatatcaacgaagcattcgcaccaccaggtttcgaagtgtttaagtttataacatttcgagcggctgcggctgcaattacggcacttcttatgaactggttagtcggcgcgaaactaataaggctgctcaagcgattgcagataggggagtcggcgaaggttgaagcaccgaagaatcatttggcgaaagctggaacgcccaccatgggcgggttgatcattattagctccattacgattcctatgctattgtggggtgaactccataatacatatgtatggctcattttggtaacaacggtatcgcttgctggtgttgggttcctggatgactacctgaaggtagtaaagaagtatccgaaaggcctcattggggggtataagatcgtcggacaggtccttgtgggggctatggtgggtagtgtcctttacttttccccagagttcgcggaggtcaattctttgacaactgttccgttctttaaaaatctgaacttcgactatttgtggctctatatcccagcagtgatatttgtaataacggcaacctcaaatgcagtaaatctatctgacgggttggatggtctcgcagtaggtaccattgtaatagcatttctcgctattgcagttataagttatgtctcaggacgggtggaccttagcgactacctaaacatactgtacctaccaggaagtggcgagttggccatattcagtgctgctatagtgggtgcaggacttggatttctttggtacaacgcataccctgcccaggtgtttatgggtgatacaggatcattggcattgggcggtgcattaggtgctacaatgatacttatcaagaaggagcttttgctacctattctcggcggaatattttttgcagaaacagtctcggtcatcatacagcgtctatatttcaaatatacacggatgaaacatgggcagggtcgtcgcgtgtttaagatggcaccgatacatcaccatttcgaacttgaaggctgggctgaaccaaaaatagtcgtccgattctatattatcgctgttattctcgcaatcttgagtttagctacgtttaaggtacgatgaagcctaagtataagaaatactccgtactagggtctgcaagaagcgggatggcggcagcgttatttcttaagcacaagggaatggacgtgtttgttagtgagcttcaggaagcagatcattttatcgaatcgaagaagcagtatgatgaatacgatatagaatatgagtatggtaagaatagtaaccgagtattggattcagactgcatagtagtgagtccgggtatctcgctatctatccctctcctggagacagcgagagagaacggaattcctattgtcagtgaaattgaggtgggctcatggttttacgatggtaccatcattgcaattacgggtacaaatggaaagtccactacaacagcgcttattggctatttattggagcaagcaggatacaattgcatggtagcagggaatataggctatccatttactagagcgttatatgaatctgggccgtgtgagtatgcagttctggaagtaagcagctaccagttagattcgatcaagacgtttcatcctaatgttgcagtcattactaatatcatgccggatcatttgagccgttacaataataactttcaggaatacgtttcatcgaaagcgagaatactggccaacatggctgcagacgatcatttggtctataatgccgatgatacgaatgttgtcacagtagtggaggaggcggaaaccaacaagcactgctatagcagtacggtgcgaggtgaatgcactgcgtataaagtcgataacatgctgatcattggcgatagttcgggatcgatcctcgaaatagatgtcagtaatatgatcctggtgggtgaacacaattatcagaatgtaatggccgcgtcaattgtcgcacggatatgcaatatgtccaaggaggtaatagaagccggagttacttcattcaagggtttacctcacaggctcgagtacataggtgaaacgagctcattgagatggataaatgattccaaggctacaaatgtagcgtctttggctacagcactgaccaccttaagcggttctaagatctgtttaataatgggcgggcaaagtaaaggcgaggattatcgcggcctgttggatttaatgttacaacaggtagtgcatgtgatattgatcggaactgctgcaagtgagatttatgaggtaatacgcgattctatactctctacttttgcggttgacttggagcacgcagtcaacatagcagggagtcaggctgactctgtagacgtaattctgctttctccaggatgtgccagctttgatcaattcaaagattatgaggagcgtggcgataagttcagatatttagttgataggtacattaatgaatgatgttagtgctgtaaaaattggtagaatagacctgtggctctttggcgcagtgcttttgctgctggttttcagcgcagcatcagtttacagcgcaagtattactatctctgaaattcgtcatggagcgccagatgcagtttataagagtcacatactaagagttgttcttgccctcgtagctttgttgattggcgtggtggtagactatcgcatatacatgcgcttgtcgaagattgctataattatgggtgttgcgctgttggtattaaccttgtttgagggtactgtcgtcaatggtgcacgtagatggttggagcttggaccactgaaatttcaaccatctgagttcgtcaagtacgcattggtatttcatatcgcgacgatagctgtaatgaagaatgagagaatcgggactttcaaggatggttttctcaagacctatgcatggataatgatctcaactgtactgattattgtgcaacctaattttagtactgcagctgttgttttactaatcgggacagttatggcttatgcttgtggcgtaaaggtgaaatatattggtgccagtttagccgcagcattaccgttggtggtgttgtatgcctttagcgcaccgtacagagtgcagagaattgtatcgttctttggcctaggtgacggttcagacacaagagtagatgcctcacgatatcaggtggagcaagcgatcattggattgggtagcggcggtattatgggcgtcggtatggggatgagtaaacagcgtgagttgtttcttcctgaatcgtacagtgattttgtctttgctatcgtcggtgaggagtatgggtttatcggcgcattactgatactatttctgtttgcattgattacattgcgtggtgtgagaatcgcaaagaatgttcaggatgattacgggaggtatctggcatttggtattactagtgtgatagcgatatactcgattatcaatgccggtgtgtcggtgggcctgctcccaacaactggtttaccgatgccgtttatcagctacggtggaacatcccttataattagtggatatgtcgtaggcgtactactaaacatatcgacaaatacacggatacggcctcgggcctatgaggaggctgctgccgatgcttaaccggaatccatataaagttgtgtttgcagccggcggtactggcgggcatatatacccggccatagcgatagcaggtgagcttcaattggtttcgccccacattgaggtcacttttatcggtaccacaaacagactcgaatcaaagatcgtcccaagtaacggatacacgctgaagttcatcccggttatggggctttcgagaagcttgagtatcaggaatgtctatgccatcatgcttctcgtttatgccgtaataaagtgtattggtattctcagacgtgagcgagcgagcctcgtcgtaggaactggcggctatgtttctgcaccaacggttatcggtgcactcctatcgggaatcccagtgctcatgctagaacagaatgcgatacctgggatggtgaataaatacttggctaagtacgcagaagaggtgcacttgagctatgaggtgacacagaaacaccttgaccgtaaaacacattccattatttcaggaaatccaataagacgactcagtgaagttgatagagagtctgcgcgtcgtgaaattggcattggaggggataatcgaactgtacttgtcttcggtggcagtcttggagcctctgccattaattcggttttgttagaacacattgatgacattgtagagtcatctattcaaatgatatggcaaacaggctcgaaagactaccaaaaggtggtcgatcgggttgatcagccaaatatcagagtctatgagtatatagatgatatggcgtcagcatactctgcatgtgatcttgttgtatgcagggcaggagctacgacaattgccgaactgcaagagatgaacaaaccagcgctgcttataccatatccacatagcacagataaccatcaatattacaacgcaaagggctacgaagagatggggatggggcttgtgattgaagaaagtgaaatacgtgaacttgtccccaggatgatcgagtatgcaatcgatgacggtgggctggaattgaaaagaagagatggaacatcaagcggatcaatgaacgcacgtgaagaggttactgctagtgtaatgtctctattgaagaataccacggatggtacggtgaatcgatgcggatagccaatatacacaacatacactttatcggtattggtggtatcggtatgagcggcttagctcatttgatgctcaatgaagggtatcatgtgtccggctcagatatgaatgagtccgagaacgtgctagatctacgtaaagcaggtgcgcatatcgaggtaggtcatcgtgccgaaaatgtaacagatgctgatctagtagtatatagctccgccgttcaggaagagaatgttgagttagctgaagccagactacgtggaatcccggccataaagcgcgcagagatgcttgcggaggcaatgcgattatatgatggtattgcagtatctggcactcatggaaaaacaacaacgacatcgatgttgggaagtattcttatagaggcacagcacgaccctaccgtcattgtgggaggtaaactacatgcatttggcgataccaatatcagagtcggaaatggtactacaatggtagttgaagccgatgaatatgatcgatccttcctgcgattgaatcctgcaattgtagtgatcaccaatatcgataatgatcatctcgacacttatgaaacaattgaccagatcgttgaggccttcaaatccttcgcaaataaagtgcctttctatggctttgtgaccatatgccttgacgatgcccagctacagcgattattgccactcataaatagaaaggtagtaagctacggtataaactctcaatccgattaccaggccaaaaatatcacaatgactaccgatcgtactgaattcgacgtcgtgcatgacggagaggtacaggggagaataggcatcagaatgccaggagagcacaacgtacagaacgcaattgccgcaacggctgtagccttggaactaggtgctgatttcggttctattcagacagcgttgaatgaatatggcggtgtatttagacggtttgaattaatcgagcaagtcggtgaaacacagttcatcgatgattatgctcatcatcctactgaagtaatgagtacgctaaaagccgcaaaggcagcaatgaagaaacgtgttgtctgtgtgtttcagccgcatacctactcgcgtactcgagatcagtatcgagaatttgcacaagcctttatacttgctgatatacttattgttttaccagtatatcccgcaagagaggaacccatccaaggaattgatggccatttgatctctgaaacgtctcggcgttatggtcacaaggcatccttcgctgtgcaaacaaaagaggaagctgtgagcaaagtaatagaagttataaaagaaggtgatgtgtgtatcacgatgggtgcaggagatgtttacaagctgatgccagatataatatccaagtacaaagaaggtgtgggataagtgaacactaagctgccatcattgccagcgagtaggatatcctatgattatccgggtagtgcattgtgctctatgcgtaccggtggtcctgttgatatcttggttgatgtgggtagtatatctgaccttaatatactaatgcgagaactgaactgggaatcaactcgatatctcatattaggacgaggatctaatgtgcttatccctgataatgggattcggggtatcgtcataagacttgaaggagaatttacacagcttctttctgatggcgatatactttatgccggtgcaggagcaagaatatccaatctcgtaagctacgccatccgtagggggtattcgggatatgagcgtttagcaggtatcccaggggctgttggcggggctgtgataatgaatgcaggtgcacatggggctgaaatcagcgacaatgtcatatccgtcgaaacttttacaagagaaggtctgagggcgtactcgaaagaagagtgtcaatttgaatatcgtacgtccaacttacaaggtcagattgtattgcgtgcaatattcaagtgtgaagcgggtgatacaaacaagatgaggggaacccgaagtgagattctggccaagaggaatgctagtcaaccagttcaatggcctaactctgggagcatatttaaaaaccctaagtctgggtatgccgcgaagtatctagaagaggcaggacttaaaggatataaggttgggggggcagagatatcaaataagcatgcaaatttcatcattaatactggatcggcacgtactcaagatgttattgagctaattaagcatgcacgtagaaccgtttctgataagtatggtgtcctactagagccagaggtaaaataccttggctctaaaggtgaaatcgttgagggcgaggtgtaaaatatgctgatgcgtagatttcaaagatacgtatttctgtttgtaatcctcctcatattggtcgtaggaggatggttctcgatgagcaagccagccgatagcacaaagaatatatccattgtgggctgtcaaatgttgaacgaatctatactcaaggcacaaatcgattcggcattccaaggcaatgaggagcatatagcagaacgtattcgcgagtttgttgagcaaaaccacattgtggatagagtgattgtaaaggaagagcacttcaatgatatagtagtcgaaatccatgagagaaagccggtcgcgactgtaacatcagcttctggaaaggtccttgttgatcgcttgggtaaaccgatttcgaatgagatacgtggtgctatgaagacacttccaaagatcgttttatcagaagagggcaacgtatctaagaaatcgtcgcagcgtgacacgaagttacttgcaacactgcttcatgaacttcatacgcagcatagacagatctatgacgtcatatcggaggtggtccaataccgatcatcatcatggatgatttatcgttgcgacttccagcacccgattattgtggctcccacaaagaagaacatacattctcttgtgaatactctctctttactgcagagttctccgcatggagatgaaagtgagaccgatatcgaatacatagatcttcgcttcgagaatcaggtcatttatggtaaaaaccaagaatcagttgtaaatagtccccggagaagttaaatgtcggacagaatatacgttgggttagacattggtacgaccaaagtatgtgtcattgtagcagccgtcaatcaagatggtttagtgaatattctaggcgtcggcagagctgataacgagggtatgaaccgcgggactgttacacatattgacaaaactgtccgatcgataaaaactgccgtacaggaagcagagacacaagcgggcaccactataagagccgtgaacatcggtatcgcaggggaccatattcagagctttcaaagccgcggagtagttgcgatcagcaactccgacaatgaaataacgcgccgtgatgttgaacgtcttcttacggatacgaagaaggttgccctgccatctgatcgacggataatacatgttattccgcaggagtttattgtcgatggtcaggacggtatttacgatcctgtgggaatgtccggcattcgcatggaagcaaacgtccacataattactggctctgttacagcaacacaaacactctataaatgtgttgagcgagccgggttggaagtaaacgaccttgtattagaaccactggcttccagctactcagtgctaaatgaagaggaaaaagaagtcggtatcgtcttggtggatatcggtggtggaaccacggatgttgcaattttcgaagacaagacgatcaggcacacttccgtattggcaatcgcaggtaagaaagtgaccgaagatattcgtaaaggactcggtattcttaatgaggatgctgagaagctcaaaagagaacatggttgtgcattcttgcccgaaatcgtgaatgatacaccaatcacactacgtggtatcggtggcaggaaaccgatggagatatctaaaagccttctgtgtcagattatccaacctcgtatggaggaaatatttgagattgtggggctggagattaaacgatccggctatagcaggcatctccactctggcatagtcctgactggcggaggttcgctcataacgggtacaacttcgttagcaagagaagtacttggaatgcctgttaagctcggtctgcctgacggcttttctggtggtctcaacacagaagtagaaaatccgatatacagcacaggcatcggattgatcatgcacggaatgaagtaccaggcttcggtattgtcgaaggagtacaattcgaagttcggcggaaacatcttcaagaagatgatcgactggttcaatgatctttgataataacgtttgaaactatacacgctcaaaaccgaggagggtttatggctattgtttttgacagcacactcgatcagcgcgcgagtattcgcgtcgttggagtaggtggcggcggcggaaattccgtcgaggacatgatcgcacgaggtattaacaatgtggatttcattgttgttaatacagacgttcaggcactcgagagaagcaatgcacagtataaagtgcaggctggaaagaatcttacgcgcggcctaggtgccggcgcagatccgtcggtcgggtaccgcgctgtggaagaagacaaggaggagattgcagcctctctatccggcagcgatatggtattcgtcaccgcaggtatgggcggcggcaccggtaccggcggggcgcctgtagttgctaatatagcaaaaggaacaggttcactcgtcgtaggtattgtgacgaagccgttccacttcgaaggtcgccggcgaatggcccaagcagaagaggggattgaagagctgcgtaaacatgtagataccctcatcgttatcccaaaccaaaaactcctgtcgctggtagataagaatactccagtaacagacgcctttggtatagccaaccaagtgttgtttaacgcaacgcgtggtattgctgaaataattaccgtcccaggattggttaatgtcgattttgcagatgtccggaccacaatgcgcgacatgggcgatgcattaatgggtagcggaattgcgaagggcgataatcgcgcagtcgaagcagctcatcaggcgatatccagtcctttattggacggtgtatcaataggcggagcgcaaggcgttttaattaacgtcacaggaagctctgaactatcgatgctggagatcgatgaggcaagttcgataatcattgaagctgctggcgaggacgccaacgtgattttcggagccgttgtcgatgagacaatggaggatgaggtcatggtgacagtgattgcgacggggttcaataagcggaacgctgcgatatcacggaatcagattgggcaaagacagcccagtacgagctccaagatcaatcatatacccacgggcgtgaatgatcttaaggaccttgatatgcctgcgttcatgcgaaaaggtaccttgacgcttacgcaaaacgaaagcgaagacgatcagcatgatgacgctggccaggaggaaagaagcaaaagcgaccgtccggcattcttgcgtaaaattatggactaatccccagcccgaaaacaagggcaaacaagagtaaatgaaaagtcgtcatatgtggcctgtacggcctgtatatgacgatttttctgtatttggtcgtatcatctttggatgatgctttctgatgatttgttgcacaaatgttgcacgatcgaaaaacgtgcaacaattgttgcatgtttcacctgttttcctatatttggtacatagctgattctcacaggtcatattggcatggagcaggaggactgaatgaaggtgacattaagagagcggacagtgaaatctggaaggacacaactctacttcgatatctactatggcgatggaaagaggaaaacgaaggcattcgggacactatccggcaatagacagcaagacaaagaagcaaggcggatcgcaggtgcagctcgttcaaagctcgaaatagaattattgaatgaatcgcatggcttccacaaacctttccagttagagcgcaacttcttcgaattcttcgatcaagtcatggacaataaaaaggggaactatggatgctggaaatcgactcgctttcacctagtaaattttgtcggtaaggagagccttcattttaaaactatcacgcctcaatggttagagtccctcaaatcttatctcttatcacaagtagctccaaatacagcaagagggtactacgctgcggtacgcgaaactctcaagcgggcagttcgtgaggaaataatccctgacaatccgagcgacaagatcgacaacatcaaaccgcgtaactcatatcgcccttatctgactctcgaagaattaaacgaactagcggtagcgccatgtggtgatccagaagtagaacgagcatttcttttttcttgtctcactggattgaggttgggagacgtcaggcgtctgcaatggaagcacgttcacatgaacaagatcgaaatagttcagaaaaagacctccgaaccgatctacctatcgttaaacgatcaggccattgaattactcggtcaacgaggtgacaatgaagagcggatattcgccataccgagcgattcacatctatctttaatcatgcggacctgggcctccggtacgggcataaacaaaaagattacatttcacactgcgagacacacatttgccactcttgctctaactaatggagtggagatttatacggtttccaaactcttaggccattccagacttgagaccactcaagtgtatgcgaagattatcgacgcgaagaaggaggacgctgtcaagatgttacctaagatcaaggtgaagtgaaacgtgtttctatttacctgctacacaggattgaggattggagttgtgcgctcgttaacatggaatatggtgtacgggaatcagatcgagatagctcaggagaatccaaaggacccagtatatttaccactttccgacacagcgcgtacgtatatgggcaaaccaggaatggacgacaatccagtttttatattacttagtaattcgcacttatcggtaattttaaaaacgtggagttcgccagttggaatgaagaagaaggtgaccttccatgtagctcgtcacacgtttgcaacactggctctctcaagcggtgctgatatatacacagtctccaagctactcgttcattcaagactcgaaacgatacaagtatatacgaagatcattgactataataaagtcgaaacggtaaatatgttgcctgatattgggataggttaactaaatgagggtatgatagctatgaatggattaccagatgattattatcacgaagatcagtttcgaggacactgcaacaaactgatggattcactgcgacaagagtataaggaagagcttgacaaagtaggttcatctgaaataacgcccgaacgcgctggagatatttttagggtagcctgggagaagttcgacaatgaaatgactcctttcttgttttatcgcgctatcactgtaccaaagaatgtgatgagacatcttaatattgacgatcaggaactttctgatagtagatatgcagcattatataagtcaaaacaatggtgggatgccgttgaagaaatttcaataaattcaatccccccacctggttctttaatagacctaatcgcacaaccattgcagttgttttcaaatgtagaaaaaatccaatacgtcgattatgttaaaaccatagtggttcagaggtacttggtaggtgtgggtagtttacaagatatgtacatgaaaggggccgttattgatccatttcctgaattgatcgattggatcaaagtcaatgccaaatattggtccagatactcggagactaaatcatctaacactgtctactcttatggtcattacatcgagaatgagtctggacgtcggttgttcaactggaccgctaaattagtccaattggcaaaggttctagtggcaataaagtatgaagatggttctgagtttgtctcggcctcttccggagaacttgcgagattggcagaagtccgcatcctctaccatggtgataagatcaaggcaaattctcttgagacatctattaagcgggtttttgatggatacgagtccccatctgccatcccagatggtgccgtagtagtcatcaaacaaattttgctaaacagcaacaaatcttaatcccaacaaaattgggaacaatattggtgtagttgctgacctacatttcctgcaagcaaatcataagcatgaacaatgcaggaagacatctctcatggaaaaccaactcaactcacggctcaatgccattgaggagaagcttgaggacctctcagcatcacaacgagacgtgctgaccttccaacaagcggctaaatacctcgatttcagtccttctttcttgtacaaactcacctcccaaggtagaatcccgcatagtaagccgaatggcaagcgtatctacttcgatcgccgggagctagatcgctggttgctgcaaaatcccgtgaaaacgcaggacgagattgaggcagatgcactttccttcacaaagtcggggaagcggagctagtatcctgtgtccctttattaataagtgggacaaggatacagtttctgtatccgtactcgtgtacgatacagtcaaaatagtgcactccaatggtgagtacgaggagattcctgggcgactaacaggcgttgtaaatcgtcgtgatcaatacgataagctactctcctccatagggaatctagtcaacctggacgtccgcgttactgacaagcactgtactattcgaggctcactcagcaggttctatcacggaagcaatctttacattctatccaggcaggaaacaaaggccgcgattgagcagatatctgcactcctgggtctcgatatcagttatgccaaattaacgcgcattgatgtcgcatcaaatctcatcatggatcatcctgtctcgagttacctcaagcttcttcaatccatcccccgttacaagaagtcgctcataggcctacctgaaagtcctagtctctacttttctaccactcaaagaaagctgcttttttacgataaaatccatgaactcaggtctaaaagagtatctgtacctgctgagttcagggaagcgaacctgctccgatacgaacttcgtttcaatcgtcacctgccgcggcagttctcgggaaaacgtgtgacgtgcgctatgttgtacgatgaaaggttttaccaaaagctcgttagccgttggcttcaggagtacaagaagattcgaaaagcccggaagccgaaagttggacacagggatatcaccgattgtcgtgtgttgaattcatacctggcgacgattggattggagaaagttggcgctgacacgatgcttgatgatctttctattcggcgcagtagtggccatatcggcaaaacgcagcactcccgcctcaagtcgaagatatcggctctcaggtcgaatgaggcccacacagtagagcacgagcttgcaagagaactcgatgagaaaatgcaagcagcagcagactacctgcattcgcaggcgtgaggtacctaatttcgatgacgaacgtttgctgggactcaaaaaccgcgcgacaactgacttctcgttgcaatcccaacatttttcgattgaggacgagattgcattcaaagttaggttcttgtaggttctctctctcagcccttgcaatcgacattacatccgtaactggggctgggatgacagtttacgcatacaattctccacagttaaattgcccgccactgtaggcgtatacatcatcacagttgcatgattgcaggctgtgataagtagctactccattcgggtgtcattcggctccccacgtttcttgaaagatgtgtcgtttcgcccgtttatcctctttggcattcaatgcgatactacaagctgtcgtcttcccctcctggctcagtactccaattgcgataccccgaccgcgatatcgattcgggactgtgatcgttccctcttgtaccgatggttcgttttttacgtgccaagtgtcacagatataggctcccagttctcttattataaggagaccttgtctcttatttagccacttccgatcttgaattgctctcactccatcaacagttctcaatgctctatgaactacaatctactcgatgaaccctggatccccgtgctatttagggacgggcgctatgagcgtctcgggattaccgatacactcaccagggcacatgaaatacggcaggtagccgccagcaacccaatggaccgtgttgcggtcctgcggtttctgcttgcactactctactggtgcaagggcaatccgcctcgtgatgcccagacacagctacatgaaccgcttccatcaacctggttcacagcacttacagcacatcgaggtgtgtttgagttgtttggcagcggtaaacgtttctaccaatatggcgggctaggaaagaagaaaccgttatccgtgaactcactcatccatgaggtaccgacagggacgaatattaaccatttccggcactcgatcgacggtgaagacggcctctgccccgcttgctgtgctttaggactcatccgcctgccactattcacaacccagggaggtcagggtaaaaggcccggagtgaatttcaaacccccaatctatctcatcccggctggcgataatctggctgagacgttgcgcttatcctggatgcagattaagaacctcggtgccccaatatggaatcgagacacctaccacatcccgatagacggtgaaatcttgtttttggaggcgctgactgcactcccacgcagggtgtggcttcgcaatccggatatcgaagaccggtgcatctcatgcggtagattcacggaccttgttagggaatgcgatttcgaaggcgccccgaaaagggagctacctaatagctggcaggacccgcacgttgtgtatttcctcaatgaggatgagatccgctcagcgcgtgcagataatactatgaagcctggtgggttcaggaccgaccgtccctggtcgaggctcatggagcgctttcttggtgcagaatcccttgcctccagagataccgatactcgcttcctgatcgtcggcttcgcatctgatcagacgaaatacatcgacgcttgggaacgtacattcacactacctgccaacaccaacaggatagcagcatccgatgcgatagacagatggtcggctgccggcgcaagaatgccgtggcggataaaacatccatccccacagcgcaaaccatcatcgaacgaaaaggctataattggctccatccggccgcatatagaacacacaatttcctcgaacctgacagagcttgttacttgggatgacgaatcctggaacgaggcatccatggagtaccgcaagctgatggagggagttgctgaatcactatccccaggttacagtaccgctgccgttcggcgccggggatacctgtctcgcgtattacctgatttgagccagaaacagaacgacgtttcagagaccgaaccggaggatgaggaagatgcagattcttgaacttgaaactcgaggcactacgggattcgtcggaaaacttacggccctaaaggagggcgatcttgccgtacttcgcggattggcaaatcagccgcttgacacgagcctggaaggatttgatctctttaccggattatggtgggggttgcggcaggcggataaatggaccccaggccgagaggtatcgtggctggcatgtaaactctatgcgcagaacccacaacctcagcaagacggagcggcactcccattccttctgcgccaatatatgatgagtcaatatggaaatgatttggatgggagagaccggttctcgcagaaattggaccgtctactcgcatcctcgtttgcagaactggaatcccaattaacatgggcaatccgactcgtacgcagggacgaaccaaaagcgaaaaaaaacccagagagcaatgtcggcgatccccggggtttcgattgggtacatctcatcaacagcctttctcactgggatagaagcactacacgcactaaatgggcagaacaatttctcaatattcataccggagtatagctatgtacatcacaatccacatgatccaaaatcacagtccggcaaatctcaatagggacgatctcggtgcccccaagacctgctacttcggtggtgctttgcggtctcgcatatcgagtcagtgtttgaaacgcagcatccggctcagcagtgaattccgcgacttgcttggtggtatacggacgcgcaggctggccgatatgcttgtacaagaaattgaagaagcagacatgaagtccggcacccgcaaaaaagccgtgaaggttctaaaaaaatgcggattcgatacaaaagaaaaagcaggcgaggaggggcatgatcatacagagatgctgatttacacaactcgcaatgcaatccgggaaatggcggagatcctcaaaaacgcgaacggcgagagcgatgatgagttagcaaagaaattcggcgagcttatagccgagaggacagcggttcccgatatggcactgagtggaagaatgctcgagcctggcaaggctggcaaagaagtctggaaaaacaggaacacaacagttgaagcggctctccaggtggcgcatgccctctcaacacatgaagcgcgtccggaagtagactattacgtggcagctgacgatgtgcgcgaacacgccgaggatgcgggtgctggctatgttgacgaggccatgtacaactcggcatgcttctacaagtacttctccattaactgggagcaattggtgggcaatctgcaggataagaaggaactcgctgcgcatacagtgggcacattcattctgggtgcagcctttgcgaatccgagcggcaagcaaaacagcttcgcagcacacaatttgccggatggtatcgtggtcgaactccgcaagtcccccgtgagctacgcaaatgcctttgcacggccagttgagagccgtggtgagcgaggcgtcattgaacagagtattgcgcagctggggagctatatgaacgatctggatgcaggatacggaggaccggagcatcggttgtggttctctccgaatggccggcatacattgaatgaaggcgagtcttcattccagagtgaagcgctacgctccattgacgatcttatcaccactacgcttactagactgggcttcgaatgggaaaaagtacgtcaagtgaaggtcgatgctgacgcgctaaaggctgaattatgagtaggcacacactttttctcagactggaaggaccgctccaggcgtggggtggccacgaagcgaaattcgtcatacgcaggtgtgcagaagctcccacaaaatcagccatcattgggatgctgcttgctgccaagggtatcgaccggagcaaagcagtagaggaaaattggctatctgagctatcacagctctcgatgggtgtgaggatcgatagacctggtgtgcgctggtgggattatcacacggttggagcagatataggtacccactctgcgcagggcaaggtgaaacggaccgccgctacaggtgagatcgagacgtttgtatcccgaagggaatacctctgcgacgcgagctttctcgttgctctgcagggtgatgcagatcttatggaaaaactcgctactgcgctggctaatcctgaatggacgccctttctcgggcgtaaatcctgtccaccaagtgtaccgctcctaatgcgtgacaaaaacccctctgagcacgactcactcgaagcagcactccgttctctgccttggcaaccacgcatgcagggagacaagacaccggattctttgcattgcatactggactggaaaccatccgagaatgaaccaaacgcaccgcctgatgcagaaatctggtacgatatacctctcagcttcgatccgccttcacatgctccacggttcatagagcgaatagagctcgctgttggaggtcaggacggtgtcccggttgcaggtgttccgctggtgagcaaaacaccctctcccccccgaccgcgtgcagactacaggaattcagagtaccagactgccaggcagaaccgacttgcacacgaccaatatctctgtgtgttttgcaagtcacctgcaaataccgtccaacacatcacgtataggaatgccggtggcgccgaacagcaggaggacctgcgtgccctttgccgcctatgccatgatgcagtaacgatgatcgagtacggagaaggtatgggtatggatcgtgtggacccgaaagacccgagatggaggaagcagataatcgataaccgagcaaatattgttgagcatcgttcgcgtgagaaaaaacgccgcatgatgatcaaggcagacccggagagagcagccagattcaaagacgaagaggaggacgactgatgtactattcgtatctcatcatcgacactggcggcaaccccgatagaccgagaccgggacggaactggataaaagatgtctatgccgtgcatcgccgcctatgtatgggcttcccgtctgatcagaaacgccagtccgacccgcaattcctggatgagtttgatatggttggttttacatcgaacagccgtaggccggacctccacaacgatactcctcgtgggaaatcaaatcgtccaaatttcctgttcaggatcgaaaacacgatcagaggtaacgaaacccaggctgcaatcgtggttcgctctgagaagcctccagactgggaatacgcattttgtaatgctcggacactgctcgcaaatgttccaataatggagccgcgtgtgtataaccccgaattcagggtagggcagaaacttcaataccggattcgcatgaatctgagtaaaaaaagcaagcttgtcgctgctgaaaacggcgagaagaatgaactctctaaacccaaacgaatggcattcacctgggagcctgaccgaagccgcgatgagcaaatccaggactggtttgtgatgaagacagcagggaaggggctgaatgttctttcctgtgaagtagaacaaattggctgggtacgcggctggaagcctgaagcccggcaaaaggtgaacggcaattttgagaagcacaggcatcgtctgcagtaccgatctgcaatgctaaacggtacgctggaagtgaccaatcccgaggaattccacacggcacttactgccggtatcggctctgcgaaagcattcggctttggcttgctctcagtgcgtgaagtatagcacgatgtttcccacacactcgggacggtgcgcgtcccggcgatttttgacgtattagctaaccatctggatcgactccgcgattctccccacgcccgtggggctgtacctccaagtgaagaggttcaacttgaagcggtgaattcttccccacccttgtggggccctatcccattctaaattcaaaacaggaagttcgacatgaaagaacatgaagtgcctgtaatgccgttaaaatcccgaatatcaacgttcaccgtcgagcgtggtgccgttgaacgtgaagggactgctttgatcgtccaggatgcaacaggagtacgggcacaagtgccagtaggcgcaatcgccgcactcatgctagagccgggtacgacgattacccatgaggcaatcaagctatgtgcggaacataaaacactcattttatggactggtgaagctggagtacgtatctattctgcaggtcaagagggagcggcacatacctaccgtcttctacggcaagcccggcttgcactcagcgagaaatcccagcttgctgttgccagagaaatgtacaggttacgattccgtgaagaagccccgttgaagcgatccattgagcaattgcgagggatggagggtgcgcgcgttcgcaatcgctatcgtgagttgagtcttgagtatggaatcgaatggaacgggagaaactacgaccgaaaagactggtgggctggagatcccattaaccgcgcgatctcagcagcgaatagttgcctttatggaatttgtcatgccgcaatactcatcgcggggtacagtgcagccatcggatttgttcacactggatacccgctagcctttgttcacgatattgctgatttatacaagatggatatcgccgtgcccttggcattccgtctcaccgccgaggatgaacatcatatcagcgcaaaagtgcgccatgcactccgtgacgagttccgctcgactggattgctagaaaagctcatccctcaaatcgaatctgttctgaacgcaggcgaggaggaaggaacgccacctccagagatagccggctcccgaagggatgaagacttggagcccgaggatttcccatggctgctccaccttgatcccgaacagcgatacggtggatatcctcaaagtggtcaggcgggtagtaatgctccagataaagaggtgtgaacatggtagtttattcggtcgaatgcgcaccgcagcggcttcgaggtgtactttcacgttactgcctggagataagggcgggactgtttgttggacgtctagacgcgcgaatgcgcgagctattgtgggaaaagatcctcgatcttgccaaagaggatacaaatgcggtaatgatctggcggactccgaccgaacagggttacagcatgcgccagtatggcgaagacgcccgcaattgcgttgagatggatgggatttggcttatcgaatacgagggggcaaggtcctgagtagcattgtgcgctaccagctcgttcgttgagcaattcttttggaaaaatggcgaatatgacgatatttcaagtattctccccacgcccgtggggctgtaccgtaatacttgatgacggggttggtgcggagctcattctccccacgcccgtggggctgtacccttcaaaccccgccgcctggccccgaaggacgaattctccccacgcccgtggggctgtacctcgttatgcggatacttgccgacgactacggttattctccccacgcccgtggggctgtaccctcattgcttagctcgatgggcgatctgcaggcgattctccccacgcccgtggggctgtaccgacttcgctgagcttgctggagccacgatctaaattctccccacgcccgtggggctgtaccgcagaagatcgagacgcacgcgaaggccctggcattctccccacgcccgtggggctgtacccagcccccagtgctggtaccagagcgagccgtcattctccccacgcccgtggggctgtacccaacaggagtgatcatgcgcacgatactcacaaattctccccacgcccgtggggctgtaccttccatcatctgcacaggaggcgtatgagatgcattctccccacgcccgtggggctgtacccacggaggtacgagatcgtgagatatagcatacattctccccacgcccgtggggctgtaccctctaagccatagcggatgttctttgtttatcaattctccccacgcccgtggggctgtaccccacttgcgctatgaatttctctgcatggaccgattctccccacgcccgtggggctgtacccgcaactacaaacggctcacgcgcgaactcaaaattctccccacgcccgtggggctgtaccggaaaatcgaggcgatgtctccgaggactattcattctccccacgcccgtggggctgtacctacgtgcaagagttcgaggatgaaagcggcaacattctccccacgcccgtggggctgtaccggattataggtgttacgacttcgctggcggtcgattctccccacgcccgtggggctgtaccttcgctccgccgccgtgattcgatatagcttttattctccccacgcccgtggggctgtacccattcgcgtattgctttcgatatgcccgccgctattctccccacgcccgtggggctgtacccaca
